United States Patent Application Publication US 2018/0126003 A1 - sequence listing, part 105

SEQ ID NO: 186286 - protein, 816 aa, Artificial Sequence
  derived and/or modified sequence
MSSECDGGSKAVMNGLAPGSNGQDKDMDLTKICTGKGAVTLRASSSYRETPSSSPASPQETRQHESKPGLEPEPSSADEWRLSSSADANGNAQPSSLAAKGYRSVHPNLPSDKSQDATSSSAAQPEVIVVPLYLVNTDRGQEGTARPPTPLGPLGCVPTIPATASAASPLTFPTLDDFIPPHLQRWPHHSQPARASGSFAPISQTPPSFSPPPPLVPPAPEDLRRVSEPDLTGAVSSTDSSPLLNEVSSSLIGTDSQAFPSVSKPSSAYPSTTIVNPTIVLLQHNREQQKRLSSLSDPVSERRVGEQDSAPTQEKPTSPGKAIEKRAKDDSRRVVKSTQDLSDVSMDEVGIPLRNTERSKDWYKTMFKQIHKLNRDDDSDLYSPRYSFSEDTKSPLSVPRSKSEMSYIDGEKVVKRSATLPLPARSSSLKSSSERNDWEPPDKKVDTRKYRAEPKSIYEYQPGKSSVLTNEKMSSAISPTPEISSETPGYIYSSNFHAVKRESDGAPGDLTSLENERQIYKSVLEGGDIPLQGLSGLKRPSSSASTKDSESPRHFIPADYLESTEEFIRRRHDDKEMRPARAKFDFKAQTLKELPLQKGDIVYIYKQIDQNWYEGEHHGRVGIFPRTYIELLPPAEKAQPKKLTPVQVLEYGEAIAKFNFNGDTQVEMSFRKGERITLLRQVDENWYEGRIPGTSRQGIFPITYVDVIKRPLVKNPVDYMDLPFSSSPSRSATASPQQPQAQQRRVTPDRSQTSQDLFSYQALYSYIPQNDDELELRDGDIVDVMEKCDDGWFVGTSRRTKQFGTFPGNYVKPLYL

SEQ ID NO: 186287 - DNA, 2451 bp, Artificial Sequence
  derived and/or modified sequence
atgagcagcgagtgcgacggcggcagcaaggccgtgatgaacggcctggcccccggcagcaacggccaggacaaggacatggacctgaccaagatctgcaccggcaagggcgccgtgaccctgagagccagcagcagctacagagagacccccagcagcagccccgccagcccccaggagaccagacagcacgagagcaagcccggcctggagcccgagcccagcagcgccgacgagtggagactgagcagcagcgccgacgccaacggcaacgcccagcccagcagcctggccgccaagggctacagaagcgtgcaccccaacctgcccagcgacaagagccaggacgccaccagcagcagcgccgcccagcccgaggtgatcgtggtgcccctgtacctggtgaacaccgacagaggccaggagggcaccgccagaccccccacccccctgggccccctgggctgcgtgcccaccatccccgccaccgccagcgccgccagccccctgaccttccccaccctggacgacttcatccccccccacctgcagagatggccccaccacagccagcccgccagagccagcggcagcttcgcccccatcagccagaccccccccagcttcagcccccccccccccctggtgccccccgcccccgaggacctgagaagagtgagcgagcccgacctgaccggcgccgtgagcagcaccgacagcagccccctgctgaacgaggtgagcagcagcctgatcggcaccgacagccaggccttccccagcgtgagcaagcccagcagcgcctaccccagcaccaccatcgtgaaccccaccatcgtgctgctgcagcacaacagagagcagcagaagagactgagcagcctgagcgaccccgtgagcgagagaagagtgggcgagcaggacagcgcccccacccaggagaagcccaccagccccggcaaggccatcgagaagagagccaaggacgacagcagaagagtggtgaagagcacccaggacctgagcgacgtgagcatggacgaggtgggcatccccctgagaaacaccgagagaagcaaggactggtacaagaccatgttcaagcagatccacaagctgaacagagacgacgacagcgacctgtacagccccagatacagcttcagcgaggacaccaagagccccctgagcgtgcccagaagcaagagcgagatgagctacatcgacggcgagaaggtggtgaagagaagcgccaccctgcccctgcccgccagaagcagcagcctgaagagcagcagcgagagaaacgactgggagccccccgacaagaaggtggacaccagaaagtacagagccgagcccaagagcatctacgagtaccagcccggcaagagcagcgtgctgaccaacgagaagatgagcagcgccatcagccccacccccgagatcagcagcgagacccccggctacatctacagcagcaacttccacgccgtgaagagagagagcgacggcgcccccggcgacctgaccagcctggagaacgagagacagatctacaagagcgtgctggagggcggcgacatccccctgcagggcctgagcggcctgaagagacccagcagcagcgccagcaccaaggacagcgagagccccagacacttcatccccgccgactacctggagagcaccgaggagttcatcagaagaagacacgacgacaaggagatgagacccgccagagccaagttcgacttcaaggcccagaccctgaaggagctgcccctgcagaagggcgacatcgtgtacatctacaagcagatcgaccagaactggtacgagggcgagcaccacggcagagtgggcatcttccccagaacctacatcgagctgctgccccccgccgagaaggcccagcccaagaagctgacccccgtgcaggtgctggagtacggcgaggccatcgccaagttcaacttcaacggcgacacccaggtggagatgagcttcagaaagggcgagagaatcaccctgctgagacaggtggacgagaactggtacgagggcagaatccccggcaccagcagacagggcatcttccccatcacctacgtggacgtgatcaagagacccctggtgaagaaccccgtggactacatggacctgcccttcagcagcagccccagcagaagcgccaccgccagcccccagcagccccaggcccagcagagaagagtgacccccgacagaagccagaccagccaggacctgttcagctaccaggccctgtacagctacatcccccagaacgacgacgagctggagctgagagacggcgacatcgtggacgtgatggagaagtgcgacgacggctggttcgtgggcaccagcagaagaaccaagcagttcggcaccttccccggcaactacgtgaagcccctgtacctgtag

SEQ ID NO: 186288 - DNA, 2451 bp, Artificial Sequence
  derived and/or modified sequence
atgtccagcgagtgcgatgggggctccaaagcggtgatgaacggccttgcgccaggctctaatggccaggacaaggatatggatctgactaaaatatgtacaggcaagggagctgtgacactgcgagctagttcctcctacagagagacaccttcatcctctcctgcaagtccccaggaaactcggcagcacgagagcaagccagggttagagcctgaaccttcttccgcagacgaatggaggttgtccagcagcgccgacgcaaacggcaacgctcagccaagtagcctggctgctaaaggctaccggagcgtgcacccaaacctacccagcgacaagtcccaggacgccactagttcttccgccgctcagccggaagtaattgtagtacctttgtatctggtgaatacagacagggggcaggagggcaccgcccgcccccctacgcctctcggtccactgggatgcgtgcctactatccccgccaccgcctcagccgccagtcccctaacctttcctacactggacgatttcatcccaccgcacctccagcggtggcctcaccactcccagcctgccagggcttctggctcatttgcgcccatcagccagacgcccccctctttttcaccacctccacctctggtcccacctgctcctgaggatctccgcagggtgtctgagccggacctaacgggagctgtgtctagtacagactcttcaccgctgctcaacgaggtgagtagctccctgatcggcacagatagtcaggcctttccctccgtgagcaagccgtctagtgcttatccaagtacgacaattgtcaaccccactatagtgcttttacagcataacagagagcaacagaagagactttcctcattatcagatccagtcagcgagcggagggttggcgagcaggatagcgcacccacccaggagaaaccgacatccccagggaaagctattgaaaaaagagccaaagacgactctcgccgggttgtgaagtccactcaagatctctcggatgtaagcatggatgaagttggtatccccttgcgcaatactgaacgctccaaagattggtacaagaccatgtttaaacaaatccacaaattaaatagggacgacgactcagatctgtacagcccccgctacagcttctccgaagacaccaagagtccattgagtgtgcccaggtctaagtccgagatgtcttacatcgacggcgagaaggtggtgaagcgctcagcaacattgccgttacctgcacgttcttccagtttgaaatcaagctcagagcgcaatgactgggagcctcctgacaaaaaggtggataccaggaagtatcgggctgagccaaaatccatttatgaatatcagcccggaaagtcaagcgttcttacgaatgaaaaaatgagtagtgccatatcaccgacaccggagatttctagcgaaacacctggctatatttactcatccaacttccatgcagtaaagcgggagtctgatggcgcccccggagacctgacctccctcgagaatgagcggcagatttacaagtcagtcctcgaggggggggacattcccttgcagggactctctggcctgaaaagacctagtagctcagcctcgacgaaagattcagagagtccaaggcatttcattcccgcagattatctcgaaagcacagaagagttcatccggagacgccacgacgataaggagatgcgaccagcaagagctaagtttgatttcaaagcacagacacttaaggagctgccactgcagaaaggggatatagtgtacatttataagcaaatcgaccagaactggtacgagggagagcaccacggacgcgtcggtatcttcccccgaacctatatcgagctcttaccacccgccgaaaaagctcagcccaaaaaactcacacccgtgcaggttctcgagtacggagaggcaatcgcaaaattcaacttcaacggcgatacacaggtggaaatgtcattccgcaagggagagcggataacactccttcggcaggtagacgagaattggtatgaagggcgtatacctggcacctcgaggcagggaattttcccgatcacatatgtagacgtcataaaacggccgttagttaaaaacccagtggattacatggaccttcccttttcatcttctccatcccggtctgccactgcgtccccgcagcaaccccaagcccaacaaaggcgcgttaccccagatcgcagtcaaacttctcaggatctgttctcgtatcaggcactgtacagttatataccacagaacgatgatgaactcgaactccgggatggagatatcgttgacgtgatggagaagtgtgatgatgggtggttcgtgggaacgtctagacggacaaaacagttcggtacctttccaggtaactatgtgaaacccctgtacctgtag

SEQ ID NO: 186289 - DNA, 2451 bp, Artificial Sequence
  derived and/or modified sequence
atgagcagtgaatgtgatggcggcagcaaggctgtgatgaatggcctggcccctggcagcaatggccaggacaaggacatggacctgaccaagatctgcacaggaaaaggagctgtgaccctgcgggccagcagcagctaccgggagacccccagcagcagccctgccagcccccaggagacccggcagcacgagagcaagccaggcctggagcctgagcccagcagcgcagatgagtggaggctgagcagcagcgcagatgccaatggaaatgcccagcccagcagcctggccgccaagggctacagatctgtgcaccccaacctgcccagcgacaagagccaggatgccaccagcagcagcgctgcccagcctgaggtgattgtggtgcccctgtacctggtgaacacagaccggggccaggagggcacagcccggccccccacccccctgggccccctgggctgtgtgcccaccatcccagccacagccagcgctgccagccccctgaccttccccaccctggatgacttcatccccccccacctgcagcgctggccccaccacagccagcctgcccgggccagcggcagctttgcccccatcagccagaccccacccagcttcagccccccaccacccctggtgcccccagcccctgaggacctgcggcgggtgtctgagccagacctgaccggggctgtgagcagcacagacagcagccccctgctgaatgaggtgagcagcagcctcatcggcacagacagccaggccttccccagcgtgtccaagcccagcagcgcctaccccagcaccaccatcgtgaaccccaccatcgtgctgctgcagcacaaccgggagcagcagaagaggctgagcagcctgagtgaccctgtgtctgagcggcgggtgggggagcaggacagcgcccccacccaggagaagcccaccagccctgggaaggccatcgagaagagggccaaggatgacagccggcgggtggtgaagagcacccaggacctgagtgatgtgtccatggatgaggtgggcatccccctgaggaacacagagaggagcaaggactggtacaagaccatgttcaagcagatccacaagctgaacagagatgatgacagcgacctgtacagcccccgctacagcttcagcgaggacaccaagagccccctgtctgtgcccaggagcaagtctgagatgagctacattgatggagagaaggtggtgaagaggtctgccaccctgcccctgcctgcccggagcagcagcctgaagagcagcagcgagagaaatgactgggagcccccagacaagaaggtggacaccaggaagtacagagctgagcccaagagcatctatgagtaccagcccgggaagagctctgtgctgaccaatgagaagatgagcagcgccatcagccccaccccagagatcagcagcgagaccccaggctacatctacagcagcaacttccacgctgtgaagcgggagagtgatggagcccctggggacctgaccagcctggagaatgaaaggcagatctacaagtctgtgctggagggcggggacatccccctgcagggcctgagcggcctgaagaggcccagcagcagcgccagcaccaaggacagcgagagccccaggcacttcatcccagctgactacctggagagcacagaggagttcatcagaagaagacatgatgacaaggagatgaggcctgcccgggccaagtttgacttcaaggcccagaccctgaaggagctgcccctgcagaagggggacatcgtgtacatctacaagcagattgaccagaactggtatgaaggagagcaccacggccgggtgggcatcttccccaggacctacatcgagctgctgcccccagctgagaaggcccagcccaagaagctgacccctgtgcaggtgctggagtatggagaggccatcgccaagttcaacttcaatggagacacccaggtggagatgtccttcaggaagggggagcgcatcaccctgctgcggcaggtggatgagaactggtatgagggccgcatccctggcaccagccggcagggcatcttccccatcacctacgtggatgtgatcaagaggcccctggtgaagaaccctgtggactacatggacctgcccttcagcagcagccccagccgcagcgccacagccagcccccagcagccccaggcccagcagaggagagtgaccccagacaggagccagaccagccaggacctcttctcctaccaggccctgtacagctacatcccccagaatgatgatgagctggagctgagagatggagacatcgtggatgtgatggagaagtgtgatgatggctggtttgtgggcaccagcaggaggaccaagcagtttggcaccttccctggcaactacgtgaagcccctgtacctgtag

SEQ ID NO: 186290 - DNA, 2451 bp, Artificial Sequence
  derived and/or modified sequence
atgagcagcgagtgcgacggcggcagcaaggccgtgatgaacggcctagcccccggctcaaacggccaggataaggatatggacctgactaagatttgtacgggcaagggcgccgtgaccctaagggctagctcctcctaccgagaaaccccatcatcctcacctgctagccctcaggagacccggcagcacgagagcaaaccagggctggagcccgaaccttctagtgccgacgagtggcggctcagttctagtgctgatgccaacggaaacgcccagccttcctccctcgcggccaagggttatcggtccgtgcaccccaacctcccgagcgacaaaagtcaagacgcaaccagttcttcagccgctcagccggaagtgatcgtcgtgcctctctatctcgttaacaccgaccgaggacaagaaggtacagccaggccccctacccctcttggaccactgggatgcgtgcccacaatacctgccacagcgagcgctgcttctccccttacttttccaaccctggacgacttcattccaccccacctgcagcgttggccccaccattctcagcccgcccgtgcatctggtagctttgccccaatctcacaaactccccccagcttctctcccccccctcccctggtgcctccggcccctgaagaccttagacgcgtctccgagcccgatctcacgggtgctgtttcttctacggatagttctcctctgctcaacgaggtctcgtccagtttaattggaacagactcccaggctttcccatctgtgtccaagccctcgagcgcttatccatccactactattgtgaatcccacaatcgtgcttctccaacacaacagagaacagcagaaaagactgtcctctctctcggaccctgtctctgagaggagggtcggagaacaggacagtgcacctacacaggaaaagcctacttcgccgggcaaggccatcgagaaacgggcaaaggacgatagccgaagggtggtcaaatccactcaggacctcagcgatgtgtcaatggacgaggttggtattcctctgcgcaatacagagaggagtaaggactggtataagaccatgttcaagcagatccataagctgaatcgcgatgacgactccgacctgtactctccaaggtatagcttctcagaggatacaaaaagccctctttcagtgccacgctcaaagtctgaaatgagctacatcgatggcgagaaggtcgttaagcgctcggcaacgctccctctgcccgctcggtcatcatctctcaagtcgagtagtgaaagaaatgactgggagcctcctgataaaaaggtggacacccgaaaataccgggcagagccaaaatcgatatacgagtatcaaccaggaaagagtagtgtccttacaaacgagaagatgtcttctgccatctccccgactccagagatctcctccgaaacccctggatacatatattcttctaatttccatgctgtgaaaagagaaagtgacggagctcccggggacctcacatccctggagaacgaacgacagatttacaagagcgtgctagaagggggagacattccattacagggcttatccgggctgaaaagaccgtccagcagtgcaagtacgaaggattcagagtccccaaggcacttcatcccagccgattacctggaatccacggaggagttcatcagacgacgccatgacgacaaagaaatgagacccgccagggccaagtttgatttcaaagctcaaactttaaaagagcttcccctgcaaaaaggcgacatcgtgtacatttataagcagatagatcaaaattggtacgaaggcgagcatcacgggcgggtgggcatatttcctcggacctatatcgaactgctcccgccagctgagaaggcacaacccaagaaactcaccccagtgcaggtcctggaatatggcgaagcaattgccaagttcaacttcaatggggatacgcaggtggagatgagttttcgaaagggcgagcggataacgctgctccgtcaggtagatgaaaattggtacgaaggccgaatacccggtactagtagacaagggattttcccaatcacttacgtcgacgttattaaacgcccactcgtgaaaaacccagtggattacatggacctgcctttctcttccagtcccagcaggtcagctaccgcctctccgcagcagccccaggcacagcagcggcgggtcactcccgaccgctctcagacatctcaggacctgttctcctatcaggccctctacagctacattccacaaaacgatgacgaattggagttaagggacggggacattgtggacgttatggaaaagtgcgacgatggatggtttgtcgggaccagcagaagaaccaagcagtttggcaccttccctggaaactacgtcaaaccactttacctttag

SEQ ID NO: 186291 - DNA, 2451 bp, Artificial Sequence
  derived and/or modified sequence
atgtcatcggagtgcgacgggggaagcaaagcagtgatgaatggtctggctccaggatccaatggccaggacaaagacatggacttgaccaaaatctgtactggcaagggggctgtgaccctgcgggcatcgtcatcctacagggagaccccctcatcaagccccgcaagtccacaagagacccgtcaacacgaaagtaaaccaggcctggaaccagagccatccagtgcagacgagtggcgtttatcaagctcagccgatgccaatggcaacgcacagccctcgtccctggcagcaaaaggctataggtcggtccacccaaacctgccttcggacaaatcacaggacgcaacaagcagcagtgccgctcaacctgaggtcatcgttgtccctctgtatctggtgaacacagaccgcggacaggaggggactgctaggccccctaccccactcggacctctgggatgcgtccctactataccagcaaccgcctccgcagcaagtccgctcacctttccgaccctggacgatttcatacctccgcacctgcaaaggtggcctcaccacagccagccagctagagccagtggaagctttgcacccatcagtcagacccccccatccttctcaccaccccctccacttgttcctccagcccctgaggatttacgaagggtgtccgagcctgatctgacaggagccgtatcttcgactgactcatctcccctgctcaacgaggttagcagtagcctgatcggcacagactcccaggcattccccagcgtttcaaagccttcctccgcatatccctcgactaccattgtgaacccaacgattgtgctactccagcataatagggagcagcagaaacgtctgtcttccttgtccgaccctgtcagcgagagacgggtgggcgaacaggacagcgctcccacgcaggagaagcccaccagccctggcaaagctatagagaagcgtgccaaggacgactcgcgacgagtggtgaagtctacacaagacctctccgatgtgtccatggacgaggttggaatcccactgcggaatacagagaggagtaaggattggtataaaactatgtttaaacaaattcataaactcaatcgagacgacgattctgacctttactccccgaggtacagctttagcgaagatacaaagagcccactgtcagttcctcgctccaagtctgaaatgagttacattgacggggaaaaggtagtgaagagatctgctactctgccgctgccagcccgaagctcatctttaaagagtagctccgagcgcaacgattgggagcccccagataagaaggtggacacgcgcaagtatagagcggagccaaaaagtatttatgaataccagccgggaaagtcaagtgtgctaacaaatgagaaaatgtcatcagccatctctcctacccccgagataagttcagagacaccaggctatatctactcctcaaattttcacgccgtcaagagggaaagcgacggcgcacctggcgatttgacttctcttgagaatgagcgccagatttacaagtcagtgctggaagggggtgacattcccctgcagggcttgagcggcttgaaaaggccctcctccagcgccagtacgaaggattctgagagtcccagacacttcatccccgctgattaccttgagtccactgaagagttcatacggcgacgacatgatgataaggaaatgagacccgctagagctaaatttgactttaaggcgcagaccttaaaggaactgcctctgcaaaaaggagatatcgtctatatttacaaacagatagatcaaaattggtacgagggagaacaccatggtagggtggggattttcccacgtacatacatcgagcttctaccacccgctgagaaggcacagcccaagaagctgacccccgtgcaggtcctggaatacggcgaagctatcgcaaagttcaactttaatggagacacacaggttgagatgtcattcaggaaaggagagcggatcacacttttgcgccaggtcgatgaaaattggtacgagggacggattccaggcactagcagacagggcatctttcctataacttacgtggacgtgattaaaaggcccctggttaaaaaccccgtcgattacatggatctcccattttcatcatcacctagtcggtctgctacggcttcccctcagcagccacaggcccaacagcgccgtgtgaccccggatagatctcagacttcccaggatctgttttcctatcaggccctttactcttatattccacagaacgacgacgagcttgaattgagggatggcgacattgtggatgttatggaaaaatgtgacgatggctggttcgttggaacctctcggcgtactaaacaattcggcacatttcccggtaattacgtaaaaccactgtacttatag

SEQ ID NO: 186292 - DNA, 5927 bp, Artificial Sequence
  derived and/or modified sequence
gcagcgtgtagtgcgagtggggcggacgcgcgcagcccgcccgcccggcgaccagcaaggagttggcatcctttggaagagttcgtgaaagctttctgcccagagctcctggaccaatgcatcttcccaccaccttaaaccactgagcagttcagagccccagttgcagacgacttgtcctgccaccaccatgagttctgaatgtgatggtggttccaaagctgtgatgaatggcttggcacctggcagcaatgggcaagacaaagacatggatcttacaaaaatctgcactgggaagggagcggtgactctccgggcctcgtcttcctacagggaaaccccaagcagtagccctgcgagccctcaggaaacccggcaacacgaaagcaaaccaggtctggagccagagccttcttcagcagatgagtggaggctttcttccagtgctgatgccaatggaaatgcccagccctcttcactcgctgccaagggctacagaagtgtgcatcccaaccttccttctgacaagtcccaggatgccacttcctccagtgcagcccagccggaggtaatagttgtccctctctacctggttaatactgacagagggcaagaaggcactgccagacctccaacacctctggggcctcttggctgcgtccccacaatcccagcgactgcctctgccgcctcacctctgaccttcccgactctagatgatttcattccccctcatctgcagaggtggccccaccacagccagccagcccgcgcctctggctcctttgcccccattagccagacgccaccatccttctcaccaccacctccgctggtccctcctgccccggaggacctccgcagagtctcggagcctgacctcacgggagctgtttcgagtaccgattccagtcctctactaaatgaagtttcttcttcccttattggaactgattcccaagcctttccatcagttagcaagccttcatccgcctatccctccacaacgattgtcaatcctactattgtgctcttgcaacacaatcgagaacagcaaaaacgactcagtagcctttcagatcctgtctcagaaagaagagtgggagagcaggactcagcaccaacccaggaaaaacccacctcacctggcaaggctattgaaaaaagagcaaaggatgacagtaggcgggtggtgaagagcactcaggacttaagcgatgtttccatggatgaagtgggcatcccactccggaacactgagagatcaaaagactggtacaagactatgtttaaacagatccacaaactgaacagagatgatgattcagatctgtactctcccagatactcattttctgaagacacaaaatctcccctttctgtgcctcgctcaaaaagtgagatgagctacattgatggtgagaaggtagtcaagaggtcggccacactacccctcccagcccgctcttcctcactgaagtcaagctcagaaagaaatgactgggaacccccagataagaaagtagacacaagaaaatatcgtgcagagcccaagagcatttacgaatatcagcctggcaagtcttccgttctgaccaacgaaaagatgagctcagccatcagccctactccggaaatttcttcagagactcctggatatatatattcttccaacttccatgcagtgaagagggaatcagacggggctcctggggatctcactagcttggagaatgagagacaaatttataaaagtgtcttggaaggtggtgacatccctcttcagggcctgagtgggctcaagcgaccatccagctctgcttccactaaagattcagaatcgccaagacattttataccagctgattacttggaatccacggaagaatttattcgaagacgtcatgatgataaagagatgagacctgccagagccaaatttgactttaaagctcagacactaaaggagcttcctctgcagaagggagatattgtttacatttataagcaaattgatcagaactggtatgaaggagaacaccacggccgggtgggaatcttcccacgcacctacatcgagcttcttcctcctgctgagaaggcacagcccaaaaagttgacaccagtgcaggttttggaatatggagaagctattgctaagtttaactttaatggtgatacacaagtagaaatgtccttcagaaagggtgagaggatcacactgctccggcaggtagatgagaactggtacgaagggaggatcccggggacatcccgacaaggcatcttccccatcacctacgtggatgtgatcaagcgaccactggtgaaaaaccctgtggattacatggacctgcctttctcctcctccccaagtcgcagtgccactgcaagcccacagcaacctcaagcccagcagcgaagagtcacccccgacaggagtcaaacctcacaagatttatttagctatcaagcattatatagctatataccacagaatgatgatgagttggaactccgcgatggagatatcgttgatgtcatggaaaaatgtgacgatggatggtttgttggtacttcaagaaggacaaagcagtttggtacttttccaggcaactatgtaaaacctttgtatctataagaagactgaaaaccatggagattatttttattggaggaggaagcatcattcatgaaccgatctttttagttgagtcagtaggaaaattaatacagtggataaagtaagaagcaaaagacagggacagagaagtgttgtgtttaaaacccaagcctgtctaaggttactgtgtattagacagggccgaactagtgtgctgagcaaaaagaattgaagcaaattgtatttacttagccgcttctgggagccacttcagcctttcccctcccctccacttcttgggtaatctgacctgaagcatagtccaggagcagagttagccagaaatgcctcctgctgccccagccttagagagctcccatctcaatcattgagcctgaaggcttcaagcccaagaatgcaacaagacccccagcctacatttctcagctcccctggagccagctgatcctgtaacgctgctggaggtcagtctgagctaccaagactgtccctagacaaaggtggagtcccccacactgcccaagaccaaatccctcactcaacctgctgaggtgtggatggggaaacagaggcaaaactgaggcacctgatgcattcagcctgctgtgcagcagtgccattgactgccctgatgttcagagagaaacgcacacaaggtttgcccatgagaattggggagcagatggccaagcagataggttatgtctgttttctgagtgatgaagtcaggaagccctgtggctctggaggccacttgtggttcattcttttcccatatccttggcttttagaaatggttaccttcaggacagtgcagctgcatttatcagagcactattgctaagttttcttttctggcttgtgtttttctgggacagtttagaattgggaggcctattctcatagaacaccaaaaatgatgttcagtgattcatttaacatacaccaatgtactctggctgctggggggacaaccataagcaagacatgcccagggtttgccgtggctccagatctactccctgtaggagttcaaggatcacacaaacggtagtaaccagggttgtgaatctgagtacaccctggcaaggcttctcttcagactgaagcagcaattctgccactaccagcagcaaccaggacgtctgttctttgtgggggccagatcagaagagagaggcccctgtgacgcccgggctgcttggtcacaactctgtccaattcaaggatgtttatcggcctctcttagatcctgagtgagacaaatacagaaatgacccattccctgcccaccagaaactcagaggtgattggggagactgacacaggaaaatgaacttaatcaagagagactgtgatatgtgctaagaagggtgtgagggagggagagatgaattttccctggagggatcctagaaagcattgtcatattgccatctccattagctcacttttaaacaactagggtgctggaagaacctttgtctgagggtagttcatagctggaaatacttggaatattttccagagtctctaaactctcatcttcccccacagatacacatccaagctcacaaataggagtagcaattctaggtggtagggttgtgtacggaacccctggctgtctgcatatatctcagaattaccccaggaccattgtcccaaagtctagagtctttacaggtaggcaaaatttgttttcaatgcctgtgcctcagctgctgtcacaaatacccatcttaggatcccatcagcttcccatcccccaccagacagccacagtaccctcactttctccctattgttctttcaaatcctgttctcaggaaagaaactgccactaattcattcacactaaggtgtaaatgattgataataggaatgagttacctcttcccacagacatttgtttttaagtatgacagagcagggccttaatcccaagggaaaaggttatggaactggagggggtgagctttctgggtagaaggagacttcctgaatttccttaaaacccagtaagagtaagacctgttgttttggaaggtctgctccaccatctaagagcactgtttttttttttttgttgttgttgttgttttacggtctctgagggaatatagtaaaaatgcatatgcacgtgcaatttgcacggcagcatttcaccgattgtggactgtattggctaatgtgtttcctggtctttagatgcaaaccattaataacactatcttatctcatagttttttcaggggtgcttcttgattagtagggaattttgaacacctctttaaatacagctagaaaataaaaccaatttgtaaagccacatttgcatatgatgccagcctcacgcatttgtatatctccagaaattcaggtatgcctcaccaatttgcccgtctttaataaaatcttgtgttaaaatttgcatcacgtcgccttcctatgtatgacgaaacaagaaacagagatttccaattgctcttttgtcttcagacatttagtaatataaagtacctatttttatgctgaaatgtttatacaggtttattaatagcaagtgcaactaactggcggcatgccttgcaacacattttgatatattagccatgcttccgggtaaaggcaagccccaaactccttatcttttgcagtctctctgggatcagtaaaagaaaaaaaaaataatgtgcttaagaagtgggactgtaaatatgtatatttaactttgtatagcccatgtacctaccttgtatagaaaaataattttaaaaatttgaatggaagggggtaaaggaagtcatgaagtttttttgcatttttatttaaatgaaggaattccaaataactcacctacagatttttagcacaaaaatagccattgtaaagtgttaaaatttacgataagtattctattggggaggaaaggtaactctgatctcagttacagtttttttttcctttttaatttcattattttgggtttttggtttttgcagtcctatttatctgcagtcgtattaagtcctattgctagaataggttactacaaaaaaggttatattctgaaagaaaaataactgacattatatataaccaattaatttaaagtattgccatttaaattacacactgagagcatgtcctatgcagacatagatttttctgttcatttatttttcttcattgcagtggattgatttgataaatagatgtgttgaattactacatttgctgtacatattatttaataaactttattcagaattgcgtggca

SEQ ID NO: 186293 - protein, 789 aa, Artificial Sequence
  derived and/or modified sequence
MGTKMADLDSPPKLSGVQQPSEGVGGGRCSEISAELIRSLTELQELEAVYERLCGEEKVVERELDALLEQQNTIESKMVTLHRMGPNLQLIEGDAKQLAGMITFTCNLAENVSSKVRQLDLAKNRLYQAIQRADDILDLKFCMDGVQTALRSEDYEQAAAHTHRYLCLDKSVIELSRQGKEGSMIDANLKLLQEAEQRLKAIVAEKFAIATKEGDLPQVERFFKIFPLLGLHEEGLRKFSEYLCKQVASKAEENLLMVLGTDMSDRRAAVIFADTLTLLFEGIARIVETHQPIVETYYGPGRLYTLIKYLQVECDRQVEKVVDKFIKQRDYHQQFRHVQNNLMRNSTTEKIEPRELDPILTEVTLMNARSELYLRFLKKRISSDFEVGDSMASEEVKQEHQKCLDKLLNNCLLSCTMQELIGLYVTMEEYFMRETVNKAVALDTYEKGQLTSSMVDDVFYIVKKCIGRALSSSSIDCLCAMINLATTELESDFRDVLCNKLRMGFPATTFQDIQRGVTSAVNIMHSSLQQGKFDTKGIESTDEAKMSFLVTLNNVEVCSENISTLKKTLESDCTKLFSQGIGGEQAQAKFDSCLSDLAAVSNKFRDLLQEGLTELNSTAIKPQVQPWINSFFSVSHNIEEEEFNDYEANDPWVQQFILNLEQQMAEFKASLSPVIYDSLTGLMTSLVAVELEKVVLKSTFNRLGGLQFDKELRSLIAYLTTVTTWTIRDKFARLSQMATILNLERVTEILDYWGPNSGPLTWRLTPAEVRQVLALRIDFRSEDIKRLRL

SEQ ID NO: 186294 - protein, 337 aa, Artificial Sequence
  derived and/or modified sequence
MADLDSPPKLSGVQQPSEGVGGGRCSEISAELIRSLTELQELEAVYERLCGEEKVVERELDALLEQQNTIESKMVTLHRMGPNLQLIEGDAKQLAGMITFTCNLAENVSSKVRQLDLAKNRLYQAIQRADDILDLKFCMDGVQTALRSEDYEQAAAHTHRYLCLDKSVIELSRQGKEGSMIDANLKLLQEAEQRLKAIVAEKFAIATKEGDLPQVERFFKIFPLLGLHEEGLRKFSEYLCKQVASKAEENLLMVLGTDMSDRRAAVIFADTLTLLFEGIARIVETHQPIVETYYGPGRLYTLIKYLQVECDRQVEKVVDKFIKQRDYHQQNFVFSFF

SEQ ID NO: 186295 - DNA, 2370 bp, Artificial Sequence
  derived and/or modified sequence
atgggcacaaaaatggcggatttggacagcccaccaaagctgtccggagtccagcaaccaagcgagggggtagggggcggccgatgcagcgagatttccgcggagttgattaggagcctcacagaactgcaggaactagaagcggtctatgagcgcctatgcggagaagaaaaagtcgtcgagagagaactcgatgcactgctggagcagcagaatactatcgaatcaaaaatggtgacgctccaccggatgggccccaacttgcagttgatcgagggcgacgctaaacagctcgcgggaatgatcacctttacttgtaaccttgccgaaaacgttagctcaaaagtgagacaacttgatcttgctaagaatagactgtaccaggctattcagcgcgccgacgacatactggatctgaaattttgcatggacggcgtgcagacagccctgcgatcagaggactacgagcaggcagccgcccacacgcatcggtacctgtgcctcgacaagagtgtgatagagttgtctcgtcagggcaaggaggggtctatgattgacgccaatctcaagttactgcaggaggccgagcagaggcttaaagccatcgtggccgagaaattcgccatcgctactaaagagggggatctcccccaggtggagaggttcttcaagatcttccccctcctagggttacacgaggagggattgaggaaattctctgaatacttgtgtaagcaggtggccagcaaggctgaggagaatctgctgatggtcctgggaacagacatgagtgacaggcgagcagctgttatctttgccgatacgctgacactactcttcgaaggcattgctcgaatcgtcgagacgcaccagccaatcgtggaaacctattatggacctggacgactgtatacactcatcaaatatctccaggtcgagtgtgataggcaagtggaaaaagtagtggataagttcattaagcagcgcgactaccatcagcaatttcggcacgtccaaaacaacctgatgaggaattctaccacagagaagatcgagccgcgagagctggaccctattctgacagaggtgactttaatgaatgccagatcggagctctacctccgatttcttaagaagagaatttctagcgactttgaagttggggactctatggcttcggaggaggtcaagcaggaacaccagaagtgtctcgacaaattgctgaacaactgcctcctcagttgtacaatgcaagagctgataggattatatgtgaccatggaggagtattttatgcgggagaccgtcaacaaagcagtggctctcgacacttacgagaaaggacagctcacaagcagcatggtggatgacgttttttacatcgtgaagaagtgcatcggcagggcgctcagcagtagtagtattgactgtctctgtgcaatgatcaacctcgcaactaccgagctggagtccgattttagagatgttctgtgcaacaagctcaggatgggcttcccagcaaccactttccaggacatccagagaggtgtgacctccgcggtaaatatcatgcattcatctctgcaacaggggaagtttgacaccaaaggtattgagagtaccgacgaggctaagatgtcattcctggttacgttgaataacgttgaggtttgctccgagaacatttctacattgaagaaaacactggagagtgattgcaccaagctgttctctcaagggatcggcggagagcaggcgcaagctaagttcgattcatgtctgtccgacttggccgccgtaagcaataaatttcgcgatctgctgcaggaggggctgacagagttgaattcaaccgccatcaaaccccaagtgcagccttggattaacagttttttctccgtaagccataacattgaggaagaggaattcaacgactatgaggccaatgatccatgggtgcagcagttcatcctaaacctagagcagcagatggcggagtttaaagccagtctgtctccagtaatttatgatagcctcaccggtctgatgaccagtctggtggcggttgaactggagaaggtggtcctaaaaagcaccttcaacagattgggagggctgcaatttgacaaagagctgcgaagccttatcgcctacctcaccaccgtcacaacctggacaattcgtgataaatttgcccgactgagtcagatggctacaattttgaatctggaacgtgtgacagagattctggactattggggccctaactctggccccctgacctggcggcttacgcccgcagaggtacgacaggttctggcccttcggattgacttccgctccgaggacatcaagaggctgcgcctgtag

SEQ ID NO: 186296 - DNA, 2370 bp, Artificial Sequence
  derived and/or modified sequence
atgggcaccaagatggctgacctggacagcccccccaagctgtctggagtgcagcagcccagcgagggcgtgggcggcggccgctgcagcgagatctctgctgagctgatccgcagcctgacagagctgcaggagctggaggccgtgtatgaaaggctgtgtggggaggagaaggtggtggagcgggagctggatgccctgctggagcagcagaacaccatcgagagcaagatggtgaccctgcacaggatgggccccaacctgcagctgattgaaggagatgccaagcagctggccggcatgatcaccttcacctgcaacctggccgagaatgtgagcagcaaggtgcggcagctggacctggccaagaaccggctgtaccaggccatccagagagcagatgacatcctggacctgaagttctgcatggatggagtgcagacagccctgcggagtgaagattatgagcaggccgccgcccacacccaccgctacctgtgcctggacaagtctgtgattgagctgagccggcagggcaaggagggctccatgattgatgccaacctgaagctgctgcaggaggccgagcagaggctgaaggccatcgtggccgagaagtttgccatcgccaccaaggagggggacctgccccaggtggagcgcttcttcaagatcttccccctgctgggcctgcacgaggagggcctgaggaagttcagcgagtacctgtgcaagcaggtggccagcaaggccgaggagaacctgctgatggtgctgggcacagacatgtctgaccggcgggctgctgtgatctttgctgacaccctgaccctgctgtttgagggcatcgcccgcatcgtggagacccaccagcccatcgtggagacctactacggccctggccgcctgtacaccctcatcaagtacctgcaggtggagtgtgaccggcaggtggagaaggtggtggacaagttcatcaagcagagggactaccaccagcagttcagacatgtgcagaacaacctgatgaggaacagcaccacagagaagattgagccccgggagctggaccccatcctgacagaggtgaccctgatgaatgcccggtctgagctgtacctgcgcttcctgaagaagaggatcagcagtgactttgaggtgggggacagcatggccagcgaggaggtgaagcaggagcaccagaagtgcctggacaagctgctgaacaactgcctgctgagctgcaccatgcaggagctgattggcctgtatgtgaccatggaggagtacttcatgagggagaccgtgaacaaggctgtggccctggacacctatgagaagggccagctgaccagctccatggtggatgatgtgttctacatcgtgaagaagtgcatcggccgggccctgagcagcagcagcattgactgcctgtgtgccatgatcaacctggccaccacagagctggagagtgacttcagagatgtgctgtgcaacaagctgaggatgggcttccctgccaccaccttccaggacatccagaggggcgtgaccagcgctgtgaacatcatgcacagcagcctgcagcagggcaagtttgacaccaagggcatcgagagcacagatgaggccaagatgtccttcctggtgaccctgaacaacgtggaggtgtgcagcgagaacatcagcaccctgaagaagaccctggagagtgactgcaccaagctgttcagccagggcattggaggagagcaggcccaggccaagtttgacagctgcctgagtgacctggccgctgtgagcaacaagttccgggacctgctgcaggagggcctgacagagctgaacagcacagccatcaagccccaggtgcagccctggatcaacagcttcttctctgtgagccacaacatcgaggaggaggagttcaatgactatgaggccaatgacccctgggtgcagcagttcatcctgaacctggagcagcagatggccgagttcaaggccagcctgagccctgtgatctatgacagcctgaccggcctgatgaccagcctggtggccgtggagctggagaaggtggtgctgaagagcaccttcaaccggctgggcggcctgcagtttgacaaggagctgcggagcctcatcgcctacctgaccaccgtgaccacctggaccatccgggacaagtttgcccggctgagccagatggccaccatcctgaacctggagcgggtgacagagatcctggactactggggccccaacagcggccccctgacctggaggctgaccccagctgaggtgcggcaggtgctggccctgagaattgacttccgctctgaggacatcaagaggctgcggctgtag

SEQ ID NO: 186297 - DNA, 2370 bp, Artificial Sequence
  derived and/or modified sequence
atgggcaccaagatggccgacctggacagcccccccaagctgagcggagtacagcagccaagtgagggagtggggggcggccgctgctccgaaattagtgcggaactgattaggagcctgacagagttgcaggaattggaagctgtatacgaacgactttgcggcgaagaaaaagtcgtagagcgggagctggacgccttactggaacagcagaataccatagagagtaagatggtgaccttacaccggatgggtcccaaccttcagttaatcgaaggcgacgccaagcaactggcagggatgatcacgtttacatgcaatctggccgagaacgtgtcttctaaagtcagacagttggatcttgcaaagaacagactgtaccaggcgattcagcgcgcggatgatattttagacctgaagttctgcatggatggggttcaaactgctctgcgatcagaagactatgaacaggccgccgcacacacacaccggtatctgtgtttagataagtctgtcatcgaactgtcccggcaaggtaaagagggatccatgattgacgcaaacttgaagctcctgcaggaagcggaacagaggctgaaggccattgtggccgaaaagttcgcgattgcaacaaaggagggagatctgccacaggtcgaaagattcttcaagatctttccgttgttaggactccatgaggaaggcctcagaaagttttcggagtacttgtgcaaacaggtcgcctcaaaggcggaagagaacctcctcatggttctcgggacggatatgtctgacaggcgcgccgcagtgatcttcgccgacaccctgacactgttgtttgaagggattgctaggattgtggaaacgcatcagcccatagtggaaacatactacggccccggccgactgtacacactgattaagtacctgcaggtggaatgtgatcgccaagtagagaaagtcgtggacaagttcatcaagcagcgggattaccaccaacaattcaggcatgtgcaaaacaatctgatgcgaaacagtactaccgagaagattgaaccccgggagctcgatcctattttgactgaggtgactctaatgaacgcccgtagcgaactgtatctgcgatttctcaaaaagcgcatcagttccgactttgaggtgggcgatagcatggccagcgaagaagtcaagcaggagcatcagaagtgcctggacaagctgctcaacaattgccttctatcatgcactatgcaggagctgattggcctgtacgtgaccatggaagagtactttatgcgggaaactgtgaacaaggctgtcgctctcgacacctatgaaaaagggcagctgacatcttccatggtagacgatgtgttttatatcgtcaagaagtgcatcgggcgagccctaagtagttccagtattgactgtctttgtgcaatgattaatctcgccaccactgaactggagtcagacttccgggatgttctgtgcaataaattacgcatgggctttcccgctactactttccaggatatccagcggggtgtgacatcagcagtgaatattatgcatagttccttgcaacagggcaaatttgacacaaaaggaatagagtcaacagatgaagcgaagatgagcttcttggttaccttgaacaatgtggaagtttgctcagagaatatcagtaccttgaaaaagactctggaatccgattgcaccaaactgttttcccagggtattgggggcgaacaggctcaggccaagtttgattcgtgtttgtccgacctggccgccgtgtcaaataaatttcgagatctcctccaggagggcctgactgagctcaacagcactgccatcaagccacaagtgcaaccctggatcaacagcttcttcagcgtttcacataatattgaagaggaggagtttaacgactatgaggcgaatgatccctgggtgcagcagtttattctgaatctggaacagcagatggctgaattcaaggcttcgctgtcgcctgtcatatatgacagcctgactggcctgatgacgagcctggtggctgtcgaacttgaaaaggtcgtgttgaaatccaccttcaatcgactgggcgggctgcagttcgacaaggaactgaggtctctgattgcctacctgactaccgtgacaacatggactatccgagataagtttgcacgtctctcccaaatggccacaatcctgaacttagaaagagtcaccgaaatacttgactactggggacccaacagcggccccttgacatggcgcctcaccccagctgaagtaagacaagtgctggccctgcggattgatttcagatccgaggacattaaacggcttagactctag

SEQ ID NO: 186298 - DNA, 2370 bp, Artificial Sequence
  derived and/or modified sequence
atgggtaccaaaatggcagacctggattcaccacctaagcttagcggagtccagcagccgtctgaaggcgtgggcggaggtcgctgctctgagatttccgctgaactcatcaggtccctaaccgaactgcaagagttagaagctgtctacgagcgcctctgcggcgaggaaaaggtggtggagcgagagctggacgcattgctggaacagcaaaataccatcgaaagcaagatggtgactctgcatcggatgggccctaatttacaactgatagaaggagatgctaaacagctggcgggtatgattacatttacctgcaacctggcagagaatgtgtcttccaaggtgcggcagctggacctggcaaaaaaccgcctgtatcaagctatacagagagccgatgatatcctcgatctcaagttctgtatggatggggtgcagaccgccttacgcagcgaagactatgagcaggccgcagcacatacacaccgttacctgtgtttagacaaaagcgtcatcgagcttagccgacagggcaaggagggctctatgatcgacgcaaacttgaaacttctccaggaagccgaacagaggcttaaggccatcgtggcggagaaatttgctatagcgactaaggagggggacctcccacaggttgaaagatttttcaaaatcttcccgctgctgggcctgcacgaagaggggctgcgcaagttttccgagtacctgtgcaagcaagtggctagcaaggctgaagagaacctgctgatggtcctgggcacagacatgtctgatcgcagggccgcagttatcttcgctgacaccctgactttattatttgagggaatcgcccgaatcgtcgaaactcaccagcccatcgtcgaaacatactatggcccaggcaggctgtacacattgattaaatatcttcaggttgaatgtgataggcaggtggagaaggtcgtcgataaatttattaagcagagggactatcatcagcagttccggcatgtgcagaacaatttgatgaggaattcaaccaccgaaaagatcgagcccagagaactcgatccgattctgactgaggtgacactgatgaatgctaggagcgagttgtacctgaggtttctgaaaaagcgcatctccagtgatttcgaagtgggagactcaatggctagcgaggaggtgaagcaggagcaccaaaagtgtctggacaagttactgaataactgtcttctctcttgcactatgcaggaacttatcgggctgtacgttacaatggaagagtattttatgcgagaaactgtgaataaggcagtagccttagacacctatgagaaaggccagcttacaagctctatggtcgacgacgttttttacatagtcaaaaagtgcatcggtagggctctctcctcctcaagcatcgattgcctctgtgcgatgatcaaccttgctaccaccgaactggaatctgattttcgagatgtcttatgtaataagctgcgcatgggctttcctgcgacaacattccaggacatccaacggggagtcaccagtgccgtgaatataatgcacagcagcttacagcagggcaagttcgatacaaaaggaattgagtccacagacgaagcaaaaatgagcttcttggttaccctgaacaatgttgaggtctgcagcgaaaacatcagtacactgaagaagactctagagagtgactgcacgaagttattcagccagggaatcgggggagaacaggcgcaggctaaatttgactcatgcttatccgatctggccgctgtgagcaataaattccgcgatctgcttcaggaagggctcaccgaacttaattcgaccgctatcaaacctcaggttcagccgtggatcaactccttctttagcgtctctcataatattgaggaagaagagtttaatgactatgaagcaaatgacccttgggtccagcaattcattttaaatctcgagcagcagatggccgagttcaaggcttcactctcaccagtgatctacgattctctgactggcctgatgacttctctcgtggctgtcgaattagaaaaggtggtgctgaaatctacatttaatcgcctgggtggactgcagtttgataaggaactgagatcgctcattgcctacctgacgaccgtcaccacctggaccattcgtgacaaatttgccagactgtctcagatggccactattcttaacctggagagagttactgagatactagattactggggcccaaactcaggcccactcacttggcggctgactcccgcagaggtacgtcaggtgctcgccttgcggattgactttcgctccgaggacattaagcggctgcgactatag

SEQ ID NO: 186299 - DNA, 2833 bp, Artificial Sequence
  derived and/or modified sequence
ctcgcgggaccggaagtgccgaatggggaccaagatggcggaccttgattcgcctccgaagctgtcaggggtgcagcagccgtctgagggggtgggaggtggccgctgctccgaaatctccgctgagctcattcgctccctgacagagctgcaggagctggaggctgtatacgaacggctctgcggcgaggagaaagtggtggagagagagctggatgctcttttggaacagcaaaacaccattgaaagtaagatggtcactctccaccgaatgggtcctaatctgcagctgattgagggagatgcaaagcagctggctggaatgatcacctttacctgcaacctggctgagaatgtgtccagcaaagttcgtcagcttgacctggccaagaaccgcctctatcaggccattcagagagctgatgacatcttggacctgaagttctgcatggatggagttcagactgctttgaggagtgaagattatgagcaggctgcagcacatactcatcgctacttgtgcctggacaagtcggtcattgagctcagccgacagggcaaagaggggagcatgattgatgccaacctgaaattgctgcaggaagctgagcaacgtctcaaagccattgtggcagagaagtttgccattgccaccaaggaaggtgatctgccccaggtggagcgcttcttcaagatcttcccactgctgggtttgcatgaggagggattaagaaagttctcggagtacctttgcaagcaggtggccagtaaagctgaggagaatctgctcatggtgctggggacagacatgagtgatcggagagctgcagtcatctttgcagatacacttactcttctgtttgaagggattgcccgcattgtggagacccaccagccaatagtggagacctattatgggccagggagactctataccctgatcaaatatctgcaggtggaatgtgacagacaggtggagaaggtggtagacaagttcatcaagcaaagggactaccaccagcagttccggcatgttcagaacaacctgatgagaaattctacaacagaaaaaatcgaaccaagagaactggaccccatcctgactgaggtcaccctgatgaatgcccgcagtgagctatacttacgcttcctcaagaagaggattagctctgattttgaggtgggagactccatggcctcagaggaagtaaagcaagagcaccagaagtgtctggacaaactcctcaataactgccttttgagctgtaccatgcaggagctaattggcttatatgttaccatggaggagtacttcatgagggagactgtcaataaggctgtggctctggacacctatgagaagggccagctgacatccagcatggtggatgatgtcttctacattgttaagaagtgcattgggcgggctctgtccagctccagcattgactgtctctgtgccatgatcaacctcgccaccacagagctggagtctgacttcagggatgttctgtgtaataagctgcggatgggctttcctgccaccaccttccaggacatccagcgcggggtgacaagtgccgtgaacatcatgcacagcagcctccagcaaggcaaatttgacacaaaaggcatcgagagtactgacgaggcgaagatgtccttcctggtgactctgaacaacgtggaagtctgcagtgaaaacatctccactctgaagaagacactggagagtgactgcaccaagctcttcagccagggcattggaggggagcaggcccaggccaagtttgacagctgcctttctgacttggccgccgtgtccaacaaattccgagacctcttgcaggaagggctgacggagctcaacagcacagccatcaagccacaggtgcagccttggatcaacagctttttctccgtctcccacaacatcgaggaggaagaattcaatgactatgaggccaacgacccttgggtacaacagttcatccttaacctggagcagcaaatggcagagttcaaggccagcctgtccccggtcatctacgacagcctaaccggcctcatgactagccttgttgccgtcgagttggagaaagtggtgctgaaatccacctttaaccggctgggtggtctgcagtttgacaaggagctgaggtcgctcattgcctaccttaccacggtgaccacctggaccatccgagacaagtttgcccggctctcccagatggccaccatcctcaatctggagcgggtgaccgagatcctcgattactggggacccaattccggcccattgacgtggcgcctcacccctgctgaagtgcgccaggtgctggccctgcggatagacttccgcagtgaagatatcaagaggctgcgcctgtagctgcctggatgagcacacctggctcatcacacttgcaggcctgttccctaaggggccccagccaaggagctgagcgaggctgtctggcttgggggagatctgacagcccagacctttctacggctggcagcagagaaacaaagtctggacccactccatgctctgccctcagacctggccaggtgatgctctgggggcagcatctccccaccgagagaagcgggctcctaatgaggtgggaaagccacggcaggcagcgagcagcccaggccagctttctgcatggatggtcagtctcttgccctcaaacactacagcaaacaagctacccctgccagtcctagacaacttgggtacatctggggacctagcagttaggcttgactttgaggagaggctgtgatgtttatgatccctgaataaagctactccttggagaga

SEQ ID NO: 186300 - DNA, 2225 bp, Artificial Sequence
  derived and/or modified sequence
aagtgccgaatggggaccaagatggcggaccttgattcgcctccgaagctgtcaggggtgcagcagccgtctgagggggtgggaggtggccgctgctccgaaatctccgctgagctcattcgctccctgacagagctgcaggagctggaggctgtatacgaacggctctgcggcgaggagaaagtggtggagagagagctggatgctcttttggaacagcaaaacaccattgaaagtaagatggtcactctccaccgaatgggtcctaatctgcagctgattgagggagatgcaaagcagctggctggaatgatcacctttacctgcaacctggctgagaatgtgtccagcaaagttcgtcagcttgacctggccaagacacttactcttctgtttgaagggattgcccgcattgtggagacccaccagccaatagtggagacctattatgggccagggagactctataccctgatcaaatatctgcaggtggaatgtgacagacaggtggagaaggtggtagacaagttcatcaagcaaagggactaccaccagcagttccggcatgttcagaacaacctgatgagaaattctacaacagaaaaaatcgaaccaagagaactggaccccatcctgactgaggtcaccctgatgaatgcccgcagtgagctatacttacgcttcctcaagaagaggattagctctgattttgaggtgggagactccatggcctcagaggaagtaaagcaagagcaccagaagtgtctggacaaactcctcaataactgccttttgagctgtaccatgcaggagctaattggcttatatgttaccatggaggagtacttcatgagggagactgtcaataaggctgtggctctggacacctatgagaagggccagctgacatccagcatggtggatgatgtcttctacattgttaagaagtgcattgggcgggctctgtccagctccagcattgactgtctctgtgccatgatcaacctcgccaccacagagctggagtctgacttcagggatgttctgtgtaataagctgcggatgggctttcctgccaccaccttccaggacatccagcgcggggtgacaagtgccgtgaacatcatgcacagcagcctccagcaaggcaaatttgacacaaaaggcatcgagagtactgacgaggcgaagatgtccttcctggtgactctgaacaacgtggaagtctgcagtgaaaacatctccactctgaagaagacactggagagtgactgcaccaagctcttcagccagggcattggaggggagcaggcccaggccaagtttgacagctgcctttctgacttggccgccgtgtccaacaaattccgagacctcttgcaggaagggctgacggagctcaacagcacagccatcaagccacaggtgcagccttggatcaacagctttttctccgtctcccacaacatcgaggaggaagaattcaatgactatgaggccaacgacccttgggtacaacagttcatccttaacctggagcagcaaatggcagagttcaaggccagcctgtccccggtcatctacgacagcctaaccggcctcatgactagccttgttgccgtcgagttggagaaagtggtgctgaaatccacctttaaccggctgggtggtctgcagtttgacaaggagctgaggtcgctcattgcctaccttaccacggtgaccacctggaccatccgagacaagtttgcccggctctcccagatggccaccatcctcaatctggagcgggtgaccgagatcctcgattactggggacccaattccggcccattgacgtggcgcctcacccctgctgaagtgcgccaggtgctggccctgcggatagacttccgcagtgaagatatcaagaggctgcgcctgtagctgcctggatgagcacacctggctcatcacacttgcaggcctgttccctaaggggccccagccaaggagctgagcgaggctgtctggcttgggggagatctgacagcccagacctttctacggctggcagcagagaaacaaagtctggacccactccatgctctgccctcagacctggccaggtgatgctctgggggcagcatctccccaccgagagaagcgggctcctaatgaggtgggaaagccacggcaggcagcgagcagcccaggccagctttctgcatggatggtcagtctct

SEQ ID NO: 186301 - DNA, 2370 bp, Artificial Sequence
  derived and/or modified sequence
atgggcaccaagatggccgacctggacagcccccccaagctgagcggcgtgcagcagcccagcgagggcgtgggcggcggcagatgcagcgagatcagcgccgagctgatcagaagcctgaccgagctgcaggagctggaggccgtgtacgagagactgtgcggcgaggagaaggtggtggagagagagctggacgccctgctggagcagcagaacaccatcgagagcaagatggtgaccctgcacagaatgggccccaacctgcagctgatcgagggcgacgccaagcagctggccggcatgatcaccttcacctgcaacctggccgagaacgtgagcagcaaggtgagacagctggacctggccaagaacagactgtaccaggccatccagagagccgacgacatcctggacctgaagttctgcatggacggcgtgcagaccgccctgagaagcgaggactacgagcaggccgccgcccacacccacagatacctgtgcctggacaagagcgtgatcgagctgagcagacagggcaaggagggcagcatgatcgacgccaacctgaagctgctgcaggaggccgagcagagactgaaggccatcgtggccgagaagttcgccatcgccaccaaggagggcgacctgccccaggtggagagattcttcaagatcttccccctgctgggcctgcacgaggagggcctgagaaagttcagcgagtacctgtgcaagcaggtggccagcaaggccgaggagaacctgctgatggtgctgggcaccgacatgagcgacagaagagccgccgtgatcttcgccgacaccctgaccctgctgttcgagggcatcgccagaatcgtggagacccaccagcccatcgtggagacctactacggccccggcagactgtacaccctgatcaagtacctgcaggtggagtgcgacagacaggtggagaaggtggtggacaagttcatcaagcagagagactaccaccagcagttcagacacgtgcagaacaacctgatgagaaacagcaccaccgagaagatcgagcccagagagctggaccccatcctgaccgaggtgaccctgatgaacgccagaagcgagctgtacctgagattcctgaagaagagaatcagcagcgacttcgaggtgggcgacagcatggccagcgaggaggtgaagcaggagcaccagaagtgcctggacaagctgctgaacaactgcctgctgagctgcaccatgcaggagctgatcggcctgtacgtgaccatggaggagtacttcatgagagagaccgtgaacaaggccgtggccctggacacctacgagaagggccagctgaccagcagcatggtggacgacgtgttctacatcgtgaagaagtgcatcggcagagccctgagcagcagcagcatcgactgcctgtgcgccatgatcaacctggccaccaccgagctggagagcgacttcagagacgtgctgtgcaacaagctgagaatgggcttccccgccaccaccttccaggacatccagagaggcgtgaccagcgccgtgaacatcatgcacagcagcctgcagcagggcaagttcgacaccaagggcatcgagagcaccgacgaggccaagatgagcttcctggtgaccctgaacaacgtggaggtgtgcagcgagaacatcagcaccctgaagaagaccctggagagcgactgcaccaagctgttcagccagggcatcggcggcgagcaggcccaggccaagttcgacagctgcctgagcgacctggccgccgtgagcaacaagttcagagacctgctgcaggagggcctgaccgagctgaacagcaccgccatcaagccccaggtgcagccctggatcaacagcttcttcagcgtgagccacaacatcgaggaggaggagttcaacgactacgaggccaacgacccctgggtgcagcagttcatcctgaacctggagcagcagatggccgagttcaaggccagcctgagccccgtgatctacgacagcctgaccggcctgatgaccagcctggtggccgtggagctggagaaggtggtgctgaagagcaccttcaacagactgggcggcctgcagttcgacaaggagctgagaagcctgatcgcctacctgaccaccgtgaccacctggaccatcagagacaagttcgccagactgagccagatggccaccatcctgaacctggagagagtgaccgagatcctggactactggggccccaacagcggccccctgacctggagactgacccccgccgaggtgagacaggtgctggccctgagaatcgacttcagaagcgaggacatcaagagactgagactgtag

SEQ ID NO: 186302 - protein, 225 aa, Artificial Sequence
  derived and/or modified sequence
MVMAEGTAVLRRNRPGTKAQDFYNWPDESFDEMDSTLAVQQYIQQNIRADCSNIDKILEPPEGQDEGVWKYEHLRQFCLELNGLAVKLQSECHPDTCTQMTATEQWIFLCAAHKTPKECPAIDYTRHTLDGAACLLNSNKYFPSRVSIKESSVAKLGSVCRRIYRIFSHAYFHHRQIFDEYENETFLCHRFTKFVMKYNLMSKDNLIVPILEEEVQNSVSGESEA

SEQ ID NO: 186303 - DNA, 678 bp, Artificial Sequence
  derived and/or modified sequence
atggtgatggcagaaggcaccgccgtgctgaggagaaatcgccccggcactaaggcgcaggacttctataattggccggatgagtctttcgatgaaatggatagtacactggccgtccagcagtacatccagcagaatatccgggcagactgcagtaacatagataaaattctggagcctccagagggtcaggacgagggagtctggaagtacgagcatctacgccagttctgcctagaactgaatggcctggcagtgaaactgcagtcagagtgccacccggacacgtgtactcagatgactgctaccgaacagtggatatttttgtgtgctgctcataaaacgcccaaggagtgccctgcgattgactatacaagacatacacttgatggagctgcttgccttctcaacagcaacaagtacttcccatcacgtgttagcattaaggagagctctgtggcgaagctggggtcagtttgtagacgcatctacaggattttttcacatgcatacttccatcatcgacagatcttcgatgaatacgagaacgaaaccttcctgtgtcatagattcactaaattcgtgatgaagtacaatctgatgagtaaagacaatctgatcgtccctattctggaagaagaggtgcagaacagcgtgagcggagagagtgaggcctag

SEQ ID NO: 186304 - DNA, 678 bp, Artificial Sequence
  derived and/or modified sequence
atggtgatggccgagggcacagctgtgctgcggaggaacagacctggcaccaaggcccaggacttctacaactggccagatgagagctttgatgagatggacagcaccctggccgtgcagcagtacatccagcagaacatccgggctgactgcagcaacatcgacaagatcctggagcccccagagggccaggatgaaggagtgtggaagtatgagcacctgcggcagttctgcctggagctgaatggcctggccgtgaagctgcagagcgagtgccacccagacacctgcacccagatgacagccacagagcagtggatcttcctgtgtgccgcccacaagacccccaaggagtgcccagccatcgactacaccaggcacaccctggatggagctgcctgcctgctgaacagcaacaagtacttccccagccgggtgtccatcaaggagagctctgtggccaagctgggctctgtgtgccgccgcatctaccgcatcttcagccacgcctacttccaccaccggcagatctttgatgaatatgaaaatgagaccttcctgtgccaccgcttcaccaagtttgtgatgaagtacaacctgatgagcaaggacaacctgattgtgcccatcctggaggaggaggtgcagaacagcgtgtctggagagagcgaggcctag

SEQ ID NO: 186305 - DNA, 678 bp, Artificial Sequence
  derived and/or modified sequence
atggtgatggccgagggcaccgccgtgctgcggcggaaccggcccggcaccaaggcccaggacttttataactggcctgatgaaagctttgatgagatggactctacccttgcagtgcaacagtacatccagcagaacattagggcagattgcagcaacatcgataaaattctggaaccgcccgagggacaggacgagggggtctggaagtacgagcatttaaggcaattttgtctagaacttaacggtctagcggtaaagctgcagagcgaatgtcatcctgacacatgcacacagatgacagccaccgagcaatggatcttcttatgcgctgctcacaagacacccaaggaatgtcctgccatcgattacacccggcatactctggacggtgctgcctgtttgctgaactctaacaaatacttcccatccagggtgagcatcaaagaatctagtgtagcaaagcttggctccgtctgccgtaggatatacaggatttttagccacgcttattttcatcaccggcagattttcgacgagtacgagaatgagacgtttctctgccaccgcttcaccaagttcgtcatgaagtacaacctcatgtccaaggataatctcatcgtgccgatcctggaagaagaggtacagaatagcgtgtcaggggaaagtgaggcctag

SEQ ID NO: 186306 - DNA, 3785 bp, Artificial Sequence
  derived and/or modified sequence
gtcgatttcacgcaggttctatagaatttgccaagactgctggcctgttttctaccctgattccttaggtggcttctgggacagaattacggttctctaagtatttgcttgcaggatttctataattggcctgatgaatcctttgatgaaatggacagtacactagctgttcaacagtatattcaacagaacataagagcagattgctccaatattgacaaaattcttgaaccacctgaaggccaagatgaaggtgtgtggaagtatgaacatttaaggcagttctgccttgagctaaatggacttgctgtcaaacttcagagtgaatgccatccagatacttgcactcaaatgacagcaactgaacaatggatttttctttgtgcagctcataaaactccaaaagagtgtcctgctatagactatactagacacacacttgatggtgctgcatgtcttctgaatagcaataaatattttcccagcagggttagcataaaggaatcatctgtagcgaaactaggatcagtatgccgtaggatttacagaatattttcacatgcttattttcatcatcggcagatatttgatgaatatgaaaatgaaacatttttgtgtcatcggtttactaagtttgtgatgaaatacaatttgatgtccaaggataacctgattgtaccaattttagaagaggaagtacagaattcagtttctggggaaagtgaagcatgaagggaatcataggaaaaatgtactgatcatataattaacattatgtactgtatatatcattttagacacatcaatcatgtatccatattatagcttctttgtttagtataggtttttgtatgctgggtttgccttttaaaatgggaaatactttttaagttattcataagctgtatattcaccagtgtggcactcatggtttttaaataagattagtattatctgtttataatgcctgttaataaaagaatttacagtttggtaaaattgctgctaaacaatcattggatcacaatcctcatcagacaaacccatctgtaaaaaaaatgagggagagcttgaggtttcacacaagccatttactaaagaggtagaaatgttttctattggttttaccttgagtttagatatcctaaaaaattctgtagtacgtagttttgtcttacctgttaactttccccaattgagataaaagtgttttaaaattctgtttatagtttttgatatgcatatataattatgtgtatatctaaatacaaatgcaaatgaagcattagtaatacttaaataattttactgtgctacataaagtataacatacttggaaaggatttaccgttctgcaacaacggactggtacatacaggatgatcacaatggtaaggcacataaattattttcccactggaaacctgccctgtccaccccttctcatttcccttaaccttatcttcaaactactttagctgagaagcttttcaccagactgagttagtggtggcttatacctatttatatttgtattaattgcttacagattatacctcatattagcaattacattacactacaagaaaatgtatttgcataggctcttgcttatctttgttttgcaaaattgttctacttagaaaacagtccttaaaatagtttgactcttcctgttagtaatatattaatctttcatttaaccagctaggcagcattaaatagaattgaagaaataccatagtatttattttacaccccctctcccacgaagtttatgtttggattacatgcacgtgtgagattatttgcaataattcataggttccaagggtgttgatgaatagtcatacatttttttggactttgttataattcattgtggtaagaatgattgaaatgcagatttaacaatcttataatctattgaatgccatttttgataaagcactggaggtcttattgccaaactgattgtaatgaggcagtaagggtgaaaacattgtacatgttgtgaagaaagtatttaaatccaacttttgaacagatttaacaaacatgaggaacttttttatttagaaggataattttgaagatgaaaatgtattcatcttaattgttttttcaaatttaagggaataatttataccatcttttcagacaagaatgtacagcaaaaataaggggaacagtagtatactgagagtgtgtgtatgtatagtgtatgcctttccaagcttgccagtctttttggctttgaacactgcccatcagctacagtcattactgttccccaacccacaactatcttttaagaagtcttagttcacagtgaaaggaatgatgactttgaaattatggatttatattaatggcactataaaccaatggtaatggtaatttttaaacttgctaaatattgagaaactaaactactaagttaataaattatatatagcagtgtagctgttctctctagatggtgtctcacaatggatttctgttgcttgactattttcttagtgaatatttatactaaggtagtgactgagatttggtgatctggctgagtattttgaaacacattttgaataatatggcttagtgttaacggggacttaaatatgatttttttttcttactcatttcaccttccctgtactgtatgtttggaattgatcataaaacatctccaaaagaaaataatcagtttgtagtcttgcttttgtattcatgttgataatcttactaattgtgaagttgattcactactatactaggtaagacctaagtgaaacagttcctgtttttccttaatactgttttcagaattttgaaaatgtacttatatatacataaatactactaaaaaattaatgagcctggcaaaccattgatttataaaagtaagtgttctaagaggggaacaagacagttctgtgtgataaggaagttaggctccactttttgtttgaattaccctatgtatatccgaaggtaaacttaggcttttctttccaaaagatcgtatagtcaattcattctttttctcctatcacatctgggaaagtagctaacttttaactatttatgttcccataagtaacccttcttttgtgtgtatacatttccttttctctgacttgagatgtcaaatttggatttctagaacagtttctcagttaaattcttgatgacttaacaacttttactatcagaatacaattagaaatccttggtcaggcacaggggctcacgcctgtaatcccagcactttgggaagccaaggcagacagatcacctgaggtcaggagttcgagaccagcctgaccaacatggagaaaccctgtctctactaaaaatacaaaaattagccgggcgtggtgctactcgtgaggctgaggcaggagaatcgcttgaacccgggaggtggaggttgcggtgagctgagatcgtgccattgcactccagcctgggtaacgagcaaaactccgtctcaaaaactccgtctcaaaaaaaaaaaatccttgattacattgttagtaaggactgtgttacgattataaacacatttattggttgatgtcaaattcactgtaatagtagaactaagttttttatgtgagtactttgccctactgtctatatgatgacatcttttttgagcagctaaattttaaattgtatatactttattttgtgaatccttgttgaatgtgctaaaggtttctttgtgtagttcttccatgctatgcgaatattttagtaaaagtagttgattttta

SEQ ID NO: 186307 - DNA, 1447 bp, Artificial Sequence
  derived and/or modified sequence
acttttcttgtcgggcaactaggtgccgagcagtgctgcgcccggaagctggccgccactgcggggaggttgggccgaggcggcaggcgggcgggctggggcactggtgcccggcctgctcttccggagctgcagcccctcaatttggctgaggcggtggcggccgccgtgaggcctgcggagctccgacccaggggatttctataattggcctgatgaatcctttgatgaaatggacagtacactagctgttcaacagtatattcaacagaacataagagcagattgctccaatattgacaaaattcttgaaccacctgaaggccaagatgaaggtgtgtggaagtatgaacatttaaggcagttctgccttgagctaaatggacttgctgtcaaacttcagagtgaatgccatccagatacttgcactcaaatgacagcaactgaacaatggatttttctttgtgcagctcataaaactccaaaagagtgtcctgctatagactatactagacacacacttgatggtgctgcatgtcttctgaatagcaataaatattttcccagcagggttagcataaaggaatcatctgtagcgaaactaggatcagtatgccgtaggatttacagaatattttcacatgcttattttcatcatcggcagatatttgatgaatatgaaaatgaaacatttttgtgtcatcggtttactaagtttgtgatgaaatacaatttgatgtccaaggataacctgattgtaccaattttagaagaggaagtacagaattcagtttctggggaaagtgaagcatgaagggaatcataggaaaaatgtactgatcatataattaacattatgtactgtatatatcattttagacacatcaatcatgtatccatattatagcttctttgtttagtataggtttttgtatgctgggtttgccttttaaaatgggaaatactttttaagttattcataagctgtatattcaccagtgtggcactcatggtttttaaataagattagtattatctgtttataatgcctgttaataaaagaatttacagtttggtaaaattgctgctaaacaatcattggatcacaatcctcatcagacaaacccatctgtaaaaaaaatgagggagagcttgaggtttcacacaagccatttactaaagaggtagaaatgttttctattggttttaccttgagtttagatatcctaaaaaattctgtagtacgtagttttgtcttacctgttaactttccccaattgagataaaagtgttttaaaattctgtttatagtttttgatatgcatatataattatgtgtatatctaaatacaaatgcaaatgaagcattagtaatacttaaataattttactgtgctacataaagtataacatacttggaaaggatttaccgttctgcaacaacgga

SEQ ID NO: 186308 - DNA, 678 bp, Artificial Sequence
  derived and/or modified sequence
atggttatggccgaggggacagccgtgttgcgtcggaatcggcctgggaccaaggcacaagacttctataattggccggatgaatcatttgacgagatggacagtactctagctgttcagcagtatattcagcagaatatccgggcagattgctctaatattgacaagatcttagagcccccagagggacaggacgagggcgtctggaaatacgaacacctccggcagttctgcctcgaactaaacggacttgcagttaagctgcagagcgagtgtcaccccgatacttgcactcagatgactgcaactgagcagtggatcttcctgtgtgcagcacacaaaacacctaaagaatgccccgcaatagattacaccagacataccttggacggcgcagcttgtctgttaaactctaacaagtattttccgtccagggtgtcgataaaggagagctccgtagccaaactcggctccgtttgtcggagaatataccgaattttttcacacgcatacttccatcaccgccaaattttcgacgagtatgagaacgaaaccttcctctgccacaggttcaccaagtttgtgatgaagtataatctaatgagcaaagacaatctgattgttcctattttagaggaggaggttcagaacagtgtctctggggaatccgaggcttag

SEQ ID NO: 186309 - DNA, 3986 bp, Artificial Sequence
  derived and/or modified sequence
aaagaggctcgtggcgcccgccttccggtgcctcagtccctgccagtagccacccgacgccgtccggctgttcctcgttcgccctctccctccgcctagcccgcttctacccggacggctcccggcgcaggctgcagctgttccgtcagctgccgctcctcctcccagacgcagagcgccgctctgccccgccccccgcgcaggctgccgtccctacatccgggtaccgactccagccgcctagacgctggcactatggtcatggcggaggggacggcagtgctgaggcggaacaggccgggcaccaaggcgcaggatttctataattggcctgatgaatcctttgatgaaatggacagtacactagctgttcaacagtatattcaacagaacataagagcagattgctccaatattgacaaaattcttgaaccacctgaaggccaagatgaaggtgtgtggaagtatgaacatttaaggcagttctgccttgagctaaatggacttgctgtcaaacttcagagtgaatgccatccagatacttgcactcaaatgacagcaactgaacaatggatttttctttgtgcagctcataaaactccaaaagagtgtcctgctatagactatactagacacacacttgatggtgctgcatgtcttctgaatagcaataaatattttcccagcagggttagcataaaggaatcatctgtagcgaaactaggatcagtatgccgtaggatttacagaatattttcacatgcttattttcatcatcggcagatatttgatgaatatgaaaatgaaacatttttgtgtcatcggtttactaagtttgtgatgaaatacaatttgatgtccaaggataacctgattgtaccaattttagaagaggaagtacagaattcagtttctggggaaagtgaagcatgaagggaatcataggaaaaatgtactgatcatataattaacattatgtactgtatatatcattttagacacatcaatcatgtatccatattatagcttctttgtttagtataggtttttgtatgctgggtttgccttttaaaatgggaaatactttttaagttattcataagctgtatattcaccagtgtggcactcatggtttttaaataagattagtattatctgtttataatgcctgttaataaaagaatttacagtttggtaaaattgctgctaaacaatcattggatcacaatcctcatcagacaaacccatctgtaaaaaaaatgagggagagcttgaggtttcacacaagccatttactaaagaggtagaaatgttttctattggttttaccttgagtttagatatcctaaaaaattctgtagtacgtagttttgtcttacctgttaactttccccaattgagataaaagtgttttaaaattctgtttatagtttttgatatgcatatataattatgtgtatatctaaatacaaatgcaaatgaagcattagtaatacttaaataattttactgtgctacataaagtataacatacttggaaaggatttaccgttctgcaacaacggactggtacatacaggatgatcacaatggtaaggcacataaattattttcccactggaaacctgccctgtccaccccttctcatttcccttaaccttatcttcaaactactttagctgagaagcttttcaccagactgagttagtggtggcttatacctatttatatttgtattaattgcttacagattatacctcatattagcaattacattacactacaagaaaatgtatttgcataggctcttgcttatctttgttttgcaaaattgttctacttagaaaacagtccttaaaatagtttgactcttcctgttagtaatatattaatctttcatttaaccagctaggcagcattaaatagaattgaagaaataccatagtatttattttacaccccctctcccacgaagtttatgtttggattacatgcacgtgtgagattatttgcaataattcataggttccaagggtgttgatgaatagtcatacatttttttggactttgttataattcattgtggtaagaatgattgaaatgcagatttaacaatcttataatctattgaatgccatttttgataaagcactggaggtcttattgccaaactgattgtaatgaggcagtaagggtgaaaacattgtacatgttgtgaagaaagtatttaaatccaacttttgaacagatttaacaaacatgaggaacttttttatttagaaggataattttgaagatgaaaatgtattcatcttaattgttttttcaaatttaagggaataatttataccatcttttcagacaagaatgtacagcaaaaataaggggaacagtagtatactgagagtgtgtgtatgtatagtgtatgcctttccaagcttgccagtctttttggctttgaacactgcccatcagctacagtcattactgttccccaacccacaactatcttttaagaagtcttagttcacagtgaaaggaatgatgactttgaaattatggatttatattaatggcactataaaccaatggtaatggtaatttttaaacttgctaaatattgagaaactaaactactaagttaataaattatatatagcagtgtagctgttctctctagatggtgtctcacaatggatttctgttgcttgactattttcttagtgaatatttatactaaggtagtgactgagatttggtgatctggctgagtattttgaaacacattttgaataatatggcttagtgttaacggggacttaaatatgatttttttttcttactcatttcaccttccctgtactgtatgtttggaattgatcataaaacatctccaaaagaaaataatcagtttgtagtcttgcttttgtattcatgttgataatcttactaattgtgaagttgattcactactatactaggtaagacctaagtgaaacagttcctgtttttccttaatactgttttcagaattttgaaaatgtacttatatatacataaatactactaaaaaattaatgagcctggcaaaccattgatttataaaagtaagtgttctaagaggggaacaagacagttctgtgtgataaggaagttaggctccactttttgtttgaattaccctatgtatatccgaaggtaaacttaggcttttctttccaaaagatcgtatagtcaattcattctttttctcctatcacatctgggaaagtagctaacttttaactatttatgttcccataagtaacccttcttttgtgtgtatacatttccttttctctgacttgagatgtcaaatttggatttctagaacagtttctcagttaaattcttgatgacttaacaacttttactatcagaatacaattagaaatccttggtcaggcacaggggctcacgcctgtaatcccagcactttgggaagccaaggcagacagatcacctgaggtcaggagttcgagaccagcctgaccaacatggagaaaccctgtctctactaaaaatacaaaaattagccgggcgtggtgctactcgtgaggctgaggcaggagaatcgcttgaacccgggaggtggaggttgcggtgagctgagatcgtgccattgcactccagcctgggtaacgagcaaaactccgtctcaaaaactccgtctcaaaaaaaaaaaatccttgattacattgttagtaaggactgtgttacgattataaacacatttattggttgatgtcaaattcactgtaatagtagaactaagttttttatgtgagtactttgccctactgtctatatgatgacatcttttttgagcagctaaattttaaattgtatatactttattttgtgaatccttgttgaatgtgctaaaggtttctttgtgtagttcttccatgctatgcgaatattttagtaaaagtagttgattttta

SEQ ID NO: 186310 - DNA, 678 bp, Artificial Sequence
  derived and/or modified sequence
atggtgatggccgagggcaccgccgtgctgagaagaaacagacccggcaccaaggcccaggacttctacaactggcccgacgagagcttcgacgagatggacagcaccctggccgtgcagcagtacatccagcagaacatcagagccgactgcagcaacatcgacaagatcctggagccccccgagggccaggacgagggcgtgtggaagtacgagcacctgagacagttctgcctggagctgaacggcctggccgtgaagctgcagagcgagtgccaccccgacacctgcacccagatgaccgccaccgagcagtggatcttcctgtgcgccgcccacaagacccccaaggagtgccccgccatcgactacaccagacacaccctggacggcgccgcctgcctgctgaacagcaacaagtacttccccagcagagtgagcatcaaggagagcagcgtggccaagctgggcagcgtgtgcagaagaatctacagaatcttcagccacgcctacttccaccacagacagatcttcgacgagtacgagaacgagaccttcctgtgccacagattcaccaagttcgtgatgaagtacaacctgatgagcaaggacaacctgatcgtgcccatcctggaggaggaggtgcagaacagcgtgagcggcgagagcgaggcctag

SEQ ID NO: 186311 - protein, 350 aa, Artificial Sequence
  derived and/or modified sequence
MATTAAPAGGARNGAGPEWGGFEENIQGGGSAVIDMENMDDTSGSSFEDMGELHQRLREEEVDADAADAAAAEEEDGEFLGMKGFKGQLSRQVADQMWQAGKRQASRAFSLYANIDILRPYFDVEPAQVRSRLLESMIPIKMVNFPQKIAGELYGPLMLVFTLVAILLHGMKTSDTIIREGTLMGTAIGTCFGYWLGVSSFIYFLAYLCNAQITMLQMLALLGYGLFGHCIVLFITYNIHLHALFYLFWLLVGGLSTLRMVAVLVSRTVGPTQRLLLCGTLAALHMLFLLYLHFAYHKVVEGILDTLEGPNIPPIQRVPRDIPAMLPAARLPTTVLNATAKAVAVTLQSH

SEQ ID NO: 186312 - DNA, 1053 bp, Artificial Sequence
  derived and/or modified sequence
atggccaccaccgccgcccccgccggcggcgccagaaacggcgccggccccgagtggggcggcttcgaggagaacatccagggcggcggcagcgccgtgatcgacatggagaacatggacgacaccagcggcagcagcttcgaggacatgggcgagctgcaccagagactgagagaggaggaggtggacgccgacgccgccgacgccgccgccgccgaggaggaggacggcgagttcctgggcatgaagggcttcaagggccagctgagcagacaggtggccgaccagatgtggcaggccggcaagagacaggccagcagagccttcagcctgtacgccaacatcgacatcctgagaccctacttcgacgtggagcccgcccaggtgagaagcagactgctggagagcatgatccccatcaagatggtgaacttcccccagaagatcgccggcgagctgtacggccccctgatgctggtgttcaccctggtggccatcctgctgcacggcatgaagaccagcgacaccatcatcagagagggcaccctgatgggcaccgccatcggcacctgcttcggctactggctgggcgtgagcagcttcatctacttcctggcctacctgtgcaacgcccagatcaccatgctgcagatgctggccctgctgggctacggcctgttcggccactgcatcgtgctgttcatcacctacaacatccacctgcacgccctgttctacctgttctggctgctggtgggcggcctgagcaccctgagaatggtggccgtgctggtgagcagaaccgtgggccccacccagagactgctgctgtgcggcaccctggccgccctgcacatgctgttcctgctgtacctgcacttcgcctaccacaaggtggtggagggcatcctggacaccctggagggccccaacatcccccccatccagagagtgcccagagacatccccgccatgctgcccgccgccagactgcccaccaccgtgctgaacgccaccgccaaggccgtggccgtgaccctgcagagccactag

SEQ ID NO: 186313 - DNA, 1053 bp, Artificial Sequence
  derived and/or modified sequence
atggccactactgcagctcccgcagggggggctcgtaatggcgccggtccggagtggggtggttttgaagaaaatattcaaggaggcggcagtgctgttatcgacatggagaacatggatgacacttcagggtcatccttcgaggacatgggagagctgcaccagaggctccgggaagaagaggttgatgctgatgccgccgatgcagcagcagcagaagaggaagacggagagttcctcgggatgaaaggcttcaaaggtcaactgagccgtcaagtggccgaccagatgtggcaggccggcaaacgccaagcaagcagggctttttccctgtatgctaacatcgacatactgagaccttactttgacgttgagccagcccaggtgcgcagcaggctgctggaaagcatgataccgattaagatggtaaactttcctcagaaaattgctggagagctctacggacccctgatgctggtcttcacgctcgtggccatactgttgcacggcatgaagacaagcgacactatcattcgtgaagggactttgatgggcacggctatcggaacctgtttcggctactggttgggggtgtcatctttcatctacttcctggcatacctctgcaacgcacaaattacaatgctgcagatgctagccctgctgggatacgggttgttcgggcactgtatcgtgctgtttattacctacaatatccatctgcacgcactgttctatctcttttggctgctggtgggggggctgagcacattgagaatggtggctgttctggtgtcacgaaccgttggccctacccagaggctattgctatgcggaacactggccgcactgcacatgttgttcctcctgtacctccactttgcttaccacaaagtggtggagggcattcttgacacacttgaaggaccaaatatcccccccatccagcgagtgccacgtgatattcccgctatgctgcctgcagccagactgcctacgactgtgctcaacgcaaccgccaaagctgtggccgtgaccctgcagtcccactag

SEQ ID NO: 186314 - DNA, 1053 bp, Artificial Sequence
  derived and/or modified sequence
atggccaccacagctgccccagctgggggcgccagaaatggagctggccctgagtggggcggctttgaggagaacatccagggcggcggcagcgctgtgattgacatggagaacatggatgacaccagcggcagcagctttgaggacatgggagagctgcaccagaggctgcgggaggaggaggtggatgctgatgctgctgatgctgctgctgctgaggaggaggatggagagttcctgggcatgaagggcttcaagggccagctgagccggcaggtggccgaccagatgtggcaggccggcaagaggcaggccagccgggccttcagcctgtatgccaacatcgacatcctgcggccctactttgatgtggagcccgcccaggtgcgcagccggctgctggagagcatgatccccatcaagatggtgaacttcccccagaagattgctggggagctgtatggccccctgatgctggtgttcaccctggtggccatcctgctgcacggcatgaagaccagtgacaccatcatccgggagggcaccctgatgggcacagccatcggcacctgcttcggctactggctgggcgtgagcagcttcatctacttcctggcctacctgtgcaatgcccagatcaccatgctgcagatgctggccctgctgggctacggcctgtttggccactgcatcgtgctcttcatcacctacaacatccacctgcacgccctcttctacctgttctggctgctggtgggcggcctgagcaccctgaggatggtggccgtgctggtgtccaggacagtgggccccacccagaggctgctgctgtgtggcaccctggccgccctgcacatgctgttcctgctgtacctgcactttgcctaccacaaggtggtggagggcatcctggacaccctggagggccccaacatcccccccatccagagggtgccccgggacatcccagccatgctgcctgctgcccggctgcccaccaccgtgctgaatgccacagccaaggctgtggccgtgaccctgcagagccactag

SEQ ID NO: 186315 - DNA, 1053 bp, Artificial Sequence
  derived and/or modified sequence
atggccaccaccgccgcccccgccggcggcgcccggaacggcgccggcccagagtggggtgggttcgaggagaatatccaaggaggaggcagtgctgtcatcgatatggaaaatatggacgataccagcgggtcttcatttgaggatatgggcgagctgcaccaaaggcttcgggaggaagaggtagacgccgatgctgccgacgcagctgctgccgaggaagaggatggcgaattcttaggcatgaagggattcaagggccagttgagtagacaggtagccgatcagatgtggcaagccgggaagcgccaggccagccgcgctttctccctctatgccaatatcgatatcctccggccctactttgatgtcgagcccgctcaggttaggagtcgcctactggagtcgatgatccccattaaaatggtgaattttccgcagaaaatcgctggtgaactgtacggtcccttgatgttggtcttcacactggtggcgatcctgctgcatgggatgaaaacctcggatacaattatcagggaaggtacacttatgggcactgcaatcgggacatgttttggatactggctcggagtctcaagttttatttacttcctggcgtacttgtgtaatgctcaaattacgatgctgcagatgcttgctctgctggggtacggattgtttggacactgcattgtcctgttcataacatataacatacacctccacgcactgttctacctgttctggctgctcgtcggcggattgagcacactgaggatggtggcagtattagtcagccgaacagttggccctacacagagacttttgctctgcggaaccctggccgcccttcacatgctgtttttactgtaccttcactttgcatatcataaagtggtcgaaggaatcctggataccctcgagggacctaatatcccaccgattcagcgagtcccacgtgacatccccgccatgctccccgctgcccgactcccaactactgttctgaacgccaccgcaaaggcagtcgccgtcacattgcaatctcattag

SEQ ID NO: 186316 - DNA, 1053 bp, Artificial Sequence
  derived and/or modified sequence
atggcgactactgcagccccagctggtggtgcccgaaacggtgctggcccagaatggggcggattcgaggagaacatccagggtgggggtagcgctgtcatcgacatggaaaacatggatgacacgtccggatcctcgtttgaggatatgggcgagctccatcagcgtcttcgggaagaggaagtagacgctgacgcagctgatgctgcagctgcagaagaagaagacggggagttcctgggtatgaagggattcaagggacaactgtctcgccaggtggccgatcagatgtggcaagctggaaagcgccaagccagcagagccttcagtctgtatgcaaatattgacattctgcgcccatacttcgacgtcgagcccgctcaagtaaggtcccgcctgcttgagtccatgataccaatcaagatggtgaacttcccacagaaaatcgcaggggagctttacgggcctctgatgcttgtgtttaccctcgtcgcgattcttctgcacggaatgaagacgagcgataccatcataagagagggaactttaatggggaccgccataggcacctgtttcggatattggctcggtgtaagctcttttatctactttctcgcctacctttgtaacgcccagatcaccatgctgcagatgctagcgctgctaggttacgggctctttggacactgcatcgtactgttcattacttacaacatacacctgcatgcattgttctatctgttctggcttctggttggtggactgagtacactgcgtatggttgcggtcttagtgagtcgtactgtaggccctactcagaggctgttgttgtgtggtactcttgcagcgctacatatgctcttcctgttgtatttgcacttcgcttatcataaagttgtggaaggaattctagacacgctggaggggccaaatatcccccctattcagcgagtgccccgagatatccccgctatgttgcccgcagccagattgccaacaaccgtactcaacgctaccgccaaggccgtggcggtaacactgcagtctcactag

SEQ ID NO: 186317 - DNA, 1576 bp, Artificial Sequence
  derived and/or modified sequence
cccccgtccacgtccccagcttccggaagttgcttttgtccaaacatccgggcttctcctttttgtgttccggccgatcccacctctcctcgaccctggacgtctaccttccggaggcccacatcttgcccactccgcgcgcggggctagcgcgggtttcagcgacgggagccctcaagggacatggcaactacagcggcgccggcgggcggcgcccgaaatggagctggcccggaatggggagggttcgaagaaaacatccagggcggaggctcagctgtgattgacatggagaacatggatgatacctcaggctctagcttcgaggatatgggtgagctgcatcagcgcctgcgcgaggaagaagtagacgctgatgcagctgatgcagctgctgctgaagaggaggatggagagttcctgggcatgaagggctttaagggacagctgagccggcaggtggcagatcagatgtggcaggctgggaaaagacaagcctccagggccttcagcttgtacgccaacatcgacatcctcagaccctactttgatgtggagcctgctcaggtgcgaagcaggctcctggagtccatgatccctatcaagatggtcaacttcccccagaaaattgcaggtgaactctatggacctctcatgctggtcttcactctggttgctatcctactccatgggatgaagacgtctgacactattatccgggagggcaccctgatgggcacagccattggcacctgcttcggctactggctgggagtctcatccttcatttacttccttgcctacctgtgcaacgcccagatcaccatgctgcagatgttggcactgctgggctatggcctctttgggcattgcattgtcctgttcatcacctataatatccacctccacgccctcttctacctcttctggctgttggtgggtggactgtccacactgcgcatggtagcagtgttggtgtctcggaccgtgggccccacacagcggctgctcctctgtggcaccctggctgccctacacatgctcttcctgctctatctgcattttgcctaccacaaagtggtagaggggatcctggacacactggagggccccaacatcccgcccatccagagggtccccagagacatccctgccatgctccctgctgctcggcttcccaccaccgtcctcaacgccacagccaaagctgttgcggtgaccctgcagtcacactgaccccacctgaaattcttggccagtcctctttcccgcagctgcagagaggaggaagactattaaaggacagtcctgatgacatgtttcgtagatggggtttgcagctgccactgagctgtagctgcgtaagtacctccttgatgcctgtcggcacttctgaaaggcacaaggccaagaactcctggccaggactgcaaggctctgcagccaatgcagaaaatgggtcagctcctttgagaacccctccccacctaccccttccttcctctttatctctcccacattgtcttgctaaatatagacttggtaattaaaatgttgattgaagtctggaactgca

SEQ ID NO: 186318 - protein, 22 aa, Artificial Sequence
  derived and/or modified sequence
MATPLPPPSPRHLRLLRLLLSG

SEQ ID NO: 186319 - protein, 403 aa, Artificial Sequence
  derived and/or modified sequence
MLRPEAGLVGLHGPAQENSALPGRRDSASELRALSGLEVDPGEGWGRVVLISPRTVRFRVLSPGVREEGHVQNNGQNQARPARGVTGAGGWGSAAVCRGRALRGREPALPSASFPDVAACPGSLDCALKRRARCPPGAHACGPCLQPFQEDQQGLCVPRMRRPPGGGRPQPRLEDEIDFLAQELARKESGHSTPPLPKDRQRLPEPATLGFSARGQGLELGLPSTPGTPTPTPHTSLGSPVSSDPVHMSPLEPRGGQGDGLALVLILAFCVAGAAALSVASLCWCRLQREIRLTQKADYATAKAPGSPAAPRISPGDQRLAQSAEMYHYQHQRQQMLCLERHKEPPKELDTASSDEENEDGDFTVYECPGLAPTGEMEVRNPLFDHAALSAPLPAPSSPPALP

SEQ ID NO: 186320 - protein, 325 aa, Artificial Sequence
  derived and/or modified sequence
MATPLPPPSPRHLRLLRLLLSGLVLGAALRGAAAGHPDVAACPGSLDCALKRRARCPPGAHACGPCLQPFQEDQQGLCVPRMRRPPGGGRPQPRLEDEIDFLAQELARKESGHSTPPLPKDRQRLPEPATLGFSARGQGLELGLPSTPGTPTPTPHTSLGSPVSSDPVHMSPLEPRGGQGDGLALVLILAFCVAGAAALSVASLCWCRLQREIRLTQKADYATAKAPGSPAAPRISPGDQRLAQSAEMYHYQHQRQQMLCLERHKEPPKELDTASSDEENEDGDFTVYECPGLAPTGEMEVRNPLFDHAALSAPLPAPSSPPALP

SEQ ID NO: 186321 - DNA, 1212 bp, Artificial Sequence
  derived and/or modified sequence
atgctccgaccagaagctgggctggtcggcctgcatggtcctgcccaggagaattctgcactgccaggacgtcgagacagtgcctccgaactgcgagctctgagtggcctggaagtcgacccgggcgagggctggggccgggtagtcctgatcagccccagaacagttcgcttccgagttctgtctccaggcgtgagggaagaaggacatgtgcaaaacaacggccagaatcaggcccggcccgcgaggggggttaccggtgcaggcgggtggggcagcgccgctgtgtgccgtgggagggctctccgggggagggaacccgccctgccctccgccagtttccccgacgtggcagcgtgcccggggtcactggactgtgctctcaagaggagagcacggtgtcctcctggcgcccatgcttgtggaccgtgccttcagcccttccaggaagaccagcaaggcctatgtgttcctaggatgagacgccctcccgggggcggccgcccccagcccaggctagaggacgaaatcgacttcctagctcaggaattagcacgaaaggaatctggacattccaccccacctctcccaaaggatcgccagcgcttgcctgagccagctacgctggggttcagtgcccggggccagggtctcgagttagggctcccctctacacccggaacacctacccctacgccccacacaagcttaggaagccctgtcagtagcgaccccgtgcacatgtccccccttgagccccgcggtggtcagggcgacgggctagctctggtgctgatcctggccttctgcgtggcaggggccgccgctctgtcggtggcatccctgtgctggtgccgattgcaaagggagattcgcctcacacaaaaagcagattatgccacggccaaagcgcctgggagcccagctgcgcctagaatatcaccaggtgaccagagactggcccagtctgctgagatgtatcattaccaacaccagcgccagcagatgttgtgtctcgagaggcataaggagcctccaaaggagcttgacacggcgagctcagatgaagaaaatgaggatggagatttcaccgtgtatgagtgccctggcctggcccccaccggcgaaatggaagtccggaacccactgttcgatcacgcggccctaagtgcacccttgccagcgcctagttctcccccagctctgccatag

SEQ ID NO: 186322 - DNA, 978 bp, Artificial Sequence
  derived and/or modified sequence
atggctacccccttgccccccccaagtccccgccacctgagactgcttcggctgttgctgtccggtctggtgctgggtgctgctttgcgtggcgcagcagcaggacacccagacgttgcagcctgccccggcagccttgactgcgcacttaaacgtcgagctagatgccccccgggcgctcacgcttgtgggccttgtttgcaaccgtttcaggaagaccagcaaggcctatgtgttcccagaatgcgccgaccacctggcgggggaagaccccagcccagactcgaagatgaaatagacttcctagcccaggagctggcacgtaaggagagtggacattcaacgcctcccttacccaaagatcgacagcggctgcccgaacctgctaccctcggattctccgctaggggacaggggctcgagcttggattgccttctactcccggcactccaacgcctaccccccacacttccctggggagccctgttagctccgatcccgtgcatatgagcccgcttgagcctcgcggcggacagggagatggcctagcacttgtgttgatcctggccttctgcgtggcaggcgccgctgcattgagcgtggcgtcgctgtgttggtgtcgccttcagcgcgaaatacggcttacccagaaagcagattacgccacagccaaagcccccggttccccagcggcaccaagaatctctccaggggaccagcgtctggctcagtctgcagagatgtatcactaccagcatcaaagacaacagatgctctgtctcgaacgccacaaggaacccccaaaggaactcgacacagccagtagtgacgaggaaaacgaagatggagactttactgtgtacgagtgcccaggcctcgcccctaccggcgaaatggaggtcagaaacccgctgttcgaccacgccgctctgtcggcaccgctccctgcaccatctagcccccctgcactgccttag

SEQ ID NO: 186323 - DNA, 1212 bp, Artificial Sequence
  derived and/or modified sequence
atgctgcggcctgaggccggcctggtgggcctgcacggccctgcccaggagaacagcgccctgcccggccggcgggacagcgccagcgagctgcgggccctgagcggcctggaggtggaccctggagagggctggggccgggtggtgctgatcagccccaggacagtgcgcttccgggtgctgagccctggggtgcgggaggagggccacgtgcagaacaacggccagaaccaggcccggcctgcccggggcgtgactggagctgggggctggggcagcgctgctgtgtgccggggccgggccctgcggggccgggagcccgccctgcccagcgccagcttcccagatgtggccgcctgccccggcagcctggactgtgccctgaagaggcgggcccgctgccccccaggggcccacgcctgtggcccctgcctgcagcccttccaggaggaccagcagggcctgtgtgtgcccaggatgagaagacctcctgggggcggccggccccagccccggctggaggatgaaattgacttcctggcccaggagctggccaggaaggagagcggccacagcaccccacccctgcccaaggaccggcagaggctgcctgagcccgccaccctgggcttcagcgcccggggccagggcctggagctgggcctgcccagcaccccaggcacccccacccccaccccccacaccagcctgggcagccctgtgtccagtgaccctgtgcacatgagccccctggagccccggggcggccagggagatggcctggccctggtgctgatcctggccttctgtgtggccggggctgctgccctgtctgtggccagcctgtgctggtgccgcctgcagcgggagatccggctgacccagaaggctgactatgccacagccaaggcccctggcagccctgctgccccccgcatcagccctggggaccagaggctggcccagagcgctgagatgtaccactaccagcaccagaggcagcagatgctgtgcctggagcggcacaaggagccccccaaggagctggacacagccagcagtgatgaagaaaatgaagatggagacttcaccgtgtatgaatgtcctggcctggcccccaccggggagatggaggtgaggaaccccctgtttgaccatgctgccctgagcgcccccctgcctgcccccagcagccccccagccctgccctag

SEQ ID NO: 186324 - DNA, 978 bp, Artificial Sequence
  derived and/or modified sequence
atggccacccccctgcccccacccagccccaggcacctgcggctgctgcggctgctgctgagcggcctggtgctgggcgccgccctgcggggagctgctgctggccacccagatgtggccgcctgccccggcagcctggactgtgccctgaagaggcgggcccgctgccccccaggggcccacgcctgtggcccctgcctgcagcccttccaggaggaccagcagggcctgtgtgtgcccaggatgagaagacctcctgggggcggccggccccagccccggctggaggatgaaattgacttcctggcccaggagctggccaggaaggagagcggccacagcaccccacccctgcccaaggaccggcagaggctgcctgagcccgccaccctgggcttcagcgcccggggccagggcctggagctgggcctgcccagcaccccaggcacccccacccccaccccccacaccagcctgggcagccctgtgtccagtgaccctgtgcacatgagccccctggagccccggggcggccagggagatggcctggccctggtgctgatcctggccttctgtgtggccggggctgctgccctgtctgtggccagcctgtgctggtgccgcctgcagcgggagatccggctgacccagaaggctgactatgccacagccaaggcccctggcagccctgctgccccccgcatcagccctggggaccagaggctggcccagagcgctgagatgtaccactaccagcaccagaggcagcagatgctgtgcctggagcggcacaaggagccccccaaggagctggacacagccagcagtgatgaagaaaatgaagatggagacttcaccgtgtatgaatgtcctggcctggcccccaccggggagatggaggtgaggaaccccctgtttgaccatgctgccctgagcgcccccctgcctgcccccagcagccccccagccctgccctag

SEQ ID NO: 186325 - DNA, 1212 bp, Artificial Sequence
  derived and/or modified sequence
atgctgcggcccgaggccggcctggtgggcctgcacggccccgcccaagagaactctgccctgcccgggcgaagagacagcgcatccgaactccgcgccctatctggattggaggtagatcccggcgagggttggggtagggtagtgctgatcagcccaagaactgttcgatttcgcgtcttatctccaggtgtccgtgaagagggccatgtacagaacaatggacagaatcaggcccgccccgccaggggtgtgaccggcgctggcggatggggctccgcggccgtttgtcgtggccgggccctcaggggcagggagccggccctgcccagtgccagcttcccagacgtcgccgcttgtcccggatcgctggattgcgctctgaaacgtagagcaaggtgtccacctggcgcccatgcatgtggcccttgcctccaaccttttcaggaagatcagcaggggctgtgcgtcccccgcatgaggaggccacccggcggtggacgccctcagccaagactggaagacgagatagacttcctcgcacaggaactggcccgcaaggaatccggccactctacaccccctttgccgaaagacagacaacggctcccggaaccagcaacgttggggtttagcgcccgaggccagggtctggagctaggcttaccaagcacaccaggaacaccaacacctactccccacaccagcctcggcagtcctgtgtcctccgaccctgtacacatgtccccgctcgagcccagaggagggcaaggcgatggtttggccttggtgctgatcctcgccttttgtgttgctggagcagcagccctgtcagttgctagcctgtgctggtgtcggcttcagcgggaaattcggcttacccagaaagccgattatgccacagctaaagcaccaggatcacctgccgctcctagaatttccccaggtgatcagaggctggcacagagtgcagaaatgtatcactatcagcaccagcgtcagcaaatgctgtgcctggagcgtcacaaggagccaccgaaggaactcgatactgcctcttccgatgaggagaacgaagatggcgattttactgtgtacgaatgtcccggcctagcccccactggagaaatggaggtacggaatcctttattcgaccatgcagccctatctgccccactgcccgccccttcttcccctcctgccctcccatag

SEQ ID NO: 186326 - DNA, 978 bp, Artificial Sequence
  derived and/or modified sequence
atggccacccccctgcccccccccagcccccggcacctgcggctgctgcggctcctgctgtctggtcttgtactgggggccgctctccggggagcggctgcaggacaccctgatgtcgccgcgtgccccggcagcttggactgcgcgttaaaaagacgcgcacggtgtccaccgggggcccacgcctgtggcccatgtctgcaacctttccaggaggatcagcagggcctgtgcgtcccacgcatgaggcgccctccgggaggcggaagaccacagcctcgactcgaagatgagatcgattttcttgctcaggagttagccagaaaggagagcgggcactccactccaccactgcccaaggataggcaaagactgcccgaacctgccacactgggctttagcgcgagaggtcagggcttggaactgggcctgccctctacaccaggaacgcccactcctaccccccatacctccctcgggtcgcccgtgtcatccgatccagtgcatatgtccccactggagcctcggggggggcagggcgacgggttggccctggttcttatcttagctttctgcgtagccggcgccgcagccttgtccgtcgcttcgctctgctggtgcagacttcagcgggagattagattaactcagaaggcagactacgcgactgcaaaggccccgggatccccagccgcaccccggatcagcccaggagaccaacggttggcccagtctgcagaaatgtatcactaccagcaccaacgccagcagatgctgtgtctggagcggcacaaggaaccacctaaagagcttgatacagctagctctgatgaagagaatgaggatggcgacttcacagtttacgaatgccccggcctggcaccgacaggggaaatggaggtgcgtaaccccctcttcgaccacgcagccctgagtgcccctttgcctgcccccagttccccccccgcattaccctag

SEQ ID NO: 186327 - DNA, 2187 bp, Artificial Sequence
  derived and/or modified sequence
gtgtgcagtgtggggctgggcagagaggaagagtcctggttagccagaggtgccaccgcagactccccaggcagggttgatggccctgctggggttcccctggctccactggcttgctgtgactggggacattccttagctttgaggcaactcagctatatcccagaggggaaactgaggcagagggccattgccccctcgccccgttctccagcaccaggataagactgattagccacatgtgtcagctggcaccgtggcctgggcccctcatcagcgagatgaaagtgtggttaggaactagggaactagggcctggcctgccatccccagcactgccaacctcggcctcctgaggccctcgggtgccacctggcccctgactgcagcccctggtgtggtggctttgggagtgacctgcctgggttctgtgtctgaggccagtgaggtcagcagactccatcttaggtgtcctcggtgcctgggggacaagccagaggctggaggagcagcatcccttccaggctgcacacttgtcagtgccgggttctggggagagccgcacgggaaggagaggtcgctggcggcatcgtttgctgctccccagagacagacctgggcccttccctctgggactcccaatctggacggggttcctggcttgctgtggggcatgttgaggccggaggctgggcttgtggggctgcacggccctgcccaggagaactcagcactgcctggacggcgagactcagcttctgagctgagggctctatcaggcctggaagtggaccctggggaggggtggggcagggtagttctgataagtcctaggactgttcgcttccgggttctgagccctggcgtcagggaggaagggcatgtccagaacaatggccagaaccaggcccggccagctcggggggtgacgggggcgggtggctggggcagcgctgccgtgtgcaggggccgagccctgcggggccgtgagccggccctgccttctgcttccttcccagatgtagccgcctgtcccgggagcctggactgtgccctgaagaggcgggcaaggtgtcctcctggtgcacatgcctgtgggccctgccttcagcccttccaggaggaccagcaagggctctgtgtgcccaggatgcgccggcctccaggcgggggccggccccagcccagactggaagatgagattgacttcctggcccaggagcttgcccggaaggagtctggacactcaactccgcccctacccaaggaccgacagcggctcccggagcctgccaccctgggcttctcggcacgggggcaggggctggagctgggcctcccctccactccaggaacccccacgcccacgccccacacctccctgggctcccctgtgtcatccgacccggtgcacatgtcgcccctggagccccggggagggcaaggcgacggcctcgcccttgtgctgatcctggcgttctgtgtggccggtgcagccgccctctccgtagcctccctctgctggtgcaggctgcagcgtgagatccgcctgactcagaaggccgactacgccactgcgaaggcccctggctcacctgcagctccccggatctcgcctggggaccagcggctggcacagagcgcggagatgtaccactaccagcaccaacggcaacagatgctgtgcctggagcggcataaagagccacccaaggagctggacacggcctcctcggatgaggagaatgaggacggagacttcacggtgtacgagtgcccgggcctggccccgaccggggaaatggaggtgcgcaaccctctgttcgaccacgccgcactgtccgcgcccctgccggcccccagctcaccgcctgcactgccatgacctggaggcagacagacgcccacctgctccccgacctcgaggcccccggggaggggcagggcctggagcttcccactaaaaacatgttttgatgctgtgtgcttttggctgggcctcgggctccaggccctgggaccccttgccagggagacccccgaacctttgtgccaggacacctcctggtcccctgcacctctcctgttcggtttagacccccaaactggagggggcatggagaaccgtagagcgcaggaacgggtgggtaattctagagacaaaagccaattaaagtccatttcaga

SEQ ID NO: 186328 - DNA, 1494 bp, Artificial Sequence
  derived and/or modified sequence
gcgcgcctcgccggcgcctccatcccggatccttgctgcagcgtcagcgccgccgcccgtgcctttcctcttcctcctcctcctccttggcatccgcctcttcttcctcctgcgtcctcccccgctgcctccgctgctcccgacgcggagcccggagcccgcgccgagcccctggcctcgcggtgccatgctgccccggcggcggcgctgaaggatggcgacgccgctgcctccgccctccccgcggcacctgcggctgctgcggctgctgctctccggcctcgtcctcggcgccgccctgcgtggagccgccgccggccacccggatgtagccgcctgtcccgggagcctggactgtgccctgaagaggcgggcaaggtgtcctcctggtgcacatgcctgtgggccctgccttcagcccttccaggaggaccagcaagggctctgtgtgcccaggatgcgccggcctccaggcgggggccggccccagcccagactggaagatgagattgacttcctggcccaggagcttgcccggaaggagtctggacactcaactccgcccctacccaaggaccgacagcggctcccggagcctgccaccctgggcttctcggcacgggggcaggggctggagctgggcctcccctccactccaggaacccccacgcccacgccccacacctccctgggctcccctgtgtcatccgacccggtgcacatgtcgcccctggagccccggggagggcaaggcgacggcctcgcccttgtgctgatcctggcgttctgtgtggccggtgcagccgccctctccgtagcctccctctgctggtgcaggctgcagcgtgagatccgcctgactcagaaggccgactacgccactgcgaaggcccctggctcacctgcagctccccggatctcgcctggggaccagcggctggcacagagcgcggagatgtaccactaccagcaccaacggcaacagatgctgtgcctggagcggcataaagagccacccaaggagctggacacggcctcctcggatgaggagaatgaggacggagacttcacggtgtacgagtgcccgggcctggccccgaccggggaaatggaggtgcgcaaccctctgttcgaccacgccgcactgtccgcgcccctgccggcccccagctcaccgcctgcactgccatgacctggaggcagacagacgcccacctgctccccgacctcgaggcccccggggaggggcagggcctggagcttcccactaaaaacatgttttgatgctgtgtgcttttggctgggcctcgggctccaggccctgggaccccttgccagggagacccccgaacctttgtgccaggacacctcctggtcccctgcacctctcctgttcggtttagacccccaaactggagggggcatggagaaccgtagagcgcaggaacgggtgggtaattctagagacaaaagccaattaaagtccatttcaga

SEQ ID NO: 186329 - DNA, 1212 bp, Artificial Sequence
  derived and/or modified sequence
atgttaagacccgaggctggcttagtaggtcttcatggtcctgcgcaggagaattcagcacttccaggcagaagagattcagcatcagagctcagggccctttctggtctcgaggtcgacccgggtgaggggtggggcagggtggttctcatcagcccaaggacagtcagattcagagtgctctccccaggagtgagggaagagggacatgtccagaacaacggccagaaccaggccagaccggcaagaggcgttaccggagctggaggttggggaagtgcggcagtgtgcaggggacgcgctcttcgcggaagggaacctgccctaccaagtgccagtttccccgatgtggcagcctgtcctgggtcccttgactgcgcactgaagaggcgggctcgctgtccccctggagcccacgcctgtggtccatgtctgcagcctttccaggaggaccagcaaggcttatgcgtgcccagaatgagacgacctccaggaggcggacgccctcagccacgtctagaggacgagatcgattttctagcccaggagcttgctcgaaaagagagcggccacagtacaccccctctgcctaaagacaggcaacgcttacccgagccagctactttgggcttctcggccaggggccaaggattggaactcggcctgccatctacgcccggtacaccaacgccaacaccccacacaagccttgggtcccctgtgtcctctgaccccgttcacatgagccctctggagcccaggggagggcagggggatggattggcgttggtgctgattttagccttctgtgtggctggagcggctgctctgtccgtggcatctctgtgctggtgcagattgcaacgggagatccgtctgacccagaaggcagactacgcaactgctaaagctccgggtagccctgccgcacccaggataagccctggcgaccagcgtttggcccagtcagctgaaatgtaccattaccagcaccagaggcagcagatgctgtgtttggagagacataaagagcctccaaaggaattagatacggcatccagcgatgaagaaaatgaagacggagacttcaccgtctacgagtgccctgggctggcccctaccggggaaatggaagtgcgaaaccccctgttcgatcacgcagctctgtcagctcccttaccagctccgtcttctccacctgccctgccttag

SEQ ID NO: 186330 - DNA, 978 bp, Artificial Sequence
  derived and/or modified sequence
atggccactcccctccccccaccctcaccacgccatctgcgtcttctccgcttgctgcttagcggccttgtgctgggtgcagccctgagaggggcagctgccggacatcctgatgtggcagcctgccccggatctcttgactgtgccctaaagcgaagagcgagatgtcccccaggggcacacgcctgcggtccgtgtttacagccttttcaagaagaccagcaagggctgtgcgtaccacggatgaggcgccctcctggcggtggcaggccgcagccgaggctggaggacgagattgatttcctggcacaggagctggcccgtaaagaatctggccattcaaccccacctctcccgaaggacaggcagagattacccgaacctgccacgctgggcttctcggctaggggtcagggtctcgaactgggtctgcctagcactcctggaacacctacaccgactccgcacacctcccttggatcccccgtttcatccgatcccgtgcatatgtcaccactagaacccagaggcggacagggcgacggcctcgccttggtgctgatcctcgcgttttgcgtggccggagccgcagctctctccgtggccagcctctgttggtgcagactgcaacgtgaaatccgactgacccagaaagccgattatgccactgccaaggctcccggttccccagctgctcctagaattagccccggagaccaacgacttgcgcagtccgcagaaatgtaccattaccagcatcagcgtcagcagatgctgtgtttggagaggcacaaggagccccctaaagagcttgatacggcttcaagcgacgaagagaatgaagacggggatttcaccgtgtacgagtgtccaggactcgcccctactggtgaaatggaagttcggaatcctctctttgatcatgctgctctttccgcacccctgcctgcccctagttctcctccagcactgccttag

SEQ ID NO: 186331 - DNA, 1212 bp, Artificial Sequence
  derived and/or modified sequence
atgctgagacccgaggccggcctggtgggcctgcacggccccgcccaggagaacagcgccctgcccggcagaagagacagcgccagcgagctgagagccctgagcggcctggaggtggaccccggcgagggctggggcagagtggtgctgatcagccccagaaccgtgagattcagagtgctgagccccggcgtgagagaggagggccacgtgcagaacaacggccagaaccaggccagacccgccagaggcgtgaccggcgccggcggctggggcagcgccgccgtgtgcagaggcagagccctgagaggcagagagcccgccctgcccagcgccagcttccccgacgtggccgcctgccccggcagcctggactgcgccctgaagagaagagccagatgcccccccggcgcccacgcctgcggcccctgcctgcagcccttccaggaggaccagcagggcctgtgcgtgcccagaatgagaagaccccccggcggcggcagaccccagcccagactggaggacgagatcgacttcctggcccaggagctggccagaaaggagagcggccacagcaccccccccctgcccaaggacagacagagactgcccgagcccgccaccctgggcttcagcgccagaggccagggcctggagctgggcctgcccagcacccccggcacccccacccccaccccccacaccagcctgggcagccccgtgagcagcgaccccgtgcacatgagccccctggagcccagaggcggccagggcgacggcctggccctggtgctgatcctggccttctgcgtggccggcgccgccgccctgagcgtggccagcctgtgctggtgcagactgcagagagagatcagactgacccagaaggccgactacgccaccgccaaggcccccggcagccccgccgcccccagaatcagccccggcgaccagagactggcccagagcgccgagatgtaccactaccagcaccagagacagcagatgctgtgcctggagagacacaaggagccccccaaggagctggacaccgccagcagcgacgaggagaacgaggacggcgacttcaccgtgtacgagtgccccggcctggcccccaccggcgagatggaggtgagaaaccccctgttcgaccacgccgccctgagcgcccccctgcccgcccccagcagcccccccgccctgccctag

SEQ ID NO: 186332 - DNA, 978 bp, Artificial Sequence
  derived and/or modified sequence
atggccacccccctgcccccccccagccccagacacctgagactgctgagactgctgctgagcggcctggtgctgggcgccgccctgagaggcgccgccgccggccaccccgacgtggccgcctgccccggcagcctggactgcgccctgaagagaagagccagatgcccccccggcgcccacgcctgcggcccctgcctgcagcccttccaggaggaccagcagggcctgtgcgtgcccagaatgagaagaccccccggcggcggcagaccccagcccagactggaggacgagatcgacttcctggcccaggagctggccagaaaggagagcggccacagcaccccccccctgcccaaggacagacagagactgcccgagcccgccaccctgggcttcagcgccagaggccagggcctggagctgggcctgcccagcacccccggcacccccacccccaccccccacaccagcctgggcagccccgtgagcagcgaccccgtgcacatgagccccctggagcccagaggcggccagggcgacggcctggccctggtgctgatcctggccttctgcgtggccggcgccgccgccctgagcgtggccagcctgtgctggtgcagactgcagagagagatcagactgacccagaaggccgactacgccaccgccaaggcccccggcagccccgccgcccccagaatcagccccggcgaccagagactggcccagagcgccgagatgtaccactaccagcaccagagacagcagatgctgtgcctggagagacacaaggagccccccaaggagctggacaccgccagcagcgacgaggagaacgaggacggcgacttcaccgtgtacgagtgccccggcctggcccccaccggcgagatggaggtgagaaaccccctgttcgaccacgccgccctgagcgcccccctgcccgcccccagcagcccccccgccctgccctag

SEQ ID NO: 186333 - protein, 310 aa, Artificial Sequence
  derived and/or modified sequence
MVYKTLFALCILTAGWRVQSLPTSAPLSVSLPTNIVPPTTIWTSSPQNTDADTASPSNGTHNNSVLPVTASAPTSLLPKNISIESREEEITSPGSNWEGTNTDPSPSGFSSTSGGVHLTTTLEEHSSGTPEAGVAATLSQSAAEPPTLISPQAPASSPSSLSTSPPEVFSASVTTNHSSTVTSTQPTGAPTAPESPTEESSSDHTPTSHATAEPVPQEKTPPTTVSGKVMCELIDMETTTTFPRVIMQEVEHALSSGSIAAITVTVIAVVLLVFGVAAYLKIRHSSYGRLLDDHDYGSWGNYNNPLYDDS

SEQ ID NO: 186334 - DNA, 933 bp, Artificial Sequence
  derived and/or modified sequence
atggtgtacaagaccctgttcgccctgtgcatcctgaccgccggctggagagtgcagagcctgcccaccagcgcccccctgagcgtgagcctgcccaccaacatcgtgccccccaccaccatctggaccagcagcccccagaacaccgacgccgacaccgccagccccagcaacggcacccacaacaacagcgtgctgcccgtgaccgccagcgcccccaccagcctgctgcccaagaacatcagcatcgagagcagagaggaggagatcaccagccccggcagcaactgggagggcaccaacaccgaccccagccccagcggcttcagcagcaccagcggcggcgtgcacctgaccaccaccctggaggagcacagcagcggcacccccgaggccggcgtggccgccaccctgagccagagcgccgccgagccccccaccctgatcagcccccaggcccccgccagcagccccagcagcctgagcaccagcccccccgaggtgttcagcgccagcgtgaccaccaaccacagcagcaccgtgaccagcacccagcccaccggcgcccccaccgcccccgagagccccaccgaggagagcagcagcgaccacacccccaccagccacgccaccgccgagcccgtgccccaggagaagaccccccccaccaccgtgagcggcaaggtgatgtgcgagctgatcgacatggagaccaccaccaccttccccagagtgatcatgcaggaggtggagcacgccctgagcagcggcagcatcgccgccatcaccgtgaccgtgatcgccgtggtgctgctggtgttcggcgtggccgcctacctgaagatcagacacagcagctacggcagactgctggacgaccacgactacggcagctggggcaactacaacaaccccctgtacgacgacagctag

SEQ ID NO: 186335 - DNA, 933 bp, Artificial Sequence
  derived and/or modified sequence
atggtgtataaaacactgttcgcactgtgcatactaactgccggttggcgcgttcaatcactgcctacgtcagctccgctgtctgtaagccttccaactaacatagttcctccaacaaccatatggacctcatctccccaaaacacagatgccgataccgcctcaccttccaacggaacacacaataactcagtgttaccagtgactgccagtgcaccaaccagcctgctgccaaaaaacataagtatcgagtccagggaggaggagattacatcccccggctctaattgggagggcactaacacagatccgtccccttccggcttttcctctacttcagggggcgtccacttgacaacgactttagaagagcactcaagcggcactcccgaggccggggtagcagcaaccctgtctcaatccgcagcagagccgcccacactgatttcgccgcaggcccctgctagcagtccctccagcctttccacatccccacccgaggtgttctctgccagcgtgacaaccaatcactcatctactgtcaccagcacgcagcctacaggcgcgcctacggcccccgagtccccgacagaggagagcagctctgaccataccccaacctcccacgcaacagctgagcctgtgcctcaggagaagaccccccctacaaccgttagtggaaaggtgatgtgcgagctgattgatatggaaaccacgacaacgtttccaagagttatcatgcaagaagttgaacatgctctgtcatctggtagcattgctgccattactgtgaccgtaatcgctgttgtgctgctcgtgttcggagttgccgcctacttgaaaatccgacatagttcttacggccgcttgctagacgaccacgattatggctcctggggcaactataacaacccactgtacgatgactcatag

SEQ ID NO: 186336 - DNA, 933 bp, Artificial Sequence
  derived and/or modified sequence
atggtgtacaagaccctgtttgccctgtgcatcctgacagctggctggagggtgcagagcctgcccaccagcgcccccctgtctgtgtccctgcccaccaacatcgtgccccccaccaccatctggaccagcagcccccagaacacagatgctgacacagccagccccagcaatggcacccacaacaacagcgtgctgcctgtgacagccagcgcccccaccagcctgctgcccaagaacatcagcattgagagccgggaggaggagatcaccagccctggcagcaactgggagggcaccaacacagaccccagccccagcggcttcagcagcaccagcggaggagtgcacctgaccaccaccctggaggagcacagcagcggcaccccagaggccggcgtggccgccaccctgagccagagcgctgctgagccccccaccctcatcagcccccaggccccagccagcagccccagcagcctgagcaccagccccccagaggtgttcagcgcctctgtgaccaccaaccacagcagcacagtgaccagcacccagcccactggagcccccacagcccctgagagccccacagaggagagcagcagtgaccacacccccaccagccacgccacagctgagcctgtgccccaggagaagaccccacccaccaccgtgtctgggaaggtgatgtgtgagctgattgacatggagaccaccaccaccttccccagggtcatcatgcaggaggtggagcacgccctgagcagcggcagcattgctgccatcaccgtgacagtgattgctgtggtgctgctggtgtttggagtggccgcctacctgaagatccgccacagcagctatggccgcctgctggatgaccatgactatggctcctggggcaactacaacaaccccctgtatgatgacagctag

SEQ ID NO: 186337 - DNA, 933 bp, Artificial Sequence
  derived and/or modified sequence
atggtgtacaagaccctgttcgccctgtgcatcctgaccgccggctggagggtacagtctttaccgacaagcgctcccctgtccgtgtccctacccacaaatattgtcccacccactaccatatggacaagctctcctcagaacaccgatgccgacaccgccagtccttcaaatgggacccataataatagtgttctgccagtcacggcttcagcgccaacctctctgttgcctaagaacatttccattgaaagtagggaggaagaaatcactagtcccggctctaactgggagggcactaatacagacccatctccctcagggtttagcagtaccagcgggggagtgcatctgaccaccactctcgaggagcactcttccgggacccctgaagctggagtggcagctaccctgagccaaagcgcagcggagcctccaaccctcatctcgccccaggctccggccagctcaccatcttccctgtctacttcccctccggaagtcttctctgctagtgttacaacaaaccactcctccacggtgacaagtacacaaccgaccggagctccaacggccccagagtctcctacagaggagagttcttccgaccacaccccgacaagccatgctaccgcagagccagtgccccaggagaaaaccccgccaaccactgtgtcgggtaaggtaatgtgcgaattgatcgacatggaaactacaacaactttcccccgtgtcatcatgcaagaagtcgaacatgctcttagcagcgggtctattgctgcaatcactgtgaccgtgatagcagttgtactgcttgtttttggagtggcagcttacctcaagatcagacacagtagctacggaagactgctggacgatcatgactacggcagctgggggaactacaacaaccctctttatgacgattcctag

SEQ ID NO: 186338 - DNA, 5011 bp, Artificial Sequence
  derived and/or modified sequence
agaagagcgcggagcaccggagggcacgcagctgacggagctgcgctgcgttcgcctcgtttgcctcgcgccctccactggagctgttcgcgcctcccggctcccaccgcagcccacccggcagaggagtcgctaccagcgcccagtgcgctctgtcagtccgcaaactccttgccgcccgccccgggctgggcaccaaataccaggctaccatggtctacaagactctcttcgctctttgcatcttaactgcaggatggagggtacagagtctgcctacatcagctcctttgtctgtttctcttccgacaaacattgtaccaccgaccaccatctggactagctctccacaaaacactgatgcagacactgcctccccatccaacggcactcacaacaactcggtgctcccagttacagcatcagccccaacatctctgcttcctaagaacatttccatagagtccagagaagaggagatcaccagcccaggttcgaattgggaaggcacaaacacagacccctcaccttctgggttctcgtcaacaagcggtggagtccacttaacaaccacgttggaggaacacagctcgggcactcctgaagcaggcgtggcagctacactgtcgcagtccgctgctgagcctcccacactcatctcccctcaagctccagcctcatcaccctcatccctatcaacctcaccacctgaggtcttttctgcctccgttactaccaaccatagctccactgtgaccagcacccaacccactggagctccaactgcaccagagtccccgacagaggagtccagctctgaccacacacccacttcacatgccacagctgagccagtaccccaggagaaaacacccccaacaactgtgtcaggcaaagtgatgtgtgagctcatagacatggagaccaccaccacctttcccagggtgatcatgcaggaagtagaacatgcattaagttcaggcagcatcgccgccattaccgtgacagtcattgccgtggtgctgctggtgtttggagttgcagcctacctaaaaatcaggcattcctcctatggaagacttttggacgaccatgactacgggtcctggggaaactacaacaaccctctgtacgatgactcctaacaatggaatatggcctgggatgaggattaactgttctttatttataagtgcttatccagtagaattaataagtacctgatgcgcattgaacgacaatcttaagccctgttttgttggtatggttgtttttgttttcctccctctcctctggctgctacaacttcccctttctggtacaagaagaaccattctttaaaggtgagtggaggctgatttgcagctgaagtgggccagccttgcaccagccaggccagaccaccatggtgaaggcttctttccccactgcaggacccactttgagaaggaccgaggaggaggatttgggttgttttgttaggggttactttcaggggaacatttcatttgtgttatttcttaaacttctatttaggaaattacattaagtattaatgaggggaaaggaaatgagctctacgaggatttcaccctgcatgggagagagcagggttttctcagattcctttttaatctctatttatctggttgtttctgacaggatgctgcctgcttggctctacaagctggaaagcagcttcttagctgcctaattaatgaaagatgaaaataggaagtgccctggagggggccagcaggtcacggggcagaatctctcaggttgctgtgggatctcagtgtgcccctacctgttctcccctccaggccacctgtctctgtaaaggatgtctgctctgttcaaaaggcagctgggatcccagcccacaagtgatcagcagagttgcatttccaaagaaaaaggctatgagatgagctgagttatagagagaaagggagaggcatgtacggtgtggggaagtggaagagaagctggcgggggagaaggaggctaacctgcactgagtacttcattaggacaagtgagaatcagctattgataatggccagagatatccacagcttggaggagcccagagaccgtttgctttatacccacacagcaactggtccactgctttactgtctgttggataatggctgtaaaatgtttaaaaacaaaacaaaacaaaaaagaggcactagtctatctgcaattactcaacgaggcattttcataggaaacagactatgattaatccatttattcttcccacacacttaccttactaagtctttgctttaataaatgagcaaccctgggtatagtcttaaaattctgcacaataaattttgagaaagaattgttcctctttgtaggtatctgtgtattgcaatcattctcaaccaggaggtgattttgccccctgactccaccccagggacattcaaaaatgtctggtgacagttttcattgtcatgacttgggggtgctactagaagccaggaatgctgccaaacattctaccatgcacagcacaacctacaacagcaaagaatcatccaccccaaaatatcagtagtgccgagattgagaaaccctgatttatcacaatgcccactgtgacagaacaagacactcacagattagtgatacgttttatttttaacaaaatgaaatgatgtgttaagtttttatttccaaagtgtttagtttattggctgatgggttgttcttggtatgcatggtgacctttttatttctgtgtgcttcctagagagctttatttcatggcgacaactctgtcttcttgtaacagctgatattagcaagcagcatcttatgtcctgatttcatatagtagaaaacaaacattgggtccgacttcaaaatgtgttgtattgtcctacagtgtcataaagaacctgaaaatgaacttttgtttctaaagttggaccttgctgccatgactgtttagtttacagaaacttgaccccggctcatcctgtctctggctgtggcccggcaaagcactgaaaacccctctggtctcagagacagtaggggcagtgccactttctacaacctgccaacccacacactggagtaattctgaaaaaaattattcctaaactctctaagtgtggacggagaatgagcaagccccagaagtattttacaaccagagtgggtaatgaggagggggcttactggaatcgtcatatctctgaatattgaaaacaacaactaaaaaagtggaccttctcagaaaaaaagggcagcaaatgaccaagggcgccccttctggccgtgcttggcttgagtaactgtctctctttccccacccccatcacagggctttcagtttggcaaaggaaaagcagataaaaacagaacattccatatgtttctttctccatcggccaaaaacattttgacacaatgtttgtgaaacacctttggagaggtgcacttctgaatgctgcctctgccgtaaatcctggggcaagggatcagcctcttcccaggaaccatcgccttctataaaccgtgaactcaagcaggcattttttttttcttaccgaaaggctgctattgtgcaagggcacataatgggtctgttgctcttattggcttccaaatgtgcatggcaaagagagagatgtgggcctagagcagatatattcagcaaggtgacagcttcccataacaattctaacacttcttatcttatgtgagaataaaatatttaagggttgaaccttattttgccaaatgtatcttttctgcttttgaattgggcagaagattttagcaactatattctacaaatgttacttataacacacacacacacatctgaaatatatgccgaaaattgacgtctttgacctcagggagagcacctgtccaggtctgcctaaaggaaatggctccagtgggtctaaacaaccacatcctatccatggataggtctagtcataacactttagagagaatgtcagagcaggagggaggcaagccgcctcttctcggccatcgactgcagatgatgaaagagcgggattcaactttgttttcttttcctgtggccccagtgaaacctcctgccctccctgcacgtctgtgtcttcatttctaaaatgggggtgatgctttcatattgacctcaccccatactacctcacagatgtgttgtgaggattaataaaattatgtctatggtattttcagtttctggagaaaaatacttatagacagtttaactattacatagatatataagtgatctcagtttcttgtttgctgtgatactaatgtgttgttttaacttattccataaaatgacagttgtgtcctagccacatcagacagctatctaagctctggactacccctttgtgcagctgaatcactgcagggttgaccatgcctggtgccacagccatggtttccatttctagatgaaaggatggcctaggacataggtctcaaagactcttggatcagaatcaggagattagggaaaacaggatggatacctgagcactaacagcagtagacgtagacctctgtcctttaccatctgaggtcttctggattctttgtggggttaattttgatttgatgtcatctgtttgcccttcatcttgcttgcaagtgtgcatggttcaatccctcacatccaggaaatgaattttgcaattgggccagatgctaatttgcacgttgattcaccttctttgcctttaagccttttttttcttttttttttttttggcaaatgaatgtaccatttcaactttgattttaatagtgctagttgatattggtaataatgctaaccaagagatcaatgccagatttttctcttggggtaagttagctgaagtcatttaaagatggaaaggtgggaaaattctttgatatttgatgtcattgtatccacatttgttgtaagacatattgcataccaattataattatatcaattaaagttgataaaagcttc

SEQ ID NO: 186339 - DNA, 933 bp, Artificial Sequence
  derived and/or modified sequence
atggtgtacaagaccttgtttgcactgtgcatcctgactgcagggtggagagttcagtccttaccgacaagcgcccctctctcagtaagcttgcctaccaatattgtgccaccaacaaccatctggacctcatcgccacagaacacagacgcagacacagctagcccttctaacggcactcacaacaactcggttctacccgtgaccgccagcgctcctacctcactgttgccaaagaatatctctattgagtcccgtgaagaggagatcaccagcccagggtccaactgggaagggaccaacactgaccctagcccgagtgggttctcctcaaccagcggaggagtgcacctgactaccactctcgaggagcattcatccggaacccccgaagcaggcgtcgcagcgactctctcccagtctgccgctgaacccccaacgctaatctctcctcaagctcctgccagctctccgtccagcttatccacttcgcctccagaagtcttctctgcgtcggtgactacaaatcattcttccacagtgacttccacccaacccactggggctccaacggcaccggaaagtccgactgaggaaagttcatctgatcatacccctactagccatgctaccgccgagccagtgccgcaagagaagactccgcctactaccgtgtccgggaaggtgatgtgcgagctcatcgatatggaaaccaccaccactttcccgagggtgataatgcaggaagttgaacacgccctgtccagcggatccatcgccgctatcactgtgacagttattgctgtcgtgctccttgtgttcggcgttgctgcttacctcaaaatccgtcattcttcctacgggaggctgcttgatgaccacgactatggatcctggggaaactacaacaatcctctctacgacgattcctag

SEQ ID NO: 186340 - protein, 573 aa, Artificial Sequence
  derived and/or modified sequence
MDAKSLTAWSRTLVTFKDVFVDFTREEWKLLDTAQQIVYRNVMLENYKNLVSLGYQLTKPDVILRLEKGEEPWLVEREIHQETHPDSETAFEIKSSVSSRSIFKDKQSCDIKMEGMARNDLWYLSLEEVWKCRDQLDKYQENPERHLRQVAFTQKKVLTQERVSESGKYGGNCLLPAQLVLREYFHKRDSHTKSLKHDLVLNGHQDSCASNSNECGQTFCQNIHLIQFARTHTGDKSYKCPDNDNSLTHGSSLGISKGIHREKPYECKECGKFFSWRSNLTRHQLIHTGEKPYECKECGKSFSRSSHLIGHQKTHTGEEPYECKECGKSFSWFSHLVTHQRTHTGDKLYTCNQCGKSFVHSSRLIRHQRTHTGEKPYECPECGKSFRQSTHLILHQRTHVRVRPYECNECGKSYSQRSHLVVHHRIHTGLKPFECKDCGKCFSRSSHLYSHQRTHTGEKPYECHDCGKSFSQSSALIVHQRIHTGEKPYECCQCGKAFIRKNDLIKHQRIHVGEETYKCNQCGIIFSQNSPFIVHQIAHTGEQFLTCNQCGTALVNTSNLIGYQTNHIRENAY

SEQ ID NO: 186341 - protein, 72 aa, Artificial Sequence
  derived and/or modified sequence
MDAKSLTAWSRTLVTFKDVFVDFTREEWKLLDTAQQIVYRNVMLENYKNLVSLGYQLTKPDVILRLEKGEEP

SEQ ID NO: 186342 - protein, 43 aa, Artificial Sequence
  derived and/or modified sequence
MDAKSLTAWSRTLVTFKDVFVDFTREEWKLLDTAQQIVYRNVM

SEQ ID NO: 186343 - protein, 47 aa, Artificial Sequence
  derived and/or modified sequence
MDAKSLTAWSRTLVTFKDVFVDFTREEWKLLDTAQQIVYRNVMLENY

SEQ ID NO: 186344 - protein, 1489 aa, Artificial Sequence
  derived and/or modified sequence
MDKKYSIGLAIGTNSVGWAVITDEYKVPSKKFKVLGNTDRHSIKKNLIGALLFDSGETAEATRLKRTARRRYTRRKNRICYLQEIFSNEMAKVDDSFFHRLEESFLVEEDKKHERHPIFGNIVDEVAYHEKYPTIYHLRKKLVDSTDKADLRLIYLALAHMIKFRGHFLIEGDLNPDNSDVDKLFIQLVQTYNQLFEENPINASGVDAKAILSARLSKSRRLENLIAQLPGEKKNGLFGNLIALSLGLTPNFKSNFDLAEDAKLQLSKDTYDDDLDNLLAQIGDQYADLFLAAKNLSDAILLSDILRVNTEITKAPLSASMIKRYDEHHQDLTLLKALVRQQLPEKYKEIFFDQSKNGYAGYIDGGASQEEFYKFIKPILEKMDGTEELLVKLNREDLLRKQRTFDNGSIPHQIHLGELHAILRRQEDFYPFLKDNREKIEKILTFRIPYYVGPLARGNSRFAWMTRKSEETITPWNFEEVVDKGASAQSFIERMTNFDKNLPNEKVLPKHSLLYEYFTVYNELTKVKYVTEGMRKPAFLSGEQKKAIVDLLFKTNRKVTVKQLKEDYFKKIECFDSVEISGVEDRFNASLGTYHDLLKIIKDKDFLDNEENEDILEDIVLTLTLFEDREMIEERLKTYAHLFDDKVMKQLKRRRYTGWGRLSRKLINGIRDKQSGKTILDFLKSDGFANRNFMQLIHDDSLTFKEDIQKAQVSGQGDSLHEHIANLAGSPAIKKGILQTVKVVDELVKVMGRHKPENIVIEMARENQTTQKGQKNSRERMKRIEEGIKELGSQILKEHPVENTQLQNEKLYLYYLQNGRDMYVDQELDINRLSDYDVDAIVPQSFLKDDSIDNKVLTRSDKNRGKSDNVPSEEVVKKMKNYWRQLLNAKLITQRKFDNLTKAERGGLSELDKAGFIKRQLVETRQITKHVAQILDSRMNTKYDENDKLIREVKVITLKSKLVSDFRKDFQFYKVREINNYHHAHDAYLNAVVGTALIKKYPKLESEFVYGDYKVYDVRKMIAKSEQEIGKATAKYFFYSNIMNFFKTEITLANGEIRKRPLIETNGETGEIVWDKGRDFATVRKVLSMPQVNIVKKTEVQTGGFSKESILPKRNSDKLIARKKDWDPKKYGGFDSPTVAYSVLVVAKVEKGKSKKLKSVKELLGITIMERSSFEKNPIDFLEAKGYKEVKKDLIIKLPKYSLFELENGRKRMLASAGELQKGNELALPSKYVNFLYLASHYEKLKGSPEDNEQKQLFVEQHKHYLDEIIEQISEFSKRVILADANLDKVLSAYNKHRDKPIREQAENIIHLFTLTNLGAPAAFKYFDTTIDRKRYTSTKEVLDATLIHQSITGLYETRIDLSQLGGDAYPYDVPDYASLGSGSPKKKRKVEDPKKKRKVDGIGSGSNGSSGGGGGGMDAKSLTAWSRTLVTFKDVFVDFTREEWKLLDTAQQIVYRNVMLENYKNLVSLGYQLTKPDVILRLEKGEEP

SEQ ID NO: 186345 - protein, 1722 aa, Artificial Sequence
  derived and/or modified sequence
MDKKYSIGLAIGTNSVGWAVITDEYKVPSKKFKVLGNTDRHSIKKNLIGALLFDSGETAEATRLKRTARRRYTRRKNRICYLQEIFSNEMAKVDDSFFHRLEESFLVEEDKKHERHPIFGNIVDEVAYHEKYPTIYHLRKKLVDSTDKADLRLIYLALAHMIKFRGHFLIEGDLNPDNSDVDKLFIQLVQTYNQLFEENPINASGVDAKAILSARLSKSRRLENLIAQLPGEKKNGLFGNLIALSLGLTPNFKSNFDLAEDAKLQLSKDTYDDDLDNLLAQIGDQYADLFLAAKNLSDAILLSDILRVNTEITKAPLSASMIKRYDEHHQDLTLLKALVRQQLPEKYKEIFFDQSKNGYAGYIDGGASQEEFYKFIKPILEKMDGTEELLVKLNREDLLRKQRTFDNGSIPHQIHLGELHAILRRQEDFYPFLKDNREKIEKILTFRIPYYVGPLARGNSRFAWMTRKSEETITPWNFEEVVDKGASAQSFIERMTNFDKNLPNEKVLPKHSLLYEYFTVYNELTKVKYVTEGMRKPAFLSGEQKKAIVDLLFKTNRKVTVKQLKEDYFKKIECFDSVEISGVEDRFNASLGTYHDLLKIIKDKDFLDNEENEDILEDIVLTLTLFEDREMIEERLKTYAHLFDDKVMKQLKRRRYTGWGRLSRKLINGIRDKQSGKTILDFLKSDGFANRNFMQLIHDDSLTFKEDIQKAQVSGQGDSLHEHIANLAGSPAIKKGILQTVKVVDELVKVMGRHKPENIVIEMARENQTTQKGQKNSRERMKRIEEGIKELGSQILKEHPVENTQLQNEKLYLYYLQNGRDMYVDQELDINRLSDYDVDAIVPQSFLKDDSIDNKVLTRSDKNRGKSDNVPSEEVVKKMKNYWRQLLNAKLITQRKFDNLTKAERGGLSELDKAGFIKRQLVETRQITKHVAQILDSRMNTKYDENDKLIREVKVITLKSKLVSDFRKDFQFYKVREINNYHHAHDAYLNAVVGTALIKKYPKLESEFVYGDYKVYDVRKMIAKSEQEIGKATAKYFFYSNIMNFFKTEITLANGEIRKRPLIETNGETGEIVWDKGRDFATVRKVLSMPQVNIVKKTEVQTGGFSKESILPKRNSDKLIARKKDWDPKKYGGFDSPTVAYSVLVVAKVEKGKSKKLKSVKELLGITIMERSSFEKNPIDFLEAKGYKEVKKDLIIKLPKYSLFELENGRKRMLASAGELQKGNELALPSKYVNFLYLASHYEKLKGSPEDNEQKQLFVEQHKHYLDEIIEQISEFSKRVILADANLDKVLSAYNKHRDKPIREQAENIIHLFTLTNLGAPAAFKYFDTTIDRKRYTSTKEVLDATLIHQSITGLYETRIDLSQLGGDAYPYDVPDYASLGSGSPKKKRKVEDPKKKRKVDGIGSGSNGSSGSSELIKENMHMKLYMEGTVDNHHFKCTSEGEGKPYEGTQTMRIKVVEGGPLPFAFDILATSFLYGSKTFINHTQGIPDFFKQSFPEGFTWERVTTYEDGGVLTATQDTSLQDGCLIYNVKIRGVNFTSNGPVMQKKTLGWEAFTETLYPADGGLEGRNDMALKLVGGSHLIANIKTTYRSKKPAKNLKMPGVYYVDYRLERIKEANNETYVEQHEVAVARYCDLPSKLGHKLNGGGGGMDAKSLTAWSRTLVTFKDVFVDFTREEWKLLDTAQQIVYRNVMLENYKNLVSLGYQLTKPDVILRLEKGEEP

SEQ ID NO: 186346 - DNA, 1722 bp, Artificial Sequence
  derived and/or modified sequence
atggacgccaagagcctgaccgcctggagcagaaccctggtgaccttcaaggacgtgttcgtggacttcaccagagaggagtggaagctgctggacaccgcccagcagatcgtgtacagaaacgtgatgctggagaactacaagaacctggtgagcctgggctaccagctgaccaagcccgacgtgatcctgagactggagaagggcgaggagccctggctggtggagagagagatccaccaggagacccaccccgacagcgagaccgccttcgagatcaagagcagcgtgagcagcagaagcatcttcaaggacaagcagagctgcgacatcaagatggagggcatggccagaaacgacctgtggtacctgagcctggaggaggtgtggaagtgcagagaccagctggacaagtaccaggagaaccccgagagacacctgagacaggtggccttcacccagaagaaggtgctgacccaggagagagtgagcgagagcggcaagtacggcggcaactgcctgctgcccgcccagctggtgctgagagagtacttccacaagagagacagccacaccaagagcctgaagcacgacctggtgctgaacggccaccaggacagctgcgccagcaacagcaacgagtgcggccagaccttctgccagaacatccacctgatccagttcgccagaacccacaccggcgacaagagctacaagtgccccgacaacgacaacagcctgacccacggcagcagcctgggcatcagcaagggcatccacagagagaagccctacgagtgcaaggagtgcggcaagttcttcagctggagaagcaacctgaccagacaccagctgatccacaccggcgagaagccctacgagtgcaaggagtgcggcaagagcttcagcagaagcagccacctgatcggccaccagaagacccacaccggcgaggagccctacgagtgcaaggagtgcggcaagagcttcagctggttcagccacctggtgacccaccagagaacccacaccggcgacaagctgtacacctgcaaccagtgcggcaagagcttcgtgcacagcagcagactgatcagacaccagagaacccacaccggcgagaagccctacgagtgccccgagtgcggcaagagcttcagacagagcacccacctgatcctgcaccagagaacccacgtgagagtgagaccctacgagtgcaacgagtgcggcaagagctacagccagagaagccacctggtggtgcaccacagaatccacaccggcctgaagcccttcgagtgcaaggactgcggcaagtgcttcagcagaagcagccacctgtacagccaccagagaacccacaccggcgagaagccctacgagtgccacgactgcggcaagagcttcagccagagcagcgccctgatcgtgcaccagagaatccacaccggcgagaagccctacgagtgctgccagtgcggcaaggccttcatcagaaagaacgacctgatcaagcaccagagaatccacgtgggcgaggagacctacaagtgcaaccagtgcggcatcatcttcagccagaacagccccttcatcgtgcaccagatcgcccacaccggcgagcagttcctgacctgcaaccagtgcggcaccgccctggtgaacaccagcaacctgatcggctaccagaccaaccacatcagagagaacgcctactag

SEQ ID NO: 186347 - DNA, 219 bp, Artificial Sequence
  derived and/or modified sequence
atggacgccaagagcctgaccgcctggagcagaaccctggtgaccttcaaggacgtgttcgtggacttcaccagagaggagtggaagctgctggacaccgcccagcagatcgtgtacagaaacgtgatgctggagaactacaagaacctggtgagcctgggctaccagctgaccaagcccgacgtgatcctgagactggagaagggcgaggagccctag

SEQ ID NO: 186348 - DNA, 132 bp, Artificial Sequence
  derived and/or modified sequence
atggacgccaagagcctgaccgcctggagcagaaccctggtgaccttcaaggacgtgttcgtggacttcaccagagaggagtggaagctgctggacaccgcccagcagatcgtgtacagaaacgtgatgtag

SEQ ID NO: 186349 - DNA, 144 bp, Artificial Sequence
  derived and/or modified sequence
atggacgccaagagcctgaccgcctggagcagaaccctggtgaccttcaaggacgtgttcgtggacttcaccagagaggagtggaagctgctggacaccgcccagcagatcgtgtacagaaacgtgatgctggagaactactag

SEQ ID NO: 186350 - DNA, 1722 bp, Artificial Sequence
  derived and/or modified sequence
atggatgccaaatctctaaccgcttggagtcgcacactggtgaccttcaaggacgttttcgtggattttacccgtgaggagtggaaactgctggatacagcacaacagatagtctatcgcaacgttatgctggagaattataagaacctggtaagcctggggtaccaactaaccaaacctgacgtgatcctccggttggaaaaaggcgaggaaccgtggctggtagaacgtgagattcatcaggagacacatcctgattcagaaactgccttcgagattaagagttcagtctccagtcgctccatctttaaggataagcagtcctgcgatattaagatggagggcatggcccggaacgacctctggtatctgtcactagaggaagtgtggaagtgtagggatcagctcgataagtaccaggagaatccagaaagacacctgaggcaagtagcttttacccagaaaaaagttctgacacaggagcgagtcagtgaatccggtaagtatggcgggaactgcctgcttccagcgcaactggtcctgcgggagtattttcacaaacgggactcccacacgaagagcctgaagcacgatctggtcctgaatggacaccaggactcatgtgcgtctaattcgaatgaatgcggtcaaactttttgtcagaacatacatctcattcagtttgcacggacccacactggcgacaagagttacaaatgcccggacaatgacaacagcctaacgcatggcagctccttgggaatttcgaagggaatccatcgggaaaaaccttacgagtgcaaggagtgcgggaaattcttctcatggaggtcaaacctcacacgacatcagctaatccacacgggcgagaaaccatatgaatgcaaggagtgcggaaaaagtttcagccgttcctcccatcttatcggccatcagaagacccacacaggtgaggagccttatgagtgcaaagagtgcgggaagagctttagttggtttagccacctcgtgacccatcagcggacccacacgggcgataagctctatacctgcaaccagtgcggcaaaagcttcgtgcactccagccgcttaattaggcaccagcggacccacactggggagaagccttatgagtgtcctgaatgcggcaagagcttccgacagtctacccatctgattctccatcaaaggactcacgtccgagtgcggccgtatgaatgtaacgaatgcgggaagtcctactcccagcgaagtcatctggttgtgcaccaccggatacacacaggcctgaaacctttcgagtgtaaagactgcggcaagtgcttctcaaggagctcacatctctacagccaccagcgcacacacactggcgaaaagccttatgagtgccacgactgtggtaaaagcttttctcagtcttccgccttgattgtccatcagaggatccacaccggcgaaaagccgtatgaatgttgtcagtgcggcaaagcctttattagaaagaacgatctcatcaagcaccagaggatccacgtcggagaggagacttataagtgcaaccagtgcggaatcatcttcagtcagaactcgccttttatcgtgcaccagatcgcgcatacaggagaacagtttttgacatgtaaccagtgtggaaccgccctggtgaacaccagcaaccttattggctatcagacgaatcacatcagagagaatgcttactag

SEQ ID NO: 186351 - DNA, 1722 bp, Artificial Sequence
  derived and/or modified sequence
atggacgctaaatcgttgaccgcatggtcccgaacactggtcacctttaaagacgttttcgttgactttacccgggaggagtggaagctcctcgatactgcccagcagatcgtgtatcgcaatgttatgctcgagaattataaaaacttggtgtcacttgggtaccaactcaccaagcccgatgtgatcctgcggctggagaaaggggaggaaccatggcttgttgaacgggagatccaccaagagacacatccagacagtgaaacagctttcgaaattaagtcgtcagtttcctccaggtctatcttcaaagataagcagagctgcgatattaagatggagggaatggcacgcaacgacctttggtacttgtcactggaggaggtctggaagtgcagagatcagttagacaagtaccaggagaaccccgaacgccacttgaggcaagtggccttcactcagaaaaaagtgctcacccaggaaagagtgtcggaaagcggaaagtacggtggcaattgtctcctgcctgcccaactggtgttacgcgagtacttccataagcgggattcccacacaaaaagcctgaaacacgatctggtgctcaatggccaccaggatagttgtgcgtctaacagtaacgaatgcgggcaaacattctgccagaatattcacttgatccagttcgctcgcacccacaccggagacaaaagttacaaatgcccagacaatgataatagcctgacccatggcagctccctagggatcagcaagggcatccaccgcgaaaagccctatgaatgcaaagaatgcggaaagttcttttcctggcggagcaacctaacaaggcaccaactgatacataccggggagaaaccttatgagtgcaaggaatgtggtaaatcattctctcgcagttcccacttgatcggccaccagaagacacatacaggagaggagccatacgagtgcaaagagtgcggaaagagctttagttggttttctcacctggttacacaccagcggactcacactggggacaagctttacacctgcaaccagtgcgggaaatcttttgtccacagcagccggctgatccgccaccagcgaacacacacaggagagaagccatacgagtgccctgagtgcggaaagagcttcagacagtctactcatctgatcttacaccaacgcacccacgtacgggtgaggccatacgaatgtaatgagtgcggcaaaagctattctcagcggtctcacctggttgtacaccatcggatccacacaggactgaaaccattcgagtgcaaggactgcggaaaatgcttttcacgctcctctcacctatatagccaccagcggacgcacaccggggagaaaccatacgagtgtcacgattgcggaaagagcttttcccagtccagtgccctcatcgttcatcagcgcatccacaccggcgaaaagccgtacgaatgttgccaatgcgggaaagcctttatcaggaaaaacgacctgatcaagcaccagaggatccatgtaggagaagaaacttacaagtgtaaccagtgcgggatcatattttctcagaatagcccattcatagtgcatcagatcgcgcacaccggtgaacagttcctgacttgtaatcagtgcggtacagcactcgtaaacacttctaatctgataggataccagacaaaccacattcgggagaatgcttactag

SEQ ID NO: 186352 - DNA, 219 bp, Artificial Sequence
  derived and/or modified sequence
atggatgccaaaagcctgaccgcctggtcccgaacactcgtcacctttaaggacgtgtttgtggatttcactcgggaggagtggaagcttctcgatacagcgcagcagatcgtatacaggaacgtgatgctggaaaactataagaaccttgtttctttaggttatcagctgacaaagcccgatgttatacttagactggagaagggcgaagagccttag

SEQ ID NO: 186353 - DNA, 132 bp, Artificial Sequence
  derived and/or modified sequence
atggatgccaaaagtctcacagcatggtcacggacattggtgactttcaaggatgtgttcgtggacttcaccagagaagagtggaaattactggacaccgcccagcaaatcgtctataggaacgtcatgtag

SEQ ID NO: 186354 - DNA, 144 bp, Artificial Sequence
  derived and/or modified sequence
atggatgctaagagcctgacggcttggtctagaacattagttacctttaaggacgtattcgtagacttcaccagggaggagtggaagctgctagacactgctcagcagatagtgtatagaaacgtaatgctagaaaattattag

SEQ ID NO: 186355 - DNA, 1722 bp, Artificial Sequence
  derived and/or modified sequence
atggatgccaagagcctgacagcctggagcaggaccctggtgaccttcaaggatgtgtttgtggacttcacccgggaggagtggaagctgctggacacagcccagcagatcgtgtacagaaatgtgatgctggagaactacaagaacctggtgtccctgggctaccagctgaccaagccagatgtgatcctgcggctggagaagggggaggagccctggctggtggagcgggagatccaccaggagacccacccagattctgaaacagcctttgagatcaagagctctgtgagcagccgcagcatcttcaaggacaagcagagctgtgacatcaagatggagggcatggccagaaatgacctgtggtacctgagcctggaggaggtgtggaagtgccgggaccagctggacaagtaccaggagaaccctgagcggcacctgcggcaggtggccttcacccagaagaaggtgctgacccaggagcgggtgtctgagagcggcaagtatggaggcaactgcctgctgcctgcccagctggtgctgcgggagtacttccacaagagggacagccacaccaagagcctgaagcatgacctggtgctgaatggccaccaggacagctgtgccagcaacagcaatgaatgtggccagaccttctgccagaacatccacctgatccagtttgcccggacccacactggagacaagagctacaagtgcccagacaatgacaacagcctgacccacggcagcagcctgggcatcagcaagggcatccaccgggagaagccctatgagtgcaaggaatgtgggaagttcttctcctggaggagcaacctgaccaggcaccagctgatccacactggagagaagccctatgagtgcaaggaatgtgggaagagcttcagccgcagcagccacctgattggccaccagaagacccacactggagaggagccctatgagtgcaaggaatgtgggaagagcttctcctggttcagccacctggtgacccaccagaggacccacactggagacaagctgtacacctgcaaccagtgtgggaagagctttgtgcacagcagccgcctcatccgccaccagaggacccacactggagagaagccctatgagtgcccagaatgtgggaagagcttccggcagagcacccacctgatcctgcaccagaggacccacgtgcgggtgcggccctatgagtgcaatgaatgtgggaagagctacagccagaggagccacctggtggtgcaccaccgcatccacacaggcctgaagccctttgagtgcaaggactgtgggaagtgcttcagccgcagcagccacctgtacagccaccagaggacccacactggagagaagccctatgagtgccacgactgtgggaagagcttcagccagagcagcgccctgattgtgcaccagaggatccacactggagagaagccctatgagtgctgccagtgtgggaaggccttcatcaggaagaatgacctgatcaagcaccagagaattcatgtgggggaggagacctacaagtgcaaccagtgtggcatcatcttcagccagaacagccccttcatcgtgcaccagatcgcccacactggagagcagttcctgacctgcaaccagtgtggcacagccctggtgaacaccagcaacctgattggctaccagaccaaccacatccgggagaatgcctactag

SEQ ID NO: 186356 - DNA, 219 bp, Artificial Sequence
  derived and/or modified sequence
atggatgccaagagcctgacagcctggagcaggaccctggtgaccttcaaggatgtgtttgtggacttcacccgggaggagtggaagctgctggacacagcccagcagatcgtgtacagaaatgtgatgctggagaactacaagaacctggtgtccctgggctaccagctgaccaagccagatgtgatcctgcggctggagaagggggaggagccctag

SEQ ID NO: 186357 - DNA, 132 bp, Artificial Sequence
  derived and/or modified sequence
atggatgccaagagcctgacagcctggagcaggaccctggtgaccttcaaggatgtgtttgtggacttcacccgggaggagtggaagctgctggacacagcccagcagatcgtgtacagaaatgtgatgtag

SEQ ID NO: 186358 - DNA, 144 bp, Artificial Sequence
  derived and/or modified sequence
atggatgccaagagcctgacagcctggagcaggaccctggtgaccttcaaggatgtgtttgtggacttcacccgggaggagtggaagctgctggacacagcccagcagatcgtgtacagaaatgtgatgctggagaactactag

SEQ ID NO: 186359 - DNA, 1722 bp, Artificial Sequence
  derived and/or modified sequence
atggacgccaagagcctgaccgcctggagccggaccctggtgaccttcaaagacgtatttgtggattttaccagagaggagtggaagctacttgatactgcccagcagattgtataccgaaacgtgatgctggaaaattataaaaacttggtctctctcggataccagctgacaaaaccggatgtgattctgagacttgaaaaaggggaggagccttggcttgtcgagagagagatccaccaagaaacacaccccgacagcgaaacagccttcgagattaaatcatccgtttcctcccgttccatctttaaagacaagcagagttgtgatattaaaatggaaggaatggcacggaacgatctgtggtacctgtctttggaggaggtgtggaagtgccgggaccaattagataagtaccaggagaacccggaacggcacctccgccaggtagcattcactcagaagaaggtgttaacccaggagcgggtgtccgagtccggaaaatatggggggaattgcctgctgccagcccagcttgtgttgcgggagtacttccacaagagggactcccatacaaagtctcttaaacatgatctggttctgaacggacaccaagacagctgtgcttctaactctaatgagtgcggccagacgttctgccaaaatatccacctgatccagttcgcgcggacccacacaggggataagtcttacaagtgtccagataatgataacagccttactcatgggagcagcctggggataagtaaggggatacacagggagaaaccatacgagtgcaaagaatgcggcaaattcttctcctggagaagcaatttaacccggcatcagctcatccacacgggagagaaaccatacgaatgcaaagagtgcggaaagtcttttagccgctcgagtcacttgatcgggcatcaaaagacgcatacaggtgaagagccatatgaatgcaaagagtgtggcaagtcattcagctggttttcacaccttgtcactcaccagaggactcacacgggggataaactctacacatgtaaccagtgtggcaagtcctttgttcatagctccaggctcatcagacaccaaaggacacataccggagaaaagccgtacgagtgcccagaatgcgggaaatctttcagacaatctacacaccttattctccaccagcgcacccacgtgcgagtgcgaccatatgagtgtaacgaatgcggaaaatcctattcacagaggtcacacctggttgttcaccaccgcattcacacaggcctgaagccgtttgaatgcaaggactgcggcaaatgtttctcccggagtagtcatctttattcacaccagcggacacatacaggagagaagccctatgagtgtcacgactgtggcaaaagcttcagtcagtcctctgctcttatagttcaccaacgcattcacaccggagaaaaaccttacgaatgttgccaatgtgggaaagcttttatacgaaaaaacgacctcatcaagcatcagcgtatccatgtgggcgaggagacttataaatgtaatcagtgtggtattatctttagtcagaatagccccttcattgtgcatcagatcgctcataccggagagcagtttcttacatgcaaccagtgcgggacagctctcgtcaatacgtcaaatctgatcggatatcaaaccaaccacatcagggagaatgcatactag

SEQ ID NO: 186360 - DNA, 1722 bp, Artificial Sequence
  derived and/or modified sequence
atggacgccaagagcctgaccgcctggagccggaccctggtgacctttaaggatgtgtttgtggactttacaagggaggaatggaaacttctggatacagcccagcagattgtgtacagaaatgtaatgctggagaactacaaaaatctggttagcctgggatatcaacttacaaagcccgacgtgattttaagactggaaaagggggaggagccgtggctcgtggagcgagagattcaccaggagacccacccagactctgaaaccgccttcgaaatcaagtcctccgtgtctagtcggtctatcttcaaagataaacagagctgcgacatcaagatggaaggcatggcacggaacgatttgtggtacctgagccttgaagaggtatggaaatgcagagatcagctggacaaataccaggaaaaccctgaacgccacctgcgccaagttgccttcacacaaaaaaaggttctgacacaggagcgagtctctgaatccgggaagtatgggggcaactgcctccttccagcccagctggtgctgcgggagtactttcataagcgagattcccatactaagagcttgaagcacgacctcgtgcttaatggacatcaagacagctgtgcctccaatagtaacgagtgtggtcagacattctgtcaaaacattcacctgattcagttcgcacgaactcatacaggtgacaagtcttacaaatgccctgataacgataactccctaacccacgggtcgtccctgggcattagtaagggcatccaccgcgagaaaccatacgaatgtaaggaatgcggaaagttctttagttggcggagtaacctgacccgtcatcaattgatccacacgggagaaaaaccttacgaatgcaaggagtgtgggaagtcattctctcgcagctctcacttgattggccatcaaaagacgcatactggggaggagccttatgagtgcaaagagtgcggcaagtccttcagttggttctcacacctggttactcaccagcgcacccatacgggcgataaattgtatacctgtaatcagtgcggtaagtctttcgttcatagctctcgcctgatccgccaccagagaacacacaccggagagaaaccttacgagtgcccagaatgcggaaaatcctttcgtcagtcaacacacctgatcctgcaccaaaggacccacgtgcgggtacggccctacgagtgcaacgaatgtggaaaatcttactcacagagatcccacctcgtggtgcatcacaggatccatactggacttaagccctttgagtgtaaggactgcggaaagtgtttctcacgttcaagccacctgtacagccaccagcgaactcatactggtgagaagccttacgagtgccacgattgcggaaagtccttttctcaaagctcagctctgatcgtgcatcaaagaatccacactggagagaagccatacgagtgctgtcagtgtgggaaggccttcatacgaaaaaatgatttgattaagcaccaacggattcacgtcggtgaagagacgtacaagtgtaaccaatgcggtattatcttcagccagaactctccatttatcgtgcaccagattgctcacaccggtgaacagttcttaacatgtaaccaatgtggaacagcattggtgaacaccagcaatctgatcggttaccagaccaaccatatcagggaaaatgcctactag

SEQ ID NO: 186361 - DNA, 219 bp, Artificial Sequence
  derived and/or modified sequence
atggacgccaagagcctgaccgcctggagccggaccctggtgacctttaaagatgtgtttgttgatttcacacgcgaggagtggaagttactggacacagcccagcagatagtgtatagaaatgtgatgttggaaaactacaaaaacctcgtgtcgttgggctaccagttgacaaagcctgatgtgatcctgaggcttgagaagggcgaagaaccctag

SEQ ID NO: 186362 - DNA, 132 bp, Artificial Sequence
  derived and/or modified sequence
atggacgccaagagcctgaccgcctggagccggaccctggtgaccttcaaagacgtgttcgtagactttactagggaagagtggaagcttctggacacagcacagcaaattgtgtatcggaatgttatgtag

SEQ ID NO: 186363 - DNA, 144 bp, Artificial Sequence
  derived and/or modified sequence
atggacgccaagagcctgaccgcctggagccggaccctggtgaccttcaaggacgtgtttgtggatttcacccgggaggaatggaagctccttgatactgcacagcagattgtatatagaaacgttatgctcgagaattattag

SEQ ID NO: 186364 - DNA, 1722 bp, Artificial Sequence
  derived and/or modified sequence
atggacgccaagagccttaccgcttggtctagaacactggtcacatttaaagatgtgtttgttgacttcacccgcgaggaatggaaactacttgatactgcacagcagatcgtttacagaaacgtgatgttggaaaactacaagaaccttgtcagtcttggctaccagctgaccaagcccgacgtgatcctgaggcttgaaaagggagaagaaccatggttggtagagcgggagatacaccaggagacgcaccccgactcagaaacagcatttgaaatcaaatcctccgtgagttccagaagtattttcaaggataagcagtcttgcgacatcaagatggagggcatggccagaaatgacctgtggtatttaagcctggaggaagtatggaaatgccgagatcagctggacaaataccaggaaaacccagagcggcacctgcggcaggtcgcatttactcaaaaaaaggtcctcactcaagagcgggtcagcgaaagcgggaaatacggcggaaattgtctgctaccagcccaactagtcctgcgggaatactttcataagcgggatagccacaccaagagcctgaagcacgaccttgtcttaaacgggcaccaggactcatgcgcatcaaactccaacgaatgtggtcaaacattctgccaaaatattcatttgattcagtttgccagaacacacaccggagataaatcttacaagtgcccggacaatgataacagcctgacccacggaagcagtctggggataagcaaggggattcatcgggaaaagccctatgagtgcaaggagtgcggcaaattcttttcgtggcggagcaacttgacacgccaccagctcattcataccggtgaaaagccatatgagtgtaaagagtgtggcaaatcctttagccgctcatctcatcttataggacatcagaaaacccacactggagaggagccatatgaatgtaaagaatgcggcaaatccttctcctggttctctcacttggtgacccatcagagaactcacaccggagacaagttgtacacgtgcaaccagtgtggcaagagtttcgtgcactcctctagactgatcaggcaccagcgcacccatacaggcgaaaaaccttatgaatgtccagagtgcggcaagtcattccgacagagcacccacctgatcttgcatcagagaactcatgtgcgggtgcgaccctatgagtgcaatgaatgcgggaaaagctactctcagcgcagtcacctggtcgtgcatcaccggatacacacgggcctgaaaccattcgagtgcaaggattgtggaaagtgtttttcacggtccagccacctttattcccaccagcggacccacacaggagaaaaaccctacgagtgtcatgactgcggaaagagttttagccaatccagcgccctgatcgttcaccaacggattcatacaggggaaaagccctacgaatgttgccagtgcgggaaagcttttattcggaaaaacgatttgattaagcaccagcgcattcatgttggtgaggagacatataaatgcaatcaatgcggaatcattttctctcagaattcgccctttattgttcatcagattgcccacacgggcgaacaattcctgacttgtaaccagtgtggcacggccctggtgaatacaagtaatcttattgggtaccagactaatcacataagggaaaacgcctactag

SEQ ID NO: 186365 - DNA, 1722 bp, Artificial Sequence
  derived and/or modified sequence
atggacgctaaatccctaacagcttggagccgcacccttgtgacctttaaagatgtgtttgtcgattttacaagagaagagtggaaactccttgacactgctcaacagattgtgtaccgaaacgttatgttagaaaattataaaaacttggtgtcacttggctatcagctaaccaaacccgatgtaattttgcgccttgagaagggggaagaaccttggctggtagaacgcgaaatccatcaagaaacccatccagatagcgaaacagctttcgagattaagtcttcggtctcatctcgatcgatctttaaagataagcagtcctgtgacattaagatggagggaatggccagaaatgacctttggtatttatctctggaggaggtgtggaagtgtcgggaccaactggacaagtaccaggaaaatccagagcgacacttgagacaggttgctttcactcagaaaaaggtgcttacgcaggaaagggtatccgaatccggaaaatacggcggaaactgtctcttgcccgcacagctggtcctccgggaatattttcacaaaagggatagccacactaagtcactgaagcatgacttggttctcaacgggcatcaggactcctgtgcatctaactctaatgaatgcggccagacgttctgccagaacatccacctgattcaatttgctcgcactcacacaggagataaatcctataagtgtcccgataatgataactctctgacccatggatcatcgcttgggatctctaaaggcatacacagggaaaagccttacgagtgtaaagagtgcggtaaattcttcagctggcgtagtaacttgacacgccatcagttgatccacaccggcgaaaaaccctacgaatgcaaagagtgcggcaagagttttagtcggtctagccacctcattggtcatcagaaaacccacacaggagaggaaccatacgagtgcaaggaatgcggcaagagcttcagctggttttcgcacctagtgacccatcaaaggacgcatacgggggacaagctgtatacttgcaatcagtgtggaaaatctttcgttcacagctccagactcattagacaccagcggactcacaccggcgagaagccttacgaatgtcccgagtgtggcaaaagttttaggcagtcaactcacctcatcttacaccagagaacgcacgtgcgcgttaggccctacgaatgtaacgagtgcggcaaatcctattctcagcgatcacacttggtagtccatcaccgaattcatactggtctgaagccatttgagtgtaaagactgcggtaaatgtttctctagaagctcacacttgtattcccaccagaggacacataccggcgaaaagccttacgaatgtcacgactgcggtaagagcttttctcagtccagtgccttaattgtgcaccagcggatccacacgggcgaaaagccttacgagtgctgccaatgtggtaaggcattcattcgcaaaaatgaccttattaaacaccagcgcatccacgtgggggaagagacatataaatgcaatcaatgcgggattatcttcagccaaaatagccccttcatagtgcatcaaatcgcccacactggtgagcagtttctcacttgcaaccagtgcggcaccgccctggttaacacttccaacttgatcgggtatcagaccaaccacattagggaaaatgcatattag

SEQ ID NO: 186366 - DNA, 219 bp, Artificial Sequence
  derived and/or modified sequence
atggatgcaaaaagcttaactgcctggagcagaacgttggtcacattcaaggatgtgtttgtggacttcacaagggaagagtggaaactccttgacaccgcccagcagattgtctatcggaacgtgatgctggaaaattataagaatctggtctccctggggtatcagttgaccaagccagacgtaatccttcgactcgaaaaaggagaagagccgtag

SEQ ID NO: 186367 - DNA, 132 bp, Artificial Sequence
  derived and/or modified sequence
atggacgccaagagcctgaccgcttggagccgtaccctagtcacctttaaggacgtgtttgtggattttaccagggaagaatggaagctcctcgatacagcgcagcagattgtgtaccggaacgttatgtag

SEQ ID NO: 186368 - DNA, 144 bp, Artificial Sequence
  derived and/or modified sequence
atggacgccaaaagtctaacagcctggtcccgaacccttgtaacattcaaggacgtgttcgtcgacttcacccgggaggagtggaaactcctcgacactgcacagcagatcgtttatagaaatgtgatgctagagaactactag

SEQ ID NO: 186369 - DNA, 4441 bp, Artificial Sequence
  derived and/or modified sequence
acggggaggtggcgccgccgtgccgagccggcctcagactcacctctgacgccgctcttcgcgctccgctggtgaatggagtcgcgttctctgttttgctgttgctgctgcctttgtgacgggatcgctttctcccatcgaaccttctagttgcttattgcagctttgtctcctcagcactctgctgtcactcaaggaagtatcatcaagaacaaggagggcatggatgctaagtcactaactgcctggtcccggacactggtgaccttcaaggatgtatttgtggacttcaccagggaggagtggaagctgctggacactgctcagcagatcgtgtacagaaatgtgatgctggagaactataagaacctggtttccttgggttatcagcttactaagccagatgtgatcctccggttggagaagggagaagagccctggctggtggagagagaaattcaccaagagacccatcctgattcagagactgcatttgaaatcaaatcatcagtttccagcaggagcatttttaaagataagcaatcctgtgacattaaaatggaaggaatggcaaggaatgatctctggtatttgtcattagaagaagtctggaaatgtagagaccagttagacaagtatcaggaaaacccagagagacatttgaggcaagtggcattcacccaaaagaaagtacttactcaggagagagtctctgaaagtggtaaatatgggggaaactgtcttcttcctgctcagctagtactgagagagtatttccataaacgtgactcacatactaaaagtttaaaacatgatttagttcttaatggtcatcaggacagttgtgcaagtaacagtaatgaatgtggtcaaactttctgtcaaaacattcaccttattcagtttgcaagaactcacacaggtgataaatcctacaaatgccctgataatgacaactctcttactcatggttcatctcttggtatatcaaagggcatacatagagagaaaccctatgaatgtaaggaatgtggaaaattcttcagctggcgctctaatcttactaggcatcagcttattcatactggagaaaaaccctatgagtgtaaagaatgtggaaagtctttcagccggagttctcacctcattggacatcaaaagacccatactggtgaggaaccctatgaatgtaaagaatgtggaaaatccttcagctggttctctcaccttgttactcatcagagaactcatacaggagacaaactgtacacatgtaatcagtgtgggaaatcttttgttcatagctctaggcttattagacaccagaggacacatactggagagaaaccctatgaatgtcctgaatgtgggaaatctttcagacagagcacacatctcattctgcatcagagaacccatgtgagagtgaggccctatgaatgcaatgaatgtggaaagtcttacagccagagatctcaccttgttgtgcatcatagaattcacactggactaaaaccttttgagtgtaaggattgtggaaaatgttttagtcgaagctctcacctttattcacatcaaagaacccacactggagagaaaccatatgagtgtcatgattgtggaaaatctttcagccagagttctgcccttattgtgcatcagaggatacacactggagagaaaccatatgaatgctgtcagtgtgggaaagccttcatccggaagaatgacctcattaagcaccagagaattcatgttggagaagagacctataaatgtaatcaatgtggcattatcttcagccagaactctccatttatagttcatcaaatagctcacactggagagcagttcttaacatgcaatcaatgtgggacagcgcttgttaatacctctaaccttattggataccagacaaatcatattagagaaaatgcttactaataaatatgggaatttttcacaaagagcaatgactttattttgcattggagaactcctggagataagctgtacaaattgaatctatgtggaaatgctttcagtcttgttactatcctattgcacattagagaattggtcctggaagggaaagaaaccacagattttatttcagtacacaaatccatcagattttcttcttttcatgaattcctacagaagtaattggcctgagagcattcttgaccaagtcttaaatgctagaatctgagaaggaattattaaataggtgagttgttgagcgagaaccccttcatttgaaaagaaatgagtatgctactatagggagagttgttgctgagaattaagaaatgatacagttaatgcaacaaaagatggaaaataatatttcagtcaatatgtcattgttttcttgactatgtctctcttctgggacatttagtagtgtttggtatgttttatgtgtctggtagaaaccatattttggttaacagcaagaaaaatgcttataatgtagtacaattaaaaacaacacatctccactaccagtgctaacccatttttaagtacatttgcatgtgggcaagaattgaaagtatacagataattgaacagaattgatttgttagataaggagattttgactgagttttatagtctgtttaatgttgctgtaataattattttaagaaacttttaaatattgtaagaggatatctagtttctctattctaccatcaaagaagcttttgagtaccacctgttaatgagctttcctattctaaattgttttgggtcacagagttccactttttccactcttattagcactgcaaaagctcctgagaatttaaaaacacagtaattctctggatgttaggacctaggggaacattgggcatttgaacatatcagggagggtccccattttagtgggaacaagtatttaaacaatatttagagcaagtgtcctcatgtgataaacagagcacagtccaaagataccctctttctcaaggtagtcttttatctttataaagaaagattagtgtttaagagcgtagacttgagctagactacccaggttgaaaccccactagctgggtgatcttgaacatgctgcttagcttctctgtgccaaacttactgatatcctcatctgtaaattagcgataataatagtacttacctggtaggattatggtgagtattaaatgagtaaatggaaacagcttagaatagtgcctgacatatattatgttctctgtagttactggctgtgattattaataatattgccgcaccctaatatctgttatttaattgaaatctgcttgtgtgcttataagaatttactgagttctcacttcccttacagtcatacatggtttttcccttttgcctaaatcagaactcaacagcctgggaaaatcactgacaaatagtggatataggtttcatttctgaggatcaataaacagcttgtaatgttgtatacacatttattctgtttgtacaaaggttttccattctatggagaggatcccagtcttcagattctctggtaagttaataacccacaaaagattcaggaagaggatctattttaattttctctttcattctataaatcagtctgttgtatatagggactgaccatgattctccattttctggcataaatattagctgctcaatgattgattgttgaatgatagatgaagtattgctgaagccaaccagagatcttgatctctctctgaggaaaaaacctagaaatgatggttagaatcaggagacttgagaactacgaggaacatggcagcctctagctcatacttgtcgttgtacaattgagatcaagtgaattggccccggtctcacattttcagtgaagtcagactcagaactaggtcctgggtttcatgtttcctgctgctcttctcactgtgtacacaccatgcccacatacaacatacctatcagaaatggttttcattaagggagtagaatagtcacttaactggggctcttaacattgctaataacctgtggctcaatttcctcaactgtataatgaggttactactagtatctacctcaaagcgttgtcatgtggattgagatgatatgtatgaatcacataaaagagtgcctggcacatagtaggtgccattaataatattactattgttaacaccttaagggtctaacttgtaatgaagacagaaatatgtatgaggatgatcactgaaatatttatgacagtgcataatttgcaaaataaaaaatgtacactagcataatatttgtggcatatccgtgtaatggaagattatgcaggcattaaaatatgtacacaaaaagtttggtaaaggaaaaatgctgtcatgtgttacaaaagcatgataaataattgttaatatggaataagctcaaatatgtcaaaataaatgtaaaaaatgagtgttgcccaaaa

SEQ ID NO: 186370 - DNA, 2169 bp, Artificial Sequence
  derived and/or modified sequence
agactcacctctgacgccgctcttcgcgctccgctggtgaatggagtcgcgttctctgttttgctgttgctgctgcctttgtgacgggatcgctttctcccatcgaaccttctagttgcttattgcaggtatatacgaaagtgctgaattttgtgtttgcatcgtcatcaggcgcgtgttgagccctttagtaatgtagcagtgtattagcttcgtatttctaggtagacggtaatttcgtcaatgaaaaaatttaacggtgatcgtcaccccttgcctcagtcactttctgtccctcgcgcggccccggcgttcacggcggacgttcttgttctgtggagaataacggctgcacctggagattgacgcagagtgggcggcggtggtgctttgtctcctcagcactctgctgtcactcaaggaagtatcatcaagaacaaggagggcatggatgctaagtcactaactgcctggtcccggacactggtgaccttcaaggatgtatttgtggacttcaccagggaggagtggaagctgctggacactgctcagcagatcgtgtacagaaatgtgatgctggagaactataagaacctggtttccttgggttatcagcttactaagccagatgtgatcctccggttggagaagggagaagagccctggctggtggagagagaaattcaccaagagacccatcctgattcagagactgcatttgaaatcaaatcatcagtttccagcaggagcatttttaaagataagcaatcctgtgacattaaaatggaaggaatggcaaggaatgatctctggtatttgtcattagaagaagtctggaaatgtagagaccagttagacaagtatcaggaaaacccagagagacatttgaggcaagtggcattcacccaaaagaaagtacttactcaggagagagtctctgaaagtggtaaatatgggggaaactgtcttcttcctgctcagctagtactgagagagtatttccataaacgtgactcacatactaaaagtttaaaacatgatttagttcttaatggtcatcaggacagttgtgcaagtaacagtaatgaatgtggtcaaactttctgtcaaaacattcaccttattcagtttgcaagaactcacacaggtgataaatcctacaaatgccctgataatgacaactctcttactcatggttcatctcttggtatatcaaagggcatacatagagagaaaccctatgaatgtaaggaatgtggaaaattcttcagctggcgctctaatcttactaggcatcagcttattcatactggagaaaaaccctatgagtgtaaagaatgtggaaagtctttcagccggagttctcacctcattggacatcaaaagacccatactggtgaggaaccctatgaatgtaaagaatgtggaaaatccttcagctggttctctcaccttgttactcatcagagaactcatacaggagacaaactgtacacatgtaatcagtgtgggaaatcttttgttcatagctctaggcttattagacaccagaggacacatactggagagaaaccctatgaatgtcctgaatgtgggaaatctttcagacagagcacacatctcattctgcatcagagaacccatgtgagagtgaggccctatgaatgcaatgaatgtggaaagtcttacagccagagatctcaccttgttgtgcatcatagaattcacactggactaaaaccttttgagtgtaaggattgtggaaaatgttttagtcgaagctctcacctttattcacatcaaagaacccacactggagagaaaccatatgagtgtcatgattgtggaaaatctttcagccagagttctgcccttattgtgcatcagaggatacacactggagagaaaccatatgaatgctgtcagtgtgggaaagccttcatccggaagaatgacctcattaagcaccagagaattcatgttggagaagagacctataaatgtaatcaatgtggcattatcttcagccagaactctccatttatagttcatcaaatagctcacactggagagcagttcttaacatgcaatcaatgtgggacagcgcttgttaatacctctaaccttattggataccagacaaatcatattagagaaaatgcttactaa

SEQ ID NO: 186371 - DNA, 472 bp, Artificial Sequence
  derived and/or modified sequence
gtgccgagccggcctcagactcacctctgacgccgctcttcgcgctccgctggtgaatggagtcgcgttctctgttttgctgttgctgctgcctttgtgacgggatcgctttctcccatcgaaccttctagttgcttattgcagtggctgtgggagcaaagagtaagaaacactaaaacttcctggagaaattagctttgtctcctcagcactctgctgtcactcaaggaagtatcatcaagaacaaggagggcatggatgctaagtcactaactgcctggtcccggacactggtgaccttcaaggatgtatttgtggacttcaccagggaggagtggaagctgctggacactgctcagcagatcgtgtacagaaatgtgatgctggagaactataagaacctggtttccttgggttatcagcttactaagccagatgtgatcctccggttggagaagggagaagagccctg

SEQ ID NO: 186372 - DNA, 546 bp, Artificial Sequence
  derived and/or modified sequence
gtgcgtgacgtcaggccacggggaggtggcgccgccgtgccgagccggcctcagactcacctctgacgccgctcttcgcgctccgctggtgaatggagtcgcgttctctgttttgctgttgctgctgcctttgtgacgggatcgctttctcccatcgaaccttctagttgcttattgcagcttcgtatttctaggtagacggtaatttcgtcaatgaaaaaatttaacggtgatcgtcaccccttgcctcagtcactttctgtccctcgcgcggccccggcgttcacggcggacgttcttgttctgtggagaataacggctgcacctggagattgacgcagagtgggcggcggtggtgctttgtctcctcagcactctgctgtcactcaaggaagtatcatcaagaacaaggagggcatggatgctaagtcactaactgcctggtcccggacactggtgaccttcaaggatgtatttgtggacttcaccagggaggagtggaagctgctggacactgctcagcagatcgtgtacagaaatgtgatg

SEQ ID NO: 186373 - DNA, 648 bp, Artificial Sequence
  derived and/or modified sequence
ggccacggggaggtggcgccgccgtgccgagccggcctcagactcacctctgacgccgctcttcgcgctccgctggtgaatggagtcgcgttctctgttttgctgttgctgctgcctttgtgacgggatcgctttctcccatcgaaccttctagttgcttattgcagcttcgtatttctaggtagacggtaatttcgtcaatgaaaaaatttaacggtgatcgtcaccccttgcctcagtcactttctgtccctcgcgcggccccggcgttcacggcggacgttcttgttctgtggagaataacggctgcacctggagattgacgcagagtgggcggcggtggtggaaacattaaagaatgtgcttcagagagaaaggaaatgaaaccaaatggaaatctggatctacacaaacgagtaaacagcactggcgaatggtaactacctagctttgtctcctcagcactctgctgtcactcaaggaagtatcatcaagaacaaggagggcatggatgctaagtcactaactgcctggtcccggacactggtgaccttcaaggatgtatttgtggacttcaccagggaggagtggaagctgctggacactgctcagcagatcgtgtacagaaatgtgatgctggagaactat

SEQ ID NO: 186374 - DNA, 4684 bp, Artificial Sequence
  derived and/or modified sequence
tcaagcttttggaccctcgtacagaagctaatacgactcactatagggaaataagagagaaaagaagagtaagaagaaatataagagccaccatggacaagaaatactcaatcggacttgctatcggaactaacagcgtgggatgggccgtcattactgacgaatacaaggtgccctcaaagaagttcaaggtcctgggaaataccgatagacactccatcaaaaagaacctgatcggggcactgttgttcgactcgggagagactgcagaagcaaccaggctcaagcgcactgcgaggcgccggtacacccggaggaagaaccgcatctgctacctccaagagattttcagcaacgagatggcaaaggtcgatgattcgttctttcaccgccttgaggagtcgttccttgtcgaggaggacaaaaagcatgaaagacatccgatcttcggaaacatcgtggacgaagtcgcataccatgaaaagtaccctaccatctaccatctcagaaagaaactcgtcgattcaactgataaggccgacttgcggctgatctacctggctctggcgcacatgatcaagtttcggggtcactttctcatcgagggtgatctcaacccggacaattccgacgttgacaaactcttcatccaactggtccagacgtacaaccagctgttcgaagaaaatccgatcaacgcaagcggagtggacgccaaagccattctgtcggcccgcctctcgaagtcgcgtcgcctggaaaatctgattgctcagctcccgggcgaaaagaagaatggcctgtttggaaacctcatcgcactgtccctcgggctgactcccaacttcaaatcgaactttgacttggctgaggatgcaaagctgcaactctccaaagacacttacgatgatgacctggacaatctcctggcgcagatcggggatcagtatgctgacctgttcctggcggccaagaacctgtctgatgccatcctgctctccgatatcctgagagtgaacactgagatcaccaaggcgcctctgagcgcctcgatgatcaaacgctacgatgaacaccatcaggacctcactcttctgaaggctttggtgcggcagcagcttccggaaaagtacaaagagatcttcttcgaccagtcgaaaaacggctacgccggatacattgatggcggcgcaagccaggaggaattctataagtttatcaaaccgatcctggagaagatggacggcactgaagaacttctggtcaagctgaatcgagaggatctgctccggaagcagcggaccttcgacaatgggtctatccctcaccaaatccatctcggcgagctgcatgcgattctgaggcgccaggaggacttctacccattcctgaaagacaatcgggagaaaatcgaaaagattctgacgttccgcattccatactacgtcgggccacttgcgcggggtaattcgagattcgcctggatgacgcggaagtccgaagaaaccatcacgccgtggaatttcgaagaagtggtcgacaagggagccagcgcacagtccttcattgagcgcatgaccaatttcgacaaaaatctgccgaacgagaaggtcctgccgaagcattcactgctgtacgaatactttaccgtgtacaacgaactgaccaaggtgaagtacgtcaccgagggaatgagaaagcctgctttcctgagcggagaacagaagaaggccattgttgacctcctcttcaagactaatcgcaaagtgaccgtgaagcagcttaaagaggattacttcaaaaagatcgaatgtttcgactccgtggaaatcagcggcgtggaggatagattcaacgcgtcccttgggacttaccacgacctccttaagatcatcaaggataaggatttcctcgacaatgaggaaaacgaagatatcctggaggacatcgttctgactctgaccctctttgaggaccgggagatgatcgaggagagactcaagacctacgcgcacctgtttgacgacaaagtgatgaagcaacttaaacgcaggcgctacaccggctggggcagactgtcacgcaagttgatcaacggaattagagataaacagtccggaaagaccatcctggacttcctgaagtccgatggattcgccaaccggaatttcatgcagctcatccatgacgactcattgactttcaaggaggatatccaaaaggcccaagtgagcggccaaggggactcccttcacgaacacatcgcaaatttggccggatcaccagcgattaagaagggaatcctgcagaccgtgaaggtggtggacgagctggtgaaagtgatgggacggcacaagccggaaaacatcgtgatcgagatggccagagagaaccagacgactcaaaagggccagaagaactcgcgcgaacgcatgaagagaatagaagagggaattaaggaactgggatcgcagatcttgaaggagcaccctgtcgaaaatactcaactccagaacgagaagctgtacctgtactatcttcaaaacggcagggacatgtatgtcgaccaagagctcgacattaaccgcctgtccgattatgacgtggacgccatcgtgccgcagagctttctcaaggacgattccatcgacaacaaagtgctcacccgcagcgacaagaatagagggaagtcggataacgtcccttcggaagaggtggtgaaaaagatgaagaattactggcggcagctcctgaatgcaaagctcatcacccaacggaagtttgacaacctcaccaaggcagaaagaggaggactgtcggaattggataaggccggtttcatcaagcgacaattggtggaaactcggcaaattaccaagcatgtggcacagattctggactcccgtatgaacaccaagtacgacgagaacgataagctgatccgcgaggtcaaggtgatcaccctcaaaagcaaacttgtgtcagacttccggaaggacttccaattctacaaggtccgcgaaatcaacaactaccaccacgctcatgacgcatacctgaacgctgtggtcgggactgccctcatcaagaagtaccctaaactcgaaagcgaatttgtgtacggcgactacaaagtgtacgatgtccggaagatgatcgcgaaatccgagcaggagatcggaaaggcgactgctaagtactttttctactcgaacatcatgaacttcttcaaaaccgaaatcaccctggctaatggcgagatcagaaagcgcccgctgatcgaaaccaacggcgaaaccggtgaaatcgtgtgggacaagggccgcgatttcgctactgtgagaaaggtcctttccatgccgcaagtgaatatcgtcaaaaagactgaggtgcagactggcggattttccaaggaatcgatcctcccaaagaggaactcagataagctcatcgcgcggaaaaaggattgggaccctaagaagtacggaggatttgatagcccaactgtggcctactctgtgctcgtggtggccaaagtcgagaaaggaaagtcgaagaagttgaaatccgtgaaagaactcttgggaatcactatcatggagcggtcgtcatttgaaaagaacccaatcgacttcctggaagccaagggatacaaagaagtcaagaaagacctgatcatcaagctccctaagtacagcctgttcgaactggagaacggaaggaaacggatgctggcttccgccggcgaactgcaaaagggcaatgagctggccctcccatcgaaatacgtgaacttcctctaccttgcctcccattacgaaaagttgaagggctcacccgaggacaatgagcagaaacagctctttgttgaacaacacaaacactacctggacgaaatcatcgaacaaatcagcgagttcagcaagcgcgtcattctggcggacgcgaacctggataaagtgctgtccgcgtacaacaagcaccgcgataagccgatacgggaacaggctgagaacatcattcacctcttcactctcactaatctgggagcccccgccgccttcaagtactttgatactaccatcgaccgcaagagatacacgagcaccaaggaagtgctcgatgccaccctgatccaccagtccattactggtctgtacgaaacgcgaatcgatctgtcacagctcggaggagatgcgtacccctacgatgtccccgactacgcgtcactcggtagcggcagcccgaagaagaaaagaaaggtggaggacccgaagaaaaagaggaaggttgacgggatcggaagcggatcgaatggatcgtcagggggaggtggcggaggtatggacgcaaaatcacttacggcctggtcacggaccttggtgacctttaaagacgtgttcgtggatttcaccagggaagaatggaaactgttggacaccgcccagcagatcgtgtaccggaatgtgatgctggagaactacaaaaacttggtgtccctggggtatcaactcactaagccagatgtcattcttagactggaaaagggagaagaaccgtgataataggctggagcctcggtggccatgcttcttgccccttgggcctccccccagcccctcctccccttcctgcacccgtacccccgtggtctttgaataaagtctgagtgggcggctctaga

SEQ ID NO: 186375 - DNA, 4706 bp, Artificial Sequence
  derived and/or modified sequence
tcaagcttttggaccctcgtacagaagctaatacgactcactatagggaaataagagagaaaagaagagtaagaagaaatataagagccaccatggacaagaagtactcaatcggactcgcaatcggaaccaattcagtcggctgggcagtcattaccgatgaatacaaggtgccgtcgaagaagttcaaagtcctgggtaacactgacagacattcgatcaaaaagaacctgatcggagccttgctgtttgattcaggcgaaaccgccgaagctacccggttgaaacgaactgctagacgccgctacacgcgccgcaagaaccggatctgctacctccaagaaatcttctcgaacgaaatggctaaggtggacgactcgttctttcaccggctcgaggagtcattccttgtggaggaagataagaagcacgaaagacacccgatcttcggcaacatcgtggacgaagtcgcgtaccacgaaaagtacccgactatctaccatctccggaagaagctcgtggatagcaccgataaggccgatctgcgactgatctacctcgcgctggcccatatgattaagttccgcgggcacttcctcatcgaaggggacctgaatccagacaactcggacgtggataagctgtttatccagctggtgcagacttacaatcaattgtttgaagaaaaccctatcaacgcgtctggggtggacgcaaaggccatcctgagcgcgcggctgtcaaaatccagacggctggaaaatctgatagcccaactgccgggcgagaagaaaaacggcctgtttggaaatcttatcgccctgtccctgggactgacccccaacttcaagtcgaacttcgacttggccgaggatgcgaagctccagctcagcaaagacacctacgacgatgacctcgataacctgttggcccagatcggtgaccagtatgctgatctcttcttggcggccaagaacctgtcagacgcaattctgctctccgacatcctgcgggtgaatactgagatcactaaagccccattgagcgcgtcgatgatcaaaagatacgacgagcaccaccaggatctgactctcctcaaggcactggtccgccaacagctcccggaaaagtacaaagagatcttctttgaccaatccaaaaacggatacgctggttacatagacggcggagcgtcacaagaagagttctacaagttcatcaagcctatcctggaaaagatggacgggaccgaggaactcctggttaagctcaatagggaggatctgctgcgcaagcaacgcacgttcgacaatggaagcatcccccatcagatccacctgggggagctccacgcgatcctgaggcgccaggaagatttctacccatttctgaaggacaatagagagaaaatcgaaaagatcctgactttccgaatcccgtactacgtgggcccgctcgcacggggaaactcacggtttgcctggatgactcgcaaatccgaagaaaccattaccccctggaatttcgaggaggtggtcgataaaggcgcctcagcccagtcgttcatcgaaagaatgaccaactttgacaagaacctcccaaatgagaaggtgctgccaaaacatagcctgctgtacgagtactttactgtgtataacgaactcaccaaggtgaaatacgtgaccgagggaatgcgcaagccggcatttctgtcgggcgaacagaagaaggcaattgtggacttgctgttcaaaaccaaccggaaggtgaccgtgaaacagctcaaggaagattactttaagaagatcgagtgtttcgatagcgtcgaaatttcgggggtggaagatcgcttcaatgcaagccttgggacgtaccacgatctgcttaagatcattaaggacaaggatttccttgacaacgaagagaacgaggatattctcgaggatatcgtcctgaccctgactctgtttgaggatagagaaatgatcgaggagagattgaaaacttacgcacacctcttcgacgataaggtgatgaaacagctgaaaaggcgtagatacactggttggggaaggctgtcgagaaagctgatcaacggaattagggacaagcagtccggaaaaaccatcctggatttcctcaagtccgacggtttcgccaaccgcaacttcatgcagctgatccacgatgattccctgacgttcaaagaggatatccagaaggcacaagtgtccggacaaggagactcactccacgagcatatcgctaatctcgccggatcgccagctatcaagaagggaatcttgcagactgtcaaggtggtggacgaactggtgaaagtgatgggaaggcataagccggagaatatcgtgatcgagatggcgagggaaaaccagacgacccagaaaggacagaaaaacagccgggaacgcatgaagcgcatcgaagagggaatcaaagagcttgggagccaaatcctcaaagaacaccctgtggaaaatacccaactgcagaatgagaagctttacctgtattacctccaaaacgggcgcgacatgtacgttgaccaggaattggacattaaccggctttccgactacgatgtggacgctatcgtcccgcagtccttcctgaaagacgattcgatcgacaataaggtcctgactagatcagacaagaatcggggaaagtcagacaacgtgcctagcgaagaggtcgttaagaagatgaagaattactggcgccagctgctgaacgcgaagcttatcactcagcgcaagttcgacaacctcaccaaggcagaaagaggcggattgtcggagctcgacaaagctggcttcatcaagcgccagctcgtcgaaactcgccagattactaagcatgtggcgcagatcctggacagccgcatgaatactaagtatgatgagaatgacaagctcatccgggaggtgaaggtcatcaccctgaagtccaagctggtgtccgacttccggaaggacttccaattctacaaagtcagagaaatcaacaattaccatcacgcgcatgacgcctacttgaatgcagtggtgggtactgccctcatcaagaaatacccaaagcttgaaagcgagtttgtctacggagactacaaggtgtacgacgtccggaagatgatcgccaaatcggaacaggaaattgggaaggcgaccgctaagtacttcttctactcgaatatcatgaatttcttcaagaccgagatcacgcttgcaaatggcgaaatccggaagcggcccctcatcgaaaccaacggagaaaccggagaaatcgtgtgggacaagggtcgcgattttgcgaccgtccgaaaggttcttagcatgcctcaagtgaacatcgtcaagaaaacggaagtgcagactggaggcttcagcaaggagtccattctcccgaaacgcaactccgacaaactgatcgcacgcaagaaagactgggacccgaagaaatacggaggcttcgattcgccgactgtggcttactcggtcctggttgtggccaaggtggaaaagggaaagtccaagaagctgaagtccgtcaaggagctcctcggaatcaccatcatggaacggtcaagcttcgagaaaaacccaattgacttcctggaggcaaaggggtacaaggaggtgaagaaggatctgatcatcaaactgccgaagtacagcctctttgagctcgaaaacggacgcaaaaggatgctggcctccgccggagagctgcaaaagggaaacgagcttgccttgccttccaagtacgtgaacttcctgtacctggcatcccactacgaaaaactgaagggatcgccggaggacaacgaacagaagcagctgtttgtggaacaacacaagcattatctggatgaaatcatcgaacaaatcagcgaattctcaaaaagggtgatcttggccgacgccaacctggataaagtgctttccgcctacaacaaacatcgcgacaagccgatccgggagcaggccgaaaacatcattcacctgtttaccctgactaatctgggtgcgcccgcggctttcaaatacttcgataccacgatcgaccggaagagatacaccagcaccaaagaggtgttggacgcgaccctcatccaccaatctattaccggcctctatgaaactaggatcgacctcagccagctgggaggcgatgcctacccttacgatgtcccggactacgcctcgctgggatccggatctccgaagaagaagcggaaggtcgaggacccaaagaaaaagcgcaaagtggatgggatcggtagcggttccaacggttcctcgggtggcggcggaggcggcatggatgctaagtcacttaccgcctggtcgcggacgctggtgactttcaaagatgtgttcgtggatttcactcgtgaggaatggaaattgctggacactgcccaacagatcgtctaccgcaacgtcatgcttgaaaactacaaaaacctcgtgtcgctgggatatcagctgaccaagcccgacgtgattctgagactggagaagggcgaagaaccttgataataggctggagcctcggtggccatgcttcttgccccttgggcctccccccagcccctcctccccttcctgcacccgtaccccccaaacaccattgtcacactccagtggtctttgaataaagtctgagtgggcggctctaga

SEQ ID NO: 186376 - DNA, 4777 bp, Artificial Sequence
  derived and/or modified sequence
gggaaattaagagagaaaagaagagttaagaagaaattattaagagccaccatggacaagaaatactcaatcggacttgctatcggaactaacagcgtgggatgggccgtcattactgacgaatacaaggtgccctcaaagaagttcaaggtcctgggaaataccgatagacactccatcaaaaagaacctgatcggggcactgttgttcgactcgggagagactgcagaagcaaccaggctcaagcgcactgcgaggcgccggtacacccggaggaagaaccgcatctgctacctccaagagattttcagcaacgagatggcaaaggtcgatgattcgttctttcaccgccttgaggagtcgttccttgtcgaggaggacaaaaagcatgaaagacatccgatcttcggaaacatcgtggacgaagtcgcataccatgaaaagtaccctaccatctaccatctcagaaagaaactcgtcgattcaactgataaggccgacttgcggctgatctacctggctctggcgcacatgatcaagtttcggggtcactttctcatcgagggtgatctcaacccggacaattccgacgttgacaaactcttcatccaactggtccagacgtacaaccagctgttcgaagaaaatccgatcaacgcaagcggagtggacgccaaagccattctgtcggcccgcctctcgaagtcgcgtcgcctggaaaatctgattgctcagctcccgggcgaaaagaagaatggcctgtttggaaacctcatcgcactgtccctcgggctgactcccaacttcaaatcgaactttgacttggctgaggatgcaaagctgcaactctccaaagacacttacgatgatgacctggacaatctcctggcgcagatcggggatcagtatgctgacctgttcctggcggccaagaacctgtctgatgccatcctgctctccgatatcctgagagtgaacactgagatcaccaaggcgcctctgagcgcctcgatgatcaaacgctacgatgaacaccatcaggacctcactcttctgaaggctttggtgcggcagcagcttccggaaaagtacaaagagatcttcttcgaccagtcgaaaaacggctacgccggatacattgatggcggcgcaagccaggaggaattctataagtttatcaaaccgatcctggagaagatggacggcactgaagaacttctggtcaagctgaatcgagaggatctgctccggaagcagcggaccttcgacaatgggtctatccctcaccaaatccatctcggcgagctgcatgcgattctgaggcgccaggaggacttctacccattcctgaaagacaatcgggagaaaatcgaaaagattctgacgttccgcattccatactacgtcgggccacttgcgcggggtaattcgagattcgcctggatgacgcggaagtccgaagaaaccatcacgccgtggaatttcgaagaagtggtcgacaagggagccagcgcacagtccttcattgagcgcatgaccaatttcgacaaaaatctgccgaacgagaaggtcctgccgaagcattcactgctgtacgaatactttaccgtgtacaacgaactgaccaaggtgaagtacgtcaccgagggaatgagaaagcctgctttcctgagcggagaacagaagaaggccattgttgacctcctcttcaagactaatcgcaaagtgaccgtgaagcagcttaaagaggattacttcaaaaagatcgaatgtttcgactccgtggaaatcagcggcgtggaggatagattcaacgcgtcccttgggacttaccacgacctccttaagatcatcaaggataaggatttcctcgacaatgaggaaaacgaagatatcctggaggacatcgttctgactctgaccctctttgaggaccgggagatgatcgaggagagactcaagacctacgcgcacctgtttgacgacaaagtgatgaagcaacttaaacgcaggcgctacaccggctggggcagactgtcacgcaagttgatcaacggaattagagataaacagtccggaaagaccatcctggacttcctgaagtccgatggattcgccaaccggaatttcatgcagctcatccatgacgactcattgactttcaaggaggatatccaaaaggcccaagtgagcggccaaggggactcccttcacgaacacatcgcaaatttggccggatcaccagcgattaagaagggaatcctgcagaccgtgaaggtggtggacgagctggtgaaagtgatgggacggcacaagccggaaaacatcgtgatcgagatggccagagagaaccagacgactcaaaagggccagaagaactcgcgcgaacgcatgaagagaatagaagagggaattaaggaactgggatcgcagatcttgaaggagcaccctgtcgaaaatactcaactccagaacgagaagctgtacctgtactatcttcaaaacggcagggacatgtatgtcgaccaagagctcgacattaaccgcctgtccgattatgacgtggacgccatcgtgccgcagagctttctcaaggacgattccatcgacaacaaagtgctcacccgcagcgacaagaatagagggaagtcggataacgtcccttcggaagaggtggtgaaaaagatgaagaattactggcggcagctcctgaatgcaaagctcatcacccaacggaagtttgacaacctcaccaaggcagaaagaggaggactgtcggaattggataaggccggtttcatcaagcgacaattggtggaaactcggcaaattaccaagcatgtggcacagattctggactcccgtatgaacaccaagtacgacgagaacgataagctgatccgcgaggtcaaggtgatcaccctcaaaagcaaacttgtgtcagacttccggaaggacttccaattctacaaggtccgcgaaatcaacaactaccaccacgctcatgacgcatacctgaacgctgtggtcgggactgccctcatcaagaagtaccctaaactcgaaagcgaatttgtgtacggcgactacaaagtgtacgatgtccggaagatgatcgcgaaatccgagcaggagatcggaaaggcgactgctaagtactttttctactcgaacatcatgaacttcttcaaaaccgaaatcaccctggctaatggcgagatcagaaagcgcccgctgatcgaaaccaacggcgaaaccggtgaaatcgtgtgggacaagggccgcgatttcgctactgtgagaaaggtcctttccatgccgcaagtgaatatcgtcaaaaagactgaggtgcagactggcggattttccaaggaatcgatcctcccaaagaggaactcagataagctcatcgcgcggaaaaaggattgggaccctaagaagtacggaggatttgatagcccaactgtggcctactctgtgctcgtggtggccaaagtcgagaaaggaaagtcgaagaagttgaaatccgtgaaagaactcttgggaatcactatcatggagcggtcgtcatttgaaaagaacccaatcgacttcctggaagccaagggatacaaagaagtcaagaaagacctgatcatcaagctccctaagtacagcctgttcgaactggagaacggaaggaaacggatgctggcttccgccggcgaactgcaaaagggcaatgagctggccctcccatcgaaatacgtgaacttcctctaccttgcctcccattacgaaaagttgaagggctcacccgaggacaatgagcagaaacagctctttgttgaacaacacaaacactacctggacgaaatcatcgaacaaatcagcgagttcagcaagcgcgtcattctggcggacgcgaacctggataaagtgctgtccgcgtacaacaagcaccgcgataagccgatacgggaacaggctgagaacatcattcacctcttcactctcactaatctgggagcccccgccgccttcaagtactttgatactaccatcgaccgcaagagatacacgagcaccaaggaagtgctcgatgccaccctgatccaccagtccattactggtctgtacgaaacgcgaatcgatctgtcacagctcggaggagatgcgtacccctacgatgtccccgactacgcgtcactcggtagcggcagcccgaagaagaaaagaaaggtggaggacccgaagaaaaagaggaaggttgacgggatcggaagcggatcgaatggatcgtcagggggaggtggcggaggtatggacgcaaaatcacttacggcctggtcacggaccttggtgacctttaaagacgtgttcgtggatttcaccagggaagaatggaaactgttggacaccgcccagcagatcgtgtaccggaatgtgatgctggagaactacaaaaacttggtgtccctggggtatcaactcactaagccagatgtcattcttagactggaaaagggagaagaaccgtgataataggctggagcctcggtggccatgcttcttgccccttgggcctccccccagcccctcctccccttcctgcacccgtacccccgtggtctttgaataaagtctgagtgggcggcaaaaaaaaaaaaaaaaaaaaaaaaaaaaaaaaaaaaaaaaaaaaaaaaaaaaaaaaaaaaaaaaaaaaaaaaaaaaaaaaaaaaaaaaaaaaaaaaaaaaaaaaaaaaaaaaaaaaaaaaaaaaaaaaaaaaaaaaaaaa

SEQ ID NO: 186377 - DNA, 4795 bp, Artificial Sequence
  derived and/or modified sequence
gggaaataagagagaaaagaagagtaagaagaaatataagagccaccatggacaagaagtactcaatcggactcgcaatcggaaccaattcagtcggctgggcagtcattaccgatgaatacaaggtgccgtcgaagaagttcaaagtcctgggtaacactgacagacattcgatcaaaaagaacctgatcggagccttgctgtttgattcaggcgaaaccgccgaagctacccggttgaaacgaactgctagacgccgctacacgcgccgcaagaaccggatctgctacctccaagaaatcttctcgaacgaaatggctaaggtggacgactcgttctttcaccggctcgaggagtcattccttgtggaggaagataagaagcacgaaagacacccgatcttcggcaacatcgtggacgaagtcgcgtaccacgaaaagtacccgactatctaccatctccggaagaagctcgtggatagcaccgataaggccgatctgcgactgatctacctcgcgctggcccatatgattaagttccgcgggcacttcctcatcgaaggggacctgaatccagacaactcggacgtggataagctgtttatccagctggtgcagacttacaatcaattgtttgaagaaaaccctatcaacgcgtctggggtggacgcaaaggccatcctgagcgcgcggctgtcaaaatccagacggctggaaaatctgatagcccaactgccgggcgagaagaaaaacggcctgtttggaaatcttatcgccctgtccctgggactgacccccaacttcaagtcgaacttcgacttggccgaggatgcgaagctccagctcagcaaagacacctacgacgatgacctcgataacctgttggcccagatcggtgaccagtatgctgatctcttcttggcggccaagaacctgtcagacgcaattctgctctccgacatcctgcgggtgaatactgagatcactaaagccccattgagcgcgtcgatgatcaaaagatacgacgagcaccaccaggatctgactctcctcaaggcactggtccgccaacagctcccggaaaagtacaaagagatcttctttgaccaatccaaaaacggatacgctggttacatagacggcggagcgtcacaagaagagttctacaagttcatcaagcctatcctggaaaagatggacgggaccgaggaactcctggttaagctcaatagggaggatctgctgcgcaagcaacgcacgttcgacaatggaagcatcccccatcagatccacctgggggagctccacgcgatcctgaggcgccaggaagatttctacccatttctgaaggacaatagagagaaaatcgaaaagatcctgactttccgaatcccgtactacgtgggcccgctcgcacggggaaactcacggtttgcctggatgactcgcaaatccgaagaaaccattaccccctggaatttcgaggaggtggtcgataaaggcgcctcagcccagtcgttcatcgaaagaatgaccaactttgacaagaacctcccaaatgagaaggtgctgccaaaacatagcctgctgtacgagtactttactgtgtataacgaactcaccaaggtgaaatacgtgaccgagggaatgcgcaagccggcatttctgtcgggcgaacagaagaaggcaattgtggacttgctgttcaaaaccaaccggaaggtgaccgtgaaacagctcaaggaagattactttaagaagatcgagtgtttcgatagcgtcgaaatttcgggggtggaagatcgcttcaatgcaagccttgggacgtaccacgatctgcttaagatcattaaggacaaggatttccttgacaacgaagagaacgaggatattctcgaggatatcgtcctgaccctgactctgtttgaggatagagaaatgatcgaggagagattgaaaacttacgcacacctcttcgacgataaggtgatgaaacagctgaaaaggcgtagatacactggttggggaaggctgtcgagaaagctgatcaacggaattagggacaagcagtccggaaaaaccatcctggatttcctcaagtccgacggtttcgccaaccgcaacttcatgcagctgatccacgatgattccctgacgttcaaagaggatatccagaaggcacaagtgtccggacaaggagactcactccacgagcatatcgctaatctcgccggatcgccagctatcaagaagggaatcttgcagactgtcaaggtggtggacgaactggtgaaagtgatgggaaggcataagccggagaatatcgtgatcgagatggcgagggaaaaccagacgacccagaaaggacagaaaaacagccgggaacgcatgaagcgcatcgaagagggaatcaaagagcttgggagccaaatcctcaaagaacaccctgtggaaaatacccaactgcagaatgagaagctttacctgtattacctccaaaacgggcgcgacatgtacgttgaccaggaattggacattaaccggctttccgactacgatgtggacgctatcgtcccgcagtccttcctgaaagacgattcgatcgacaataaggtcctgactagatcagacaagaatcggggaaagtcagacaacgtgcctagcgaagaggtcgttaagaagatgaagaattactggcgccagctgctgaacgcgaagcttatcactcagcgcaagttcgacaacctcaccaaggcagaaagaggcggattgtcggagctcgacaaagctggcttcatcaagcgccagctcgtcgaaactcgccagattactaagcatgtggcgcagatcctggacagccgcatgaatactaagtatgatgagaatgacaagctcatccgggaggtgaaggtcatcaccctgaagtccaagctggtgtccgacttccggaaggacttccaattctacaaagtcagagaaatcaacaattaccatcacgcgcatgacgcctacttgaatgcagtggtgggtactgccctcatcaagaaatacccaaagcttgaaagcgagtttgtctacggagactacaaggtgtacgacgtccggaagatgatcgccaaatcggaacaggaaattgggaaggcgaccgctaagtacttcttctactcgaatatcatgaatttcttcaagaccgagatcacgcttgcaaatggcgaaatccggaagcggcccctcatcgaaaccaacggagaaaccggagaaatcgtgtgggacaagggtcgcgattttgcgaccgtccgaaaggttcttagcatgcctcaagtgaacatcgtcaagaaaacggaagtgcagactggaggcttcagcaaggagtccattctcccgaaacgcaactccgacaaactgatcgcacgcaagaaagactgggacccgaagaaatacggaggcttcgattcgccgactgtggcttactcggtcctggttgtggccaaggtggaaaagggaaagtccaagaagctgaagtccgtcaaggagctcctcggaatcaccatcatggaacggtcaagcttcgagaaaaacccaattgacttcctggaggcaaaggggtacaaggaggtgaagaaggatctgatcatcaaactgccgaagtacagcctctttgagctcgaaaacggacgcaaaaggatgctggcctccgccggagagctgcaaaagggaaacgagcttgccttgccttccaagtacgtgaacttcctgtacctggcatcccactacgaaaaactgaagggatcgccggaggacaacgaacagaagcagctgtttgtggaacaacacaagcattatctggatgaaatcatcgaacaaatcagcgaattctcaaaaagggtgatcttggccgacgccaacctggataaagtgctttccgcctacaacaaacatcgcgacaagccgatccgggagcaggccgaaaacatcattcacctgtttaccctgactaatctgggtgcgcccgcggctttcaaatacttcgataccacgatcgaccggaagagatacaccagcaccaaagaggtgttggacgcgaccctcatccaccaatctattaccggcctctatgaaactaggatcgacctcagccagctgggaggcgatgcctacccttacgatgtcccggactacgcctcgctgggatccggatctccgaagaagaagcggaaggtcgaggacccaaagaaaaagcgcaaagtggatgggatcggtagcggttccaacggttcctcgggtggcggcggaggcggcatggatgctaagtcacttaccgcctggtcgcggacgctggtgactttcaaagatgtgttcgtggatttcactcgtgaggaatggaaattgctggacactgcccaacagatcgtctaccgcaacgtcatgcttgaaaactacaaaaacctcgtgtcgctgggatatcagctgaccaagcccgacgtgattctgagactggagaagggcgaagaaccttgataataggctggagcctcggtggccatgcttcttgccccttgggcctccccccagcccctcctccccttcctgcacccgtaccccccaaacaccattgtcacactccagtggtctttgaataaagtctgagtgggcggcaaaaaaaaaaaaaaaaaaaaaaaaaaaaaaaaaaaaaaaaaaaaaaaaaaaaaaaaaaaaaaaaaaaaaaaaaaaaaaaaaaaaaaaaaaaaaaaaaaaaaaaaaaaaaaaaaaaaaaaaaaaaaaaaaaaaaaaaaaaa

SEQ ID NO: 186378 - RNA, 4777 nt, Artificial Sequence
  derived and/or modified sequence
gggaaauuaagagagaaaagaagaguuaagaagaaauuauuaagagccaccauggacaagaaauacucaaucggacuugcuaucggaacuaacagcgugggaugggccgucauuacugacgaauacaaggugcccucaaagaaguucaagguccugggaaauaccgauagacacuccaucaaaaagaaccugaucggggcacuguuguucgacucgggagagacugcagaagcaaccaggcucaagcgcacugcgaggcgccgguacacccggaggaagaaccgcaucugcuaccuccaagagauuuucagcaacgagauggcaaaggucgaugauucguucuuucaccgccuugaggagucguuccuugucgaggaggacaaaaagcaugaaagacauccgaucuucggaaacaucguggacgaagucgcauaccaugaaaaguacccuaccaucuaccaucucagaaagaaacucgucgauucaacugauaaggccgacuugcggcugaucuaccuggcucuggcgcacaugaucaaguuucggggucacuuucucaucgagggugaucucaacccggacaauuccgacguugacaaacucuucauccaacugguccagacguacaaccagcuguucgaagaaaauccgaucaacgcaagcggaguggacgccaaagccauucugucggcccgccucucgaagucgcgucgccuggaaaaucugauugcucagcucccgggcgaaaagaagaauggccuguuuggaaaccucaucgcacugucccucgggcugacucccaacuucaaaucgaacuuugacuuggcugaggaugcaaagcugcaacucuccaaagacacuuacgaugaugaccuggacaaucuccuggcgcagaucggggaucaguaugcugaccuguuccuggcggccaagaaccugucugaugccauccugcucuccgauauccugagagugaacacugagaucaccaaggcgccucugagcgccucgaugaucaaacgcuacgaugaacaccaucaggaccucacucuucugaaggcuuuggugcggcagcagcuuccggaaaaguacaaagagaucuucuucgaccagucgaaaaacggcuacgccggauacauugauggcggcgcaagccaggaggaauucuauaaguuuaucaaaccgauccuggagaagauggacggcacugaagaacuucuggucaagcugaaucgagaggaucugcuccggaagcagcggaccuucgacaaugggucuaucccucaccaaauccaucucggcgagcugcaugcgauucugaggcgccaggaggacuucuacccauuccugaaagacaaucgggagaaaaucgaaaagauucugacguuccgcauuccauacuacgucgggccacuugcgcgggguaauucgagauucgccuggaugacgcggaaguccgaagaaaccaucacgccguggaauuucgaagaaguggucgacaagggagccagcgcacaguccuucauugagcgcaugaccaauuucgacaaaaaucugccgaacgagaagguccugccgaagcauucacugcuguacgaauacuuuaccguguacaacgaacugaccaaggugaaguacgucaccgagggaaugagaaagccugcuuuccugagcggagaacagaagaaggccauuguugaccuccucuucaagacuaaucgcaaagugaccgugaagcagcuuaaagaggauuacuucaaaaagaucgaauguuucgacuccguggaaaucagcggcguggaggauagauucaacgcgucccuugggacuuaccacgaccuccuuaagaucaucaaggauaaggauuuccucgacaaugaggaaaacgaagauauccuggaggacaucguucugacucugacccucuuugaggaccgggagaugaucgaggagagacucaagaccuacgcgcaccuguuugacgacaaagugaugaagcaacuuaaacgcaggcgcuacaccggcuggggcagacugucacgcaaguugaucaacggaauuagagauaaacaguccggaaagaccauccuggacuuccugaaguccgauggauucgccaaccggaauuucaugcagcucauccaugacgacucauugacuuucaaggaggauauccaaaaggcccaagugagcggccaaggggacucccuucacgaacacaucgcaaauuuggccggaucaccagcgauuaagaagggaauccugcagaccgugaaggugguggacgagcuggugaaagugaugggacggcacaagccggaaaacaucgugaucgagauggccagagagaaccagacgacucaaaagggccagaagaacucgcgcgaacgcaugaagagaauagaagagggaauuaaggaacugggaucgcagaucuugaaggagcacccugucgaaaauacucaacuccagaacgagaagcuguaccuguacuaucuucaaaacggcagggacauguaugucgaccaagagcucgacauuaaccgccuguccgauuaugacguggacgccaucgugccgcagagcuuucucaaggacgauuccaucgacaacaaagugcucacccgcagcgacaagaauagagggaagucggauaacgucccuucggaagagguggugaaaaagaugaagaauuacuggcggcagcuccugaaugcaaagcucaucacccaacggaaguuugacaaccucaccaaggcagaaagaggaggacugucggaauuggauaaggccgguuucaucaagcgacaauugguggaaacucggcaaauuaccaagcauguggcacagauucuggacucccguaugaacaccaaguacgacgagaacgauaagcugauccgcgaggucaaggugaucacccucaaaagcaaacuugugucagacuuccggaaggacuuccaauucuacaagguccgcgaaaucaacaacuaccaccacgcucaugacgcauaccugaacgcuguggucgggacugcccucaucaagaaguacccuaaacucgaaagcgaauuuguguacggcgacuacaaaguguacgauguccggaagaugaucgcgaaauccgagcaggagaucggaaaggcgacugcuaaguacuuuuucuacucgaacaucaugaacuucuucaaaaccgaaaucacccuggcuaauggcgagaucagaaagcgcccgcugaucgaaaccaacggcgaaaccggugaaaucgugugggacaagggccgcgauuucgcuacugugagaaagguccuuuccaugccgcaagugaauaucgucaaaaagacugaggugcagacuggcggauuuuccaaggaaucgauccucccaaagaggaacucagauaagcucaucgcgcggaaaaaggauugggacccuaagaaguacggaggauuugauagcccaacuguggccuacucugugcucgugguggccaaagucgagaaaggaaagucgaagaaguugaaauccgugaaagaacucuugggaaucacuaucauggagcggucgucauuugaaaagaacccaaucgacuuccuggaagccaagggauacaaagaagucaagaaagaccugaucaucaagcucccuaaguacagccuguucgaacuggagaacggaaggaaacggaugcuggcuuccgccggcgaacugcaaaagggcaaugagcuggcccucccaucgaaauacgugaacuuccucuaccuugccucccauuacgaaaaguugaagggcucacccgaggacaaugagcagaaacagcucuuuguugaacaacacaaacacuaccuggacgaaaucaucgaacaaaucagcgaguucagcaagcgcgucauucuggcggacgcgaaccuggauaaagugcuguccgcguacaacaagcaccgcgauaagccgauacgggaacaggcugagaacaucauucaccucuucacucucacuaaucugggagcccccgccgccuucaaguacuuugauacuaccaucgaccgcaagagauacacgagcaccaaggaagugcucgaugccacccugauccaccaguccauuacuggucuguacgaaacgcgaaucgaucugucacagcucggaggagaugcguaccccuacgauguccccgacuacgcgucacucgguagcggcagcccgaagaagaaaagaaagguggaggacccgaagaaaaagaggaagguugacgggaucggaagcggaucgaauggaucgucagggggagguggcggagguauggacgcaaaaucacuuacggccuggucacggaccuuggugaccuuuaaagacguguucguggauuucaccagggaagaauggaaacuguuggacaccgcccagcagaucguguaccggaaugugaugcuggagaacuacaaaaacuuggugucccugggguaucaacucacuaagccagaugucauucuuagacuggaaaagggagaagaaccgugauaauaggcuggagccucgguggccaugcuucuugccccuugggccuccccccagccccuccuccccuuccugcacccguacccccguggucuuugaauaaagucugagugggcggcaaaaaaaaaaaaaaaaaaaaaaaaaaaaaaaaaaaaaaaaaaaaaaaaaaaaaaaaaaaaaaaaaaaaaaaaaaaaaaaaaaaaaaaaaaaaaaaaaaaaaaaaaaaaaaaaaaaaaaaaaaaaaaaaaaaaaaaaaaaa

SEQ ID NO: 186379 - RNA, 4795 nt, Artificial Sequence
  derived and/or modified sequence
gggaaauaagagagaaaagaagaguaagaagaaauauaagagccaccauggacaagaaguacucaaucggacucgcaaucggaaccaauucagucggcugggcagucauuaccgaugaauacaaggugccgucgaagaaguucaaaguccuggguaacacugacagacauucgaucaaaaagaaccugaucggagccuugcuguuugauucaggcgaaaccgccgaagcuacccgguugaaacgaacugcuagacgccgcuacacgcgccgcaagaaccggaucugcuaccuccaagaaaucuucucgaacgaaauggcuaagguggacgacucguucuuucaccggcucgaggagucauuccuuguggaggaagauaagaagcacgaaagacacccgaucuucggcaacaucguggacgaagucgcguaccacgaaaaguacccgacuaucuaccaucuccggaagaagcucguggauagcaccgauaaggccgaucugcgacugaucuaccucgcgcuggcccauaugauuaaguuccgcgggcacuuccucaucgaaggggaccugaauccagacaacucggacguggauaagcuguuuauccagcuggugcagacuuacaaucaauuguuugaagaaaacccuaucaacgcgucugggguggacgcaaaggccauccugagcgcgcggcugucaaaauccagacggcuggaaaaucugauagcccaacugccgggcgagaagaaaaacggccuguuuggaaaucuuaucgcccugucccugggacugacccccaacuucaagucgaacuucgacuuggccgaggaugcgaagcuccagcucagcaaagacaccuacgacgaugaccucgauaaccuguuggcccagaucggugaccaguaugcugaucucuucuuggcggccaagaaccugucagacgcaauucugcucuccgacauccugcgggugaauacugagaucacuaaagccccauugagcgcgucgaugaucaaaagauacgacgagcaccaccaggaucugacucuccucaaggcacugguccgccaacagcucccggaaaaguacaaagagaucuucuuugaccaauccaaaaacggauacgcugguuacauagacggcggagcgucacaagaagaguucuacaaguucaucaagccuauccuggaaaagauggacgggaccgaggaacuccugguuaagcucaauagggaggaucugcugcgcaagcaacgcacguucgacaauggaagcaucccccaucagauccaccugggggagcuccacgcgauccugaggcgccaggaagauuucuacccauuucugaaggacaauagagagaaaaucgaaaagauccugacuuuccgaaucccguacuacgugggcccgcucgcacggggaaacucacgguuugccuggaugacucgcaaauccgaagaaaccauuacccccuggaauuucgaggagguggucgauaaaggcgccucagcccagucguucaucgaaagaaugaccaacuuugacaagaaccucccaaaugagaaggugcugccaaaacauagccugcuguacgaguacuuuacuguguauaacgaacucaccaaggugaaauacgugaccgagggaaugcgcaagccggcauuucugucgggcgaacagaagaaggcaauuguggacuugcuguucaaaaccaaccggaaggugaccgugaaacagcucaaggaagauuacuuuaagaagaucgaguguuucgauagcgucgaaauuucggggguggaagaucgcuucaaugcaagccuugggacguaccacgaucugcuuaagaucauuaaggacaaggauuuccuugacaacgaagagaacgaggauauucucgaggauaucguccugacccugacucuguuugaggauagagaaaugaucgaggagagauugaaaacuuacgcacaccucuucgacgauaaggugaugaaacagcugaaaaggcguagauacacugguuggggaaggcugucgagaaagcugaucaacggaauuagggacaagcaguccggaaaaaccauccuggauuuccucaaguccgacgguuucgccaaccgcaacuucaugcagcugauccacgaugauucccugacguucaaagaggauauccagaaggcacaaguguccggacaaggagacucacuccacgagcauaucgcuaaucucgccggaucgccagcuaucaagaagggaaucuugcagacugucaaggugguggacgaacuggugaaagugaugggaaggcauaagccggagaauaucgugaucgagauggcgagggaaaaccagacgacccagaaaggacagaaaaacagccgggaacgcaugaagcgcaucgaagagggaaucaaagagcuugggagccaaauccucaaagaacacccuguggaaaauacccaacugcagaaugagaagcuuuaccuguauuaccuccaaaacgggcgcgacauguacguugaccaggaauuggacauuaaccggcuuuccgacuacgauguggacgcuaucgucccgcaguccuuccugaaagacgauucgaucgacaauaagguccugacuagaucagacaagaaucggggaaagucagacaacgugccuagcgaagaggucguuaagaagaugaagaauuacuggcgccagcugcugaacgcgaagcuuaucacucagcgcaaguucgacaaccucaccaaggcagaaagaggcggauugucggagcucgacaaagcuggcuucaucaagcgccagcucgucgaaacucgccagauuacuaagcauguggcgcagauccuggacagccgcaugaauacuaaguaugaugagaaugacaagcucauccgggaggugaaggucaucacccugaaguccaagcugguguccgacuuccggaaggacuuccaauucuacaaagucagagaaaucaacaauuaccaucacgcgcaugacgccuacuugaaugcagugguggguacugcccucaucaagaaauacccaaagcuugaaagcgaguuugucuacggagacuacaagguguacgacguccggaagaugaucgccaaaucggaacaggaaauugggaaggcgaccgcuaaguacuucuucuacucgaauaucaugaauuucuucaagaccgagaucacgcuugcaaauggcgaaauccggaagcggccccucaucgaaaccaacggagaaaccggagaaaucgugugggacaagggucgcgauuuugcgaccguccgaaagguucuuagcaugccucaagugaacaucgucaagaaaacggaagugcagacuggaggcuucagcaaggaguccauucucccgaaacgcaacuccgacaaacugaucgcacgcaagaaagacugggacccgaagaaauacggaggcuucgauucgccgacuguggcuuacucgguccugguuguggccaagguggaaaagggaaaguccaagaagcugaaguccgucaaggagcuccucggaaucaccaucauggaacggucaagcuucgagaaaaacccaauugacuuccuggaggcaaagggguacaaggaggugaagaaggaucugaucaucaaacugccgaaguacagccucuuugagcucgaaaacggacgcaaaaggaugcuggccuccgccggagagcugcaaaagggaaacgagcuugccuugccuuccaaguacgugaacuuccuguaccuggcaucccacuacgaaaaacugaagggaucgccggaggacaacgaacagaagcagcuguuuguggaacaacacaagcauuaucuggaugaaaucaucgaacaaaucagcgaauucucaaaaagggugaucuuggccgacgccaaccuggauaaagugcuuuccgccuacaacaaacaucgcgacaagccgauccgggagcaggccgaaaacaucauucaccuguuuacccugacuaaucugggugcgcccgcggcuuucaaauacuucgauaccacgaucgaccggaagagauacaccagcaccaaagagguguuggacgcgacccucauccaccaaucuauuaccggccucuaugaaacuaggaucgaccucagccagcugggaggcgaugccuacccuuacgaugucccggacuacgccucgcugggauccggaucuccgaagaagaagcggaaggucgaggacccaaagaaaaagcgcaaaguggaugggaucgguagcgguuccaacgguuccucggguggcggcggaggcggcauggaugcuaagucacuuaccgccuggucgcggacgcuggugacuuucaaagauguguucguggauuucacucgugaggaauggaaauugcuggacacugcccaacagaucgucuaccgcaacgucaugcuugaaaacuacaaaaaccucgugucgcugggauaucagcugaccaagcccgacgugauucugagacuggagaagggcgaagaaccuugauaauaggcuggagccucgguggccaugcuucuugccccuugggccuccccccagccccuccuccccuuccugcacccguaccccccaaacaccauugucacacuccaguggucuuugaauaaagucugagugggcggcaaaaaaaaaaaaaaaaaaaaaaaaaaaaaaaaaaaaaaaaaaaaaaaaaaaaaaaaaaaaaaaaaaaaaaaaaaaaaaaaaaaaaaaaaaaaaaaaaaaaaaaaaaaaaaaaaaaaaaaaaaaaaaaaaaaaaaaaaaaa

SEQ ID NO: 186380 - protein, 130 aa, Artificial Sequence
  derived and/or modified sequence
MKNAVIGNNKQKANLIVLGAVPRLLYLLQQETSSTELKTECAVVLGSLAMGTENNVKSLLDCHIIPALLQGLLSPDLKFIEACLRCLRTIFTSPVTPEELLYTDATVIPHLMALLSRSRYTQEYICQIFS

SEQ ID NO: 186381 - protein, 26 aa, Artificial Sequence
  derived and/or modified sequence
MEVTASSRHYVDRLFDPDPQKVLQGV

SEQ ID NO: 186382 - protein, 659 aa, Artificial Sequence
  derived and/or modified sequence
MEVTASSRHYVDRLFDPDPQKVLQGVIDMKNAVIGNNKQKANLIVLGAVPRLLYLLQQETSSTELKTECAVVLGSLAMGTENNVKSLLDCHIIPALLQGLLSPDLKFIEACLRCLRTIFTSPVTPEELLYTDATVIPHLMALLSRSRYTQEYICQIFSHCCKGPDHQTILFNHGAVQNIAHLLTSLSYKVRMQALKCFSVLAFENPQVSMTLVNVLVDGELLPQIFVKMLQRDKPIEMQLTSAKCLTYMCRAGAIRTDDNCIVLKTLPCLVRMCSKERLLEERVEGAETLAYLIEPDVELQRIASITDHLIAMLADYFKYPSSVSAITDIKRLDHDLKHAHELRQAAFKLYASLGANDEDIRKKIIETENMMDRIVTGLSESSVKVRLAAVRCLHSLSRSVQQLRTSFQDHAVWKPLMKVLQNAPDEILVVASSMLCNLLLEFSPSKEPILESGAVELLCGLTQSENPALRVNGIWALMNMAFQAEQKIKADILRSLSTEQLFRLLSDSDLNVLMKTLGLLRNLLSTRPHIDKIMSTHGKQIMQAVTLILEGEHNIEVKEQTLCILANIADGTTAKDLIMTNDDILQKIKYYMGHSHVKLQLAAMFCISNLIWNEEEGSQERQDKLRDMGIVDILHKLSQSPDSNLCDKAKMALQQYLA

SEQ ID NO: 186383 - DNA, 81 bp, Artificial Sequence
  derived and/or modified sequence
atggaggtgaccgccagcagcagacactacgtggacagactgttcgaccccgacccccagaaggtgctgcagggcgtgtag

SEQ ID NO: 186384 - DNA, 1980 bp, Artificial Sequence
  derived and/or modified sequence
atggaggtgaccgccagcagcagacactacgtggacagactgttcgaccccgacccccagaaggtgctgcagggcgtgatcgacatgaagaacgccgtgatcggcaacaacaagcagaaggccaacctgatcgtgctgggcgccgtgcccagactgctgtacctgctgcagcaggagaccagcagcaccgagctgaagaccgagtgcgccgtggtgctgggcagcctggccatgggcaccgagaacaacgtgaagagcctgctggactgccacatcatccccgccctgctgcagggcctgctgagccccgacctgaagttcatcgaggcctgcctgagatgcctgagaaccatcttcaccagccccgtgacccccgaggagctgctgtacaccgacgccaccgtgatcccccacctgatggccctgctgagcagaagcagatacacccaggagtacatctgccagatcttcagccactgctgcaagggccccgaccaccagaccatcctgttcaaccacggcgccgtgcagaacatcgcccacctgctgaccagcctgagctacaaggtgagaatgcaggccctgaagtgcttcagcgtgctggccttcgagaacccccaggtgagcatgaccctggtgaacgtgctggtggacggcgagctgctgccccagatcttcgtgaagatgctgcagagagacaagcccatcgagatgcagctgaccagcgccaagtgcctgacctacatgtgcagagccggcgccatcagaaccgacgacaactgcatcgtgctgaagaccctgccctgcctggtgagaatgtgcagcaaggagagactgctggaggagagagtggagggcgccgagaccctggcctacctgatcgagcccgacgtggagctgcagagaatcgccagcatcaccgaccacctgatcgccatgctggccgactacttcaagtaccccagcagcgtgagcgccatcaccgacatcaagagactggaccacgacctgaagcacgcccacgagctgagacaggccgccttcaagctgtacgccagcctgggcgccaacgacgaggacatcagaaagaagatcatcgagaccgagaacatgatggacagaatcgtgaccggcctgagcgagagcagcgtgaaggtgagactggccgccgtgagatgcctgcacagcctgagcagaagcgtgcagcagctgagaaccagcttccaggaccacgccgtgtggaagcccctgatgaaggtgctgcagaacgcccccgacgagatcctggtggtggccagcagcatgctgtgcaacctgctgctggagttcagccccagcaaggagcccatcctggagagcggcgccgtggagctgctgtgcggcctgacccagagcgagaaccccgccctgagagtgaacggcatctgggccctgatgaacatggccttccaggccgagcagaagatcaaggccgacatcctgagaagcctgagcaccgagcagctgttcagactgctgagcgacagcgacctgaacgtgctgatgaagaccctgggcctgctgagaaacctgctgagcaccagaccccacatcgacaagatcatgagcacccacggcaagcagatcatgcaggccgtgaccctgatcctggagggcgagcacaacatcgaggtgaaggagcagaccctgtgcatcctggccaacatcgccgacggcaccaccgccaaggacctgatcatgaccaacgacgacatcctgcagaagatcaagtactacatgggccacagccacgtgaagctgcagctggccgccatgttctgcatcagcaacctgatctggaacgaggaggagggcagccaggagagacaggacaagctgagagacatgggcatcgtggacatcctgcacaagctgagccagagccccgacagcaacctgtgcgacaaggccaagatggccctgcagcagtacctggcctag

SEQ ID NO: 186385 - DNA, 1896 bp, Artificial Sequence
  derived and/or modified sequence
atgaagaacgccgtgatcggcaacaacaagcagaaggccaacctgatcgtgctgggcgccgtgcccagactgctgtacctgctgcagcaggagaccagcagcaccgagctgaagaccgagtgcgccgtggtgctgggcagcctggccatgggcaccgagaacaacgtgaagagcctgctggactgccacatcatccccgccctgctgcagggcctgctgagccccgacctgaagttcatcgaggcctgcctgagatgcctgagaaccatcttcaccagccccgtgacccccgaggagctgctgtacaccgacgccaccgtgatcccccacctgatggccctgctgagcagaagcagatacacccaggagtacatctgccagatcttcagccactgctgcaagggccccgaccaccagaccatcctgttcaaccacggcgccgtgcagaacatcgcccacctgctgaccagcctgagctacaaggtgagaatgcaggccctgaagtgcttcagcgtgctggccttcgagaacccccaggtgagcatgaccctggtgaacgtgctggtggacggcgagctgctgccccagatcttcgtgaagatgctgcagagagacaagcccatcgagatgcagctgaccagcgccaagtgcctgacctacatgtgcagagccggcgccatcagaaccgacgacaactgcatcgtgctgaagaccctgccctgcctggtgagaatgtgcagcaaggagagactgctggaggagagagtggagggcgccgagaccctggcctacctgatcgagcccgacgtggagctgcagagaatcgccagcatcaccgaccacctgatcgccatgctggccgactacttcaagtaccccagcagcgtgagcgccatcaccgacatcaagagactggaccacgacctgaagcacgcccacgagctgagacaggccgccttcaagctgtacgccagcctgggcgccaacgacgaggacatcagaaagaagatcatcgagaccgagaacatgatggacagaatcgtgaccggcctgagcgagagcagcgtgaaggtgagactggccgccgtgagatgcctgcacagcctgagcagaagcgtgcagcagctgagaaccagcttccaggaccacgccgtgtggaagcccctgatgaaggtgctgcagaacgcccccgacgagatcctggtggtggccagcagcatgctgtgcaacctgctgctggagttcagccccagcaaggagcccatcctggagagcggcgccgtggagctgctgtgcggcctgacccagagcgagaaccccgccctgagagtgaacggcatctgggccctgatgaacatggccttccaggccgagcagaagatcaaggccgacatcctgagaagcctgagcaccgagcagctgttcagactgctgagcgacagcgacctgaacgtgctgatgaagaccctgggcctgctgagaaacctgctgagcaccagaccccacatcgacaagatcatgagcacccacggcaagcagatcatgcaggccgtgaccctgatcctggagggcgagcacaacatcgaggtgaaggagcagaccctgtgcatcctggccaacatcgccgacggcaccaccgccaaggacctgatcatgaccaacgacgacatcctgcagaagatcaagtactacatgggccacagccacgtgaagctgcagctggccgccatgttctgcatcagcaacctgatctggaacgaggaggagggcagccaggagagacaggacaagctgagagacatgggcatcgtggacatcctgcacaagctgagccagagccccgacagcaacctgtgcgacaaggccaagatggccctgcagcagtacctggcctag

SEQ ID NO: 186386 - DNA, 1593 bp, Artificial Sequence
  derived and/or modified sequence
taccaggacgccaccgtgatcccccacctgatggccctgctgagcagaagcagatacacccaggagtacatctgccagatcttcagccactgctgcaagggccccgaccaccagaccatcctgttcaaccacggcgccgtgcagaacatcgcccacctgctgaccagcctgagctacaaggtgagaatgcaggccctgaagtgcttcagcgtgctggccttcgagaacccccaggtgagcatgaccctggtgaacgtgctggtggacggcgagctgctgccccagatcttcgtgaagatgctgcagagagacaagcccatcgagatgcagctgaccagcgccaagtgcctgacctacatgtgcagagccggcgccatcagaaccgacgacaactgcatcgtgctgaagaccctgccctgcctggtgagaatgtgcagcaaggagagactgctggaggagagagtggagggcgccgagaccctggcctacctgatcgagcccgacgtggagctgcagagaatcgccagcatcaccgaccacctgatcgccatgctggccgactacttcaagtaccccagcagcgtgagcgccatcaccgacatcaagagactggaccacgacctgaagcacgcccacgagctgagacaggccgccttcaagctgtacgccagcctgggcgccaacgacgaggacatcagaaagaagatcatcgagaccgagaacatgatggacagaatcgtgaccggcctgagcgagagcagcgtgaaggtgagactggccgccgtgagatgcctgcacagcctgagcagaagcgtgcagcagctgagaaccagcttccaggaccacgccgtgtggaagcccctgatgaaggtgctgcagaacgcccccgacgagatcctggtggtggccagcagcatgctgtgcaacctgctgctggagttcagccccagcaaggagcccatcctggagagcggcgccgtggagctgctgtgcggcctgacccagagcgagaaccccgccctgagagtgaacggcatctgggccctgatgaacatggccttccaggccgagcagaagatcaaggccgacatcctgagaagcctgagcaccgagcagctgttcagactgctgagcgacagcgacctgaacgtgctgatgaagaccctgggcctgctgagaaacctgctgagcaccagaccccacatcgacaagatcatgagcacccacggcaagcagatcatgcaggccgtgaccctgatcctggagggcgagcacaacatcgaggtgaaggagcagaccctgtgcatcctggccaacatcgccgacggcaccaccgccaaggacctgatcatgaccaacgacgacatcctgcagaagatcaagtactacatgggccacagccacgtgaagctgcagctggccgccatgttctgcatcagcaacctgatctggaacgaggaggagggcagccaggagagacaggacaagctgagagacatgggcatcgtggacatcctgcacaagctgagccagagccccgacagcaacctgtgcgacaaggccaagatggccctgcagcagtacctggcctag

SEQ ID NO: 186387 - DNA, 81 bp, Artificial Sequence
  derived and/or modified sequence
atggaggtgacagccagcagccggcactacgtagaccgcctctttgacccggaccctcaaaaggtgctccagggagtttag

SEQ ID NO: 186388 - DNA, 1980 bp, Artificial Sequence
  derived and/or modified sequence
atggaagtgaccgcttcttcgaggcattacgtggaccggctattcgacccggaccctcagaaggtcctgcagggagtcatcgacatgaaaaacgctgtcatcggtaacaataaacagaaggccaatttgattgtgcttggcgctgtccctcgactgttatacttacttcaacaggaaacatcttctactgaactgaagacagagtgtgccgtggtgttaggaagcctggcaatggggaccgagaataacgttaaaagtctactggattgtcacattatccctgccctgctgcagggtctcctgtctcctgatctcaagttcattgaagcttgcctccgatgcctgagaactatattcacatccccggttacgcccgaagagctgctctatactgacgctactgttattccacacctgatggcactgcttagccgctctaggtacacacaggagtacatttgccagatcttcagccactgctgcaagggtccagatcaccagaccatcctgttcaatcacggggccgtccagaatatcgcacacctgctgacctccctatcctacaaggtcagaatgcaggccctcaaatgtttttctgtgctcgcctttgaaaaccctcaggtttcgatgacccttgttaacgtgttagtggacggtgaactcctgccacagatctttgtgaagatgctacagagggacaaaccgatcgagatgcagctcacttccgccaaatgtctcacctacatgtgtcgggctggagccatcagaactgatgataactgtatcgtgttgaaaaccttaccttgcctggtacgcatgtgctctaaagagcgactgctggaggaaagggttgaaggcgccgagacgctcgcatacctgattgagcccgatgttgaactacaacgaattgcttctataacagaccatctgattgccatgctcgccgattattttaagtacccttcctcggtgtccgccataaccgacatcaaacgtctggaccacgatctcaagcacgcccatgagctcaggcaggctgcattcaaactctatgcttccctaggggccaatgacgaagatataagaaagaagattattgagaccgaaaacatgatggacagaattgtcacgggactctcagagagctccgtgaaggtgcgcctggctgccgtaagatgtcttcactctctgtccagatctgtgcagcaactgcggacttcctttcaggatcatgcggtctggaagccccttatgaaagtattgcagaacgcgcccgatgaaattctggtggtggcttcaagtatgctgtgcaacctgctgcttgagttcagccctagcaaagagccgatcctggagagtggggcagtggaactgctgtgtggtctcactcagtccgaaaatcctgccctgagagtgaacggcatttgggctttaatgaacatggcatttcaggcggagcaaaaaatcaaggctgacatcctgcggagtttgagtaccgagcaattgttccggctcctttccgacagcgaccttaacgtcctcatgaagactctgggtctcctgaggaatctcctatccacccggccacacattgacaaaattatgagcacacatggcaaacagatcatgcaggcggtgacattgatactggaaggggagcacaatatcgaggttaaggagcagactctgtgcatactggcaaacattgccgacggtaccactgccaaagatttaatcatgacaaatgatgatatcctgcaaaagataaagtattacatggggcactctcatgtaaaactgcagctcgcagctatgttctgcatctcgaatctgatatggaacgaggaagagggttcacaagagcgtcaagataaactccgggatatgggcatcgttgatattctgcataagctctcacagtctcccgatagcaacctatgcgataaggccaaaatggcactgcagcagtatctcgcgtag

SEQ ID NO: 186389 - DNA, 1896 bp, Artificial Sequence
  derived and/or modified sequence
atgaaaaatgctgtcataggtaataacaaacagaaggcaaatctaattgttctgggggccgtgcccagactgctctatctgctgcagcaggagacttccagtaccgagctcaaaacagaatgcgcggtcgtgctcggatccctcgccatgggcactgagaataatgtgaagtcattactcgattgtcatataattcctgccttactgcaagggctgctgtcgccagatttgaagttcatagaggcctgcctaagatgcctgcgcaccatttttacgagccccgtgacgcccgaggaactgctgtacactgacgccaccgtgataccacatctgatggccttgctgagcagatcacgttatacccaggagtacatttgccaaatcttctcacattgctgcaaaggcccagaccaccagaccatactcttcaaccacggggctgtgcagaacatagcccacctgctcacctccttatcgtacaaagttcggatgcaggcactgaagtgtttctcagtgttagccttcgaaaaccctcaggtctctatgacattggttaatgttctggtggacggagagctgctaccacagatcttcgtgaagatgctgcagagggataagcccattgagatgcagctcacgtccgctaaatgtttgacgtatatgtgtcgtgccggtgcgattcggaccgatgataattgcatcgtgttgaagacgctgccctgcctggtgcggatgtgctctaaagagcgccttctcgaggaacgagtagagggagcagagacactcgcatacttgatcgaaccagacgttgaattacagcgcattgccagtattacagatcatcttattgctatgcttgcagattactttaagtacccctcttctgtgtcagccataacagatattaagcggctggatcatgacctgaaacacgcacatgaactgaggcaggcggctttcaaactctacgcttcgctgggggcaaatgatgaagacatcaggaagaaaatcatcgaaacagagaatatgatggatcgaatcgtgaccggcctttccgaatcctctgtgaaagttagactggcagccgtgcggtgcctccattctctctctcggtctgttcagcagctaagaacgagcttccaagatcatgccgtctggaaaccactgatgaaagtgctgcagaacgcccctgatgagattctcgttgtggcatcttccatgctgtgcaatctgctgctggagttcagcccttcaaaggagcctattctcgaaagtggagcggtggagcttctctgcgggctgactcagtccgaaaaccctgccctcagggttaatggcatctgggcgcttatgaacatggcgttccaggctgagcaaaaaataaaagcggatatactaaggtctctgagcaccgaacagctcttcagactgttgagcgatagcgaccttaacgtactgatgaagaccctggggctactgaggaatttgttatccacgcgtccgcatattgacaagatcatgtctacccatggtaagcaaataatgcaggccgtaacacttatcttagaaggagaacataatatcgaggtcaaagagcagaccttgtgtatactcgcgaatatcgcagatggaacaactgccaaggacctcatcatgacgaacgacgatattttgcagaaaatcaaatactatatggggcatagtcatgtaaagctccagttggccgccatgttttgtatttccaatcttatctggaacgaggaggaaggatcacaggagcgccaggacaagctccgcgacatgggcatcgttgatatcctgcacaagctgtctcagagcccagattctaacctgtgcgacaaggcaaagatggctctccaacagtacttagcctag

SEQ ID NO: 186390 - DNA, 1593 bp, Artificial Sequence
  derived and/or modified sequence
tatcaggatgctacagttattcctcatctcatggctctattgtcgagaagcaggtatacacaggaatacatctgtcagatattttcccactgctgcaaagggcccgaccaccagaccattctcttcaaccacggcgcagtgcaaaatatagctcatctgcttacatccttgagttataaggtgagaatgcaggcgctcaaatgtttctcagtcctggcttttgaaaatcctcaggtgtctatgaccctggtcaatgtgctggtcgatggcgagttgttaccacagattttcgttaagatgcttcagcgggataagcccatcgagatgcaactgacttccgcgaaatgcttgacctatatgtgccgggcgggtgccattaggaccgacgataattgcatcgttctgaaaactctgccatgtctcgtgagaatgtgttccaaggaaaggctgctggaggagcgtgtggaaggagccgagaccttagcctacctcatagaaccggatgtggagctacagcgcatcgcttccattaccgaccacctcattgccatgctggccgactatttcaaatacccttcttcggtgtccgcgattaccgacattaagcggctcgaccatgatctgaaacacgctcacgagcttcggcaggccgccttcaaattgtatgcctccctgggcgcaaatgatgaggatatccgtaagaaaatcattgaaacggagaacatgatggatcgcattgtgactgggctgagtgagtccagcgtgaaggtgcgcctggctgccgtcaggtgcctgcacagcctgagcagaagcgtgcagcagctgagaaccagctttcaggaccacgccgtttggaaaccacttatgaaggtcctccagaatgcaccagatgaaatcctagtcgtggccagctcaatgctttgcaacttgctgttggaattctctccatcaaaagagcccattcttgagagtggagcggtggaactgctgtgcgggttgactcagtctgagaatcctgccttaagagtgaatgggatttgggctttgatgaatatggcctttcaggcggagcagaaaataaaagccgacatcctcagatccctctctacggaacagctgtttcggttgttgagcgattctgaccttaatgtgttgatgaagacacttggattgttacggaatctcctaagcaccaggcctcatatcgacaagattatgagcacccacggcaaacagatcatgcaggccgtcacattgattctggagggcgagcacaatatcgaagtaaaagagcagaccctgtgcattctagcaaacattgctgacgggactaccgccaaggatttgatcatgaccaatgatgacattttacagaaaatcaagtattatatgggccatagccatgtgaaattacagctagccgcaatgttttgtatttccaacctcatctggaatgaagaagagggctctcaggagaggcaggataaacttagggacatgggcattgttgacatactgcataagctgtcacagtcacccgattctaatttatgtgataaggcaaagatggctctgcagcagtacttagcctag

SEQ ID NO: 186391 - DNA, 81 bp, Artificial Sequence
  derived and/or modified sequence
atggaggtgacagccagcagccgccactacgtggaccggctgtttgatcctgacccccagaaggtgctgcagggcgtgtag

SEQ ID NO: 186392 - DNA, 1980 bp, Artificial Sequence
  derived and/or modified sequence
atggaggtgacagccagcagccgccactacgtggaccggctgtttgatcctgacccccagaaggtgctgcagggcgtgattgacatgaagaatgctgtgattggcaacaacaagcagaaggccaacctgattgtgctgggcgctgtgccccggctgctgtacctgctgcagcaggagaccagcagcacagagctgaagacagaatgtgctgtggtgctgggcagcctggccatgggcacagaaaataatgtgaagagcctgctggactgccacatcatcccagccctgctgcagggcctgctgagcccagacctgaagttcatcgaggcctgcctgcgctgcctgcggaccatcttcaccagccctgtgaccccagaggagctgctgtacacagatgccaccgtcatcccccacctgatggccctgctgagccgcagccgctacacccaggagtacatctgccagatcttcagccactgctgcaagggccctgaccaccagaccatcctcttcaaccacggggctgtgcagaacatcgcccacctgctgaccagcctgagctacaaggtgaggatgcaggccctgaagtgcttctctgtgctggcctttgagaacccccaggtgtccatgaccctggtgaatgtgctggtggatggagagctgctgccccagatctttgtgaagatgctgcagagggacaagcccatcgagatgcagctgaccagcgccaagtgcctgacctacatgtgccgggccggggccatcagaacagatgacaactgcatcgtgctgaagaccctgccctgcctggtgaggatgtgcagcaaggagcggctgctggaggagcgggtggagggcgctgagaccctggcctacctgattgaaccagatgtggagctgcagagaattgccagcatcacagaccacctgattgccatgctggccgactacttcaagtaccccagctctgtgtctgccatcacagacatcaagaggctggaccatgacctgaagcacgcccacgagctgcggcaggccgccttcaagctgtatgccagcctgggcgccaatgatgaggacatcaggaagaagatcatcgagacagagaacatgatggacagaattgtgacaggcctgtctgagagctctgtgaaggtgcggctggccgctgtgcgctgcctgcacagcctgagccgctctgtgcagcagctgcggaccagcttccaggaccatgctgtgtggaagcccctgatgaaggtgctgcagaatgccccagatgagatcctggtggtggccagctccatgctgtgcaacctgctgctggagttcagccccagcaaggagcccatcctggagagcggggctgtggagctgctgtgtggcctgacccagagcgagaacccagccctgcgggtgaatggcatctgggccctgatgaacatggccttccaggccgagcagaagatcaaggctgacatcctgcggagcctgagcacagagcagctgttccggctgctgagtgacagcgacctgaatgtgctgatgaagaccctgggcctgctgaggaacctgctgagcacccggccccacatcgacaagatcatgagcacccacggcaagcagatcatgcaggccgtgaccctcatcctggagggggagcacaacatcgaggtgaaggagcagaccctgtgcatcctggccaacattgctgatggcaccacagccaaggacctgatcatgaccaatgatgacatcctgcagaagatcaagtactacatgggccacagccacgtgaagctgcagctggccgccatgttctgcatcagcaacctgatctggaatgaggaggagggcagccaggagcggcaggacaagctgcgggacatgggcatcgtggacatcctgcacaagctgagccagagcccagacagcaacctgtgtgacaaggccaagatggccctgcagcagtacctggcctag

SEQ ID NO: 186393 - DNA, 1896 bp, Artificial Sequence
  derived and/or modified sequence
atgaagaatgctgtgattggcaacaacaagcagaaggccaacctgattgtgctgggcgctgtgccccggctgctgtacctgctgcagcaggagaccagcagcacagagctgaagacagaatgtgctgtggtgctgggcagcctggccatgggcacagaaaataatgtgaagagcctgctggactgccacatcatcccagccctgctgcagggcctgctgagcccagacctgaagttcatcgaggcctgcctgcgctgcctgcggaccatcttcaccagccctgtgaccccagaggagctgctgtacacagatgccaccgtcatcccccacctgatggccctgctgagccgcagccgctacacccaggagtacatctgccagatcttcagccactgctgcaagggccctgaccaccagaccatcctcttcaaccacggggctgtgcagaacatcgcccacctgctgaccagcctgagctacaaggtgaggatgcaggccctgaagtgcttctctgtgctggcctttgagaacccccaggtgtccatgaccctggtgaatgtgctggtggatggagagctgctgccccagatctttgtgaagatgctgcagagggacaagcccatcgagatgcagctgaccagcgccaagtgcctgacctacatgtgccgggccggggccatcagaacagatgacaactgcatcgtgctgaagaccctgccctgcctggtgaggatgtgcagcaaggagcggctgctggaggagcgggtggagggcgctgagaccctggcctacctgattgaaccagatgtggagctgcagagaattgccagcatcacagaccacctgattgccatgctggccgactacttcaagtaccccagctctgtgtctgccatcacagacatcaagaggctggaccatgacctgaagcacgcccacgagctgcggcaggccgccttcaagctgtatgccagcctgggcgccaatgatgaggacatcaggaagaagatcatcgagacagagaacatgatggacagaattgtgacaggcctgtctgagagctctgtgaaggtgcggctggccgctgtgcgctgcctgcacagcctgagccgctctgtgcagcagctgcggaccagcttccaggaccatgctgtgtggaagcccctgatgaaggtgctgcagaatgccccagatgagatcctggtggtggccagctccatgctgtgcaacctgctgctggagttcagccccagcaaggagcccatcctggagagcggggctgtggagctgctgtgtggcctgacccagagcgagaacccagccctgcgggtgaatggcatctgggccctgatgaacatggccttccaggccgagcagaagatcaaggctgacatcctgcggagcctgagcacagagcagctgttccggctgctgagtgacagcgacctgaatgtgctgatgaagaccctgggcctgctgaggaacctgctgagcacccggccccacatcgacaagatcatgagcacccacggcaagcagatcatgcaggccgtgaccctcatcctggagggggagcacaacatcgaggtgaaggagcagaccctgtgcatcctggccaacattgctgatggcaccacagccaaggacctgatcatgaccaatgatgacatcctgcagaagatcaagtactacatgggccacagccacgtgaagctgcagctggccgccatgttctgcatcagcaacctgatctggaatgaggaggagggcagccaggagcggcaggacaagctgcgggacatgggcatcgtggacatcctgcacaagctgagccagagcccagacagcaacctgtgtgacaaggccaagatggccctgcagcagtacctggcctag

SEQ ID NO: 186394 - DNA, 1593 bp, Artificial Sequence
  derived and/or modified sequence
taccaggatgccaccgtcatcccccacctgatggccctgctgagccgcagccgctacacccaggagtacatctgccagatcttcagccactgctgcaagggccctgaccaccagaccatcctcttcaaccacggggctgtgcagaacatcgcccacctgctgaccagcctgagctacaaggtgaggatgcaggccctgaagtgcttctctgtgctggcctttgagaacccccaggtgtccatgaccctggtgaatgtgctggtggatggagagctgctgccccagatctttgtgaagatgctgcagagggacaagcccatcgagatgcagctgaccagcgccaagtgcctgacctacatgtgcagagctggggccatcagaacagatgacaactgcatcgtgctgaagaccctgccctgcctggtgaggatgtgcagcaaggagcggctgctggaggagcgggtggagggcgctgagaccctggcctacctgattgaaccagatgtggagctgcagagaattgccagcatcacagaccacctgattgccatgctggccgactacttcaagtaccccagctctgtgtctgccatcacagacatcaagaggctggaccatgacctgaagcacgcccacgagctgcggcaggccgccttcaagctgtatgccagcctgggcgccaatgatgaggacatcaggaagaagatcattgaaacagagaacatgatggaccgcatcgtgacaggcctgtctgagagctctgtgaaggtgcggctggccgctgtgcgctgcctgcacagcctgagccgctctgtgcagcagctgcggaccagcttccaggaccatgctgtgtggaagcccctgatgaaggtgctgcagaatgccccagatgagatcctggtggtggccagctccatgctgtgcaacctgctgctggagttcagccccagcaaggagcccatcctggagagcggggctgtggagctgctgtgtggcctgacccagagtgaaaatcctgccctgcgggtgaatggcatctgggccctgatgaacatggccttccaggccgagcagaagatcaaggctgacatcctgcggagcctgagcacagagcagctgttccggctgctgagtgacagcgacctgaatgtgctgatgaagaccctgggcctgctgaggaacctgctgagcacccggccccacatcgacaagatcatgagcacccacggcaagcagatcatgcaggccgtgaccctcatcctggagggggagcacaacatcgaggtgaaggagcagaccctgtgcatcctggccaacattgctgatggcaccacagccaaggacctgatcatgaccaatgatgacatcctgcagaagatcaagtactacatgggccacagccacgtgaagctgcagctggccgccatgttctgcatcagcaacctgatctggaatgaggaggagggcagccaggagcggcaggacaagctgcgggacatgggcatcgtggacatcctgcacaagctgagccagagcccagacagcaacctgtgtgacaaggccaagatggccctgcagcagtacctggcctag

SEQ ID NO: 186395 - DNA, 81 bp, Artificial Sequence
  derived and/or modified sequence
atggaggtgaccgccagcagccggcactacgtggaccggctgttcgaccccgatccccagaaggtgttgcaaggggtgtag

SEQ ID NO: 186396 - DNA, 1980 bp, Artificial Sequence
  derived and/or modified sequence
atggaggtgaccgccagcagccggcactacgtggaccggctgttcgaccccgacccacagaaagtccttcaaggggtgatcgacatgaagaatgccgtgatcggaaataataaacagaaagccaatctcatcgttctgggcgctgtacctcgactgctgtacctgctacagcaagagacttctagcacagagctaaagacagaatgtgccgtggtgcttggctctctggccatgggcaccgaaaacaacgtgaaatccctcctggattgccatatcattcctgccctgttgcagggcttactgtcacctgatctgaaatttatcgaagcctgcctgcgatgtctcaggaccatattcacctctcccgtcacgcccgaggagctcctgtataccgacgccaccgtgatacctcacctcatggccctgctgagcagaagccgctacactcaggaatacatctgccagatcttcagtcactgttgcaagggaccggaccaccagaccatccttttcaaccatggcgccgttcagaacatagcgcacttgcttacttctctgtcgtataaagtacgaatgcaggcattaaaatgttttagtgttctggccttcgaaaaccctcaggtctccatgacactggtcaacgtacttgttgacggtgagcttctcccccaaatattcgtgaaaatgttgcagagagataaaccaattgaaatgcagttaacctcggctaagtgcttgacctacatgtgtagggcaggagccatcagaacagacgataactgtattgttcttaagacacttccatgtttggtcaggatgtgtagtaaggagaggctgctggaagagcgcgtggaaggcgcagagaccctcgcctacctgatcgagcccgatgtggagttgcagagaatcgccagcataacagatcaccttattgccatgctcgctgactatttcaaatatccatctagcgtgtctgcgataacagatattaagcggctagatcacgacttgaagcacgcacatgagctccggcaggcagccttcaagctgtacgccagtctaggggccaatgacgaggatattcgcaaaaaaattattgaaaccgaaaatatgatggaccgaatcgtaaccggactgtcggaatctagcgtgaaggttcggctagcagccgtgcggtgcctgcacagtctatcgcgatcagtgcaacagctacgcacatcttttcaggaccacgccgtctggaagcccttgatgaaagtgctgcagaatgctcctgatgagatcctcgtggtggccagttcgatgctgtgtaatctgctgctggagttttcaccatccaaagagcccattttagagtctggggctgtggagctgctatgcgggttaactcagtcagagaatcccgccctgagagttaacggcatctgggcactcatgaacatggcattccaagctgaacagaagatcaaggcggatattctacggtcgctgtccactgagcagcttttccggttactgagcgattcagatttgaacgttctcatgaagaccctgggactacttcggaatctcctgagcacgcggccacatatcgacaaaatcatgtctacgcatgggaaacaaatcatgcaggcagtgacgctgatcctggagggggagcataacatagaggtcaaagaacagaccctgtgtattcttgccaacattgccgatgggaccaccgccaaggatttgattatgaccaatgatgacattctacaaaaaatcaagtattacatgggtcattcacacgtgaagctgcagttggccgctatgttctgtatttctaatctgatttggaatgaagaggagggatcacaggaacggcaagacaagttaagggatatgggcatcgtggatatcttgcataagctttcacagtctcccgatagcaacctctgtgacaaggcgaaaatggcactgcagcagtacttggcatag

SEQ ID NO: 186397 - DNA, 1896 bp, Artificial Sequence
  derived and/or modified sequence
atgaagaacgccgtgatcggcaacaacaagcagaaggccaacctgatcgtcctgggtgccgtaccccgactcctttacctgctccagcaggaaacttctagtacagaactgaaaactgaatgcgcagtggttttgggcagtctggccatgggaacagaaaacaatgtgaaaagccttctggattgtcacattattcctgccctcctgcagggcctcctgtctcccgatctgaagttcatcgaagcctgcttgagatgtctgcggactatcttcaccagcccagttacaccggaggagctgctttacacagatgcaactgtgatcccacatctcatggccctgctttctcggtcaagatacactcaggagtatatttgtcagatcttctcacactgttgcaagggccccgaccatcagacgattttgttcaatcatggagctgtgcagaatatcgcacatctcctgacttccctgtcatataaggtgcgaatgcaggctcttaagtgtttctctgtgctcgccttcgagaatccccaggtgtctatgacactggtcaatgtcttagtggacggcgagctcctgcctcagatcttcgtcaagatgctccagagggacaagccgatcgagatgcagctgacctcagccaaatgtctgacctacatgtgcagggctggagccatccgaacagacgacaattgcatcgtgctcaagactctcccgtgtcttgtgcggatgtgcagcaaagagagactgttggaggaacgcgtggaaggagcagagaccctcgcgtacctaattgagcccgacgtggagttacagagaattgcctctattactgaccacctgattgccatgctcgccgattactttaaatatcccagctctgtaagcgcaatcaccgacatcaagaggctggaccacgatctgaagcatgcccacgagctgcgtcaggccgctttcaaactgtatgcttcactgggcgcgaacgacgaggacattcggaagaagatcattgagactgaaaatatgatggacagaatagtcaccggtctcagcgaaagcagcgtgaaagttcgtttagccgccgtcagatgcctgcattcactgagtagatccgtacagcaattgaggaccagcttccaggaccatgccgtatggaaacccttaatgaaggtcctgcagaacgcccctgatgaaattttggttgtggcctcctccatgctgtgcaatctgttgttagaattctccccctcaaaggaacctatcctcgagtccggggcagtagagctgctgtgcgggctgactcaatcggagaaccctgcactgcgcgttaatggtatctgggccctgatgaatatggcctttcaagctgaacagaaaattaaggccgacattcttcgatcccttagcaccgaacagctcttccgactgctcagcgattccgacctgaacgttctgatgaaaactctcggtctcctcagaaacctgctgagtacccgacctcacattgacaagataatgtctacacacggcaaacagatcatgcaggctgtcaccctaatcctggaaggggagcacaatattgaagttaaggagcagacattatgtattctggctaatattgctgacgggactaccgcaaaggatctcatcatgactaacgatgacatactgcaaaagataaaatactacatgggccacagccatgtgaagctgcagttggccgccatgttttgtattagcaatctaatctggaatgaagaagaaggctcccaagagagacaggacaagctgcgcgatatggggatagtggacatcctgcataaactctctcagagtcctgactccaacctctgcgacaaggcaaagatggcattgcagcaatacctcgcctag

SEQ ID NO: 186398 - DNA, 1593 bp, Artificial Sequence
  derived and/or modified sequence
taccaggacgccaccgtgatcccccacctgatggccctgctgagccggagtaggtatacacaggagtacatatgccagattttttcccattgctgcaaaggccccgatcaccaaactatcctattcaaccacggcgctgtccagaacattgcccatcttttgacttccctgtcatataaggtgagaatgcaggctttgaagtgcttctcggtgttagccttcgaaaatcctcaggtgtcgatgaccctcgtcaatgtgctagtggacggcgagctgcttccccagatcttcgtgaaaatgttacaaagggacaaaccgatcgaaatgcagttgacatcagccaagtgcctgacgtacatgtgtagagctggagccatccggacagatgataactgcattgtactgaagacactcccttgtctggttaggatgtgcagcaaggagcgcctcctagaggagagggtcgaaggagccgaaaccttggcatatttgattgaacctgatgtagagctgcagagaatcgcttctataactgatcacctcatcgccatgctcgcagattattttaagtatcctagctccgtgagcgccattacagatataaagcggctcgaccacgatctgaagcacgcacatgagctacgccaggctgcatttaagctctatgcatcactgggtgccaacgatgaggatatccgcaagaagatcattgagacagaaaacatgatggaccgcatcgttacaggcttgtcagaatcctccgtaaaggttaggttggcagccgttcgatgtctgcactcgctttcccgtagcgtgcagcaactgagaactagcttccaggaccacgccgtatggaagcctttaatgaaagtgctccagaatgcgccagacgaaatcttagtggtcgcctcaagcatgctgtgcaatctcttgctcgaattctcacctagcaaggagccaatactggagagcggcgcagtggagctgctgtgtggcctaacacagtctgaaaaccccgctctgcgagttaacggcatctgggcgcttatgaatatggcgtttcaggctgaacagaagattaaagcagatattttgcgatctcttagtaccgaacagctgtttcgattgctgagtgacagcgacttaaacgtattgatgaaaacactgggcttgctccgaaatctgctcagtacccggccacacatagataaaatcatgagtactcatggcaaacagatcatgcaggccgtgaccttgatcctcgagggagaacataacatagaagtcaaggagcagacgttgtgcattttggctaatatcgctgacgggaccactgcgaaagacttgatcatgacaaacgacgacattctccaaaagataaagtactacatgggacatagtcacgttaagttgcagctggcggctatgttttgcatctcaaacctcatctggaacgaagaggaggggtcacaagaacgacaagataagctgcgggacatggggattgttgatattcttcataagctttcccagtcacctgattctaacctatgcgacaaggctaagatggctctgcagcagtatttggcgtag

SEQ ID NO: 186399 - DNA, 81 bp, Artificial Sequence
  derived and/or modified sequence
atggaagtcacggcgtcctccaggcactacgtggatcgcttatttgaccctgatcctcagaaggtactgcaaggagtatag

SEQ ID NO: 186400 - DNA, 1980 bp, Artificial Sequence
  derived and/or modified sequence
atggaagtgacggcatcttcccgccactatgtggatcggctcttcgaccccgatcctcaaaaggtactgcaaggggttatcgacatgaaaaacgcggttattggcaataacaaacagaaggccaacctgatcgtccttggagccgtgccgcgattactgtacctgcttcagcaggagacaagctccacagaactgaaaacagaatgcgcagtggtcctgggcagtctcgccatgggcacagaaaataatgttaaatctttactggactgtcatatcataccagccctgctgcagggcctcctgtctcccgacctcaagttcatcgaagcctgcctgagatgtctccgaaccatttttactagccccgttacccctgaggaacttttatataccgacgctaccgtgatcccgcatcttatggcactgctttcaagatcccgctatacgcaagaatacatctgtcagatcttttcccattgttgtaagggcccagatcaccagaccatcctgtttaatcatggtgcagtgcagaatatcgcccacctcctgacttccctgtcttacaaggtcaggatgcaggcactgaagtgtttttcagtactagcatttgaaaatcctcaagtgagcatgacactggtgaacgtgcttgtggacggcgaactactccctcagatttttgtcaagatgcttcaacgagataaacccattgaaatgcagctgacctctgcaaagtgcctgacatacatgtgtcgagccggagcaatcaggactgacgacaactgcattgttttgaagaccctcccatgcctggtgcggatgtgctcaaaggaacgcttgttggaagagcgcgtggaaggagcagaaacactcgcatacctgatcgaacctgacgtcgagcttcagcgcattgcatcaattacagatcatttgattgcaatgctggccgactacttcaagtatccctcttctgtttctgccatcactgacatcaaaaggctagaccatgatctcaagcacgctcatgaactgcgtcaggcagcattcaagctgtacgcaagtctgggggcaaatgatgaggatatccgaaagaaaattatcgaaaccgaaaatatgatggatcgcattgtgaccgggctttctgagtcctctgtcaaggtgaggctggccgctgtacggtgtttgcactctctgtctagatcggttcaacagctgagaacatccttccaggaccacgcagtgtggaagcccctcatgaaggtcctccagaatgcaccagacgaaattctcgttgttgcttctagcatgttgtgtaacctccttttagaattctccccgtctaaagaaccaatcctggagtcaggggcagttgaactgctgtgcggactgacccagagtgaaaatccggcactccgggtaaacgggatctgggccctgatgaacatggccttccaggctgaacagaaaatcaaggctgacatcttaagaagtctttccaccgagcagttgtttcggctcctgagcgattcggacctgaacgtgcttatgaagaccctcggactgcttcgcaacctcctgtccacacgcccacatattgataagataatgagcacccatggtaaacagatcatgcaggctgtgaccctgattctggaaggcgagcataacatagaggtgaaggaacagacactatgtatactggctaatatagcggatggcactacagcgaaagaccttatcatgacaaacgatgatatactgcagaaaatcaagtactatatgggccatagtcacgtaaagttgcagctggccgctatgttttgtatcagcaatttgatttggaatgaggaagaagggtcccaggagagacaggataagcttagggacatgggaatcgtagatattctgcataagctcagccagagcccggactcaaatctgtgcgacaaggccaaaatggcactgcagcaatacttagcctag

SEQ ID NO: 186401 - DNA, 1896 bp, Artificial Sequence
  derived and/or modified sequence
atgaaaaacgcagtgatcgggaacaacaaacagaaagcaaacttaatcgtgttaggtgccgtgccacgcttgctctacctcctgcaacaggaaacatcgtctacagagctcaagactgagtgcgccgtggtgctgggctctttggcgatgggaactgaaaataacgtgaagagcttactcgactgtcacataattccggctttgctgcaaggtctgctctcaccagacttaaagtttatagaggcatgcctaaggtgcctgcgtacaattttcacatctcccgtcacccctgaggagctgctgtataccgacgccacggttattccacacttaatggccctgttgtctcggagtagatatactcaggagtacatctgtcaaatctttagtcattgctgcaagggaccagatcatcagacgattctgtttaaccacggagccgtgcagaatattgcccacttgctgaccagcctcagctacaaagtgagaatgcaggccttgaaatgcttttccgtgctggcatttgagaacccccaggtatccatgaccctggtgaatgttttagtcgatggcgaactactgccccagatcttcgtcaaaatgttgcaacgcgacaagcccatcgaaatgcagctgacctccgctaagtgcctgacatacatgtgcagagcgggagcaataagaaccgatgacaattgcatagtgctcaaaactctcccttgtttggtcagaatgtgcagtaaggaaaggctgttagaagaacgggtggagggcgctgagacactggcctacctgatagagccagatgtggaactgcagagaattgcatcaataaccgaccatttgatcgctatgctcgcagattacttcaagtacccttcatccgtgtccgcaattacagatatcaagcgccttgaccacgatttgaagcacgctcacgagctaaggcaggcagcttttaagctttacgccagcctgggggctaatgacgaggacatcaggaaaaaaatcatcgagaccgaaaacatgatggatagaatcgtcactgggctcagcgagagctctgtcaaggtgcgcctggcggctgtgaggtgtttacattctctgtctcgttcagtgcagcagctgaggacaagttttcaggatcatgccgtttggaagccattaatgaaagtgctgcaaaatgccccagacgagattctggttgtggcttctagcatgttatgtaacctcctcctggaattcagtccctccaaggagcccatcttggagtccggcgcagttgaattactatgtggtcttactcagagcgagaaccccgctctgcgggttaacggaatatgggccttgatgaatatggccttccaggctgagcagaagataaaagcggatattctaagatccctgagtactgaacagctgtttaggctcctctcggattccgatctgaacgtactgatgaaaactctcgggctcttgcggaatctgcttagtacacggcctcatatcgacaaaatcatgtccactcacggcaaacagataatgcaagccgtgaccctcatcctggaaggagaacacaacatagaggttaaagagcagactctctgcatccttgccaatattgccgatggaacaacggcaaaagatttgattatgacaaacgacgacatcttgcagaaaattaagtactatatgggacatagtcacgtgaagctacagctcgctgctatgttctgcatctctaaccttatctggaacgaggaggaaggatctcaagagcgccaggacaagctccgggacatgggcattgtcgacatcctccacaaactgagccagtcccccgatagcaacttgtgcgataaggcaaaaatggcccttcagcagtacctcgcctag

SEQ ID NO: 186402 - DNA, 1593 bp, Artificial Sequence
  derived and/or modified sequence
tatcaagatgccactgtgattccccaccttatggctctgctatcacggtcccgctacacccaggagtacatctgccagatcttctcacattgctgtaaaggacccgaccaccagaccatcctgtttaatcacggtgctgtgcaaaacatagcacacctgcttacctcactatcttataaggtgcggatgcaagcacttaagtgcttctccgttcttgcattcgagaaccctcaggtaagcatgacgctggtgaacgtactagttgacggagagcttcttcctcagatcttcgtgaaaatgttgcaacgcgataaaccgatcgagatgcagctcacaagcgccaaatgccttacctatatgtgtcgagccggtgctatcaggaccgatgacaactgtatcgttctcaagactctgccatgcctcgtgagaatgtgttccaaggagcgcctactggaggaaagggttgaaggggcagagaccttggcctacctaatagagcctgatgtcgagctccagaggatcgccagtatcactgatcacctgattgccatgttggcagactactttaagtatccctccagcgtgtcggcaatcacagacatcaagcgtcttgatcacgatctgaagcacgctcacgaactccgccaggctgcatttaagctgtatgcctctctaggcgcaaatgatgaggatatcagaaagaaaattatcgagaccgagaacatgatggacaggattgtgactgggctgtccgaatcttccgtcaaggtgcggcttgctgctgtgcgatgtctgcattccctgtcacgcagtgtccagcaactgaggactagctttcaagatcacgccgtgtggaagccactcatgaaggtattacagaacgctccagatgagattcttgttgtggcaagctccatgctgtgtaacctgctgctggagttcagtccctccaaagaacctatcctcgaatccggcgctgtggagctgctgtgtggactgacacagagcgagaacccagcactgcgggttaatggaatctgggcgctgatgaatatggcttttcaggcggagcagaaaatcaaggctgatatattacgatctctcagtaccgaacagttgttccggctcctgagcgattcagatctgaatgtcttgatgaagaccctgggcctcctccggaacctgctcagtactagaccgcacatcgataaaatcatgagtacacacggcaagcagattatgcaagcggtgaccttgatccttgagggtgagcataatattgaagttaaagagcaaacactgtgtatcctggccaatattgcagatgggacaaccgcaaaggatcttatcatgactaacgacgacatcctccagaagatcaagtattacatggggcactcccacgtcaagttgcaactggcagctatgttctgtatatccaatctcatatggaatgaagaggagggatctcaagagcggcaggataagttgcgggacatgggaatagttgacattttgcacaagctatctcagagccccgattccaatctttgcgataaagcaaaaatggccctgcagcagtacctggcctag

SEQ ID NO: 186403 - DNA, 3043 bp, Artificial Sequence
  derived and/or modified sequence
cagatcttctttgcgcatgcggaaaccgctgcccgcttccacctctaacccaggctcagagtagctgctgtttctgagagaacgattcgtaggacagcccctgacgccattcccttttgcccttctttctgcgggcctttccggtacttgagcggtgtccagagcgtggccagttctcgtctatctggctgcctttagggagcggtgcctagcgttggccaatagttggctgtcgaaagtgccggcccccgcgccggcgcctgcagcagccgggtgggaaggctcaagatggcgtgcttgttggagaccccaatccgcatgagcgtcctttcggaccaggaatgaaagttactgggagataacttcgaaggattttgcaacaaattcgagctgtccgactctgagaatggaagtaacagctagcagtcgccactatgttgacaggctatttgaccctgatccccagaaagttctacaaggtgtcatagacatgaaaaatgctgtaattggaaacaacaagcagaaagccaatctcattgttttaggagctgttccaagattgttgtacttgcttcagcaagaaacctcaagcacagagctgaaaactgaatgtgcagtggtgttgggaagtcttgctatgggtactgaaaacaatgtcaagtctctactggactgccatattatccctgccttattgcaaggactactgtccccagacctgaagtttattgaagcttgcctccgatgcctgcgtaccatcttcaccagtcctgtcactccagaggagctactgtatacagatgccacagtgataccacacctcatggcactgcttagcaggtcccgctatacccaggagtacatctgtcagatcttctcacactgctgtaaagggccagatcatcaaacaattttatttaaccacggtgcagttcagaatattgctcacctactaacctcactgtcctacaaagttcgaatgcaagcactgaaatgtttctcagttttagcttttgaaaacccccaggtatcgatgaccctggtaaatgttttggttgatggagaattgttaccacagatttttgtgaagatgttacagagggataagcctattgagatgcagctcacatcagcaaaatgtttaacttacatgtgtagagctggagcaattcggacagatgataactgtattgtattaaagacattaccttgtttggttcgaatgtgcagtaaggagagattactagaggagagagttgaaggagctgagacacttgcctatctgattgaaccagatgttgagctacagagaatcgctagcataactgatcacctcattgccatgcttgctgattatttcaagtatcccagctcagtgagtgccatcactgatattaaaaggcttgatcatgatttaaaacatgctcacgaactccgccaggctgcattcaagctctatgcctctcttggagcaaatgatgaagacatccggaagaagatcattgagactgaaaatatgatggaccgaattgtgactggcttgtctgagtctagtgtcaaggtgcggttagctgccgtcagatgtttgcacagtttatccagatctgtgcagcagcttcgaaccagtttccaggatcatgctgtttggaaacctttaatgaaggttttacaaaatgcaccagatgaaatcctagtggtagcatcttccatgctgtgtaatcttcttcttgaattttctccaagcaaagagccaattttggaatcaggagccgtagagctactttgtggattaactcagagtgaaaatcctgctttacgagtgaatggaatttgggctttaatgaatatggcatttcaggctgaacaaaaaataaaagcagatattttacgaagcttgagtactgaacagctattccggttattatcagattcagatttgaatgtgctgatgaagacattgggacttcttagaaatctcctctccactcgtcctcatatagataaaataatgagtactcatggaaagcaaattatgcaagccgtcactcttattctagaaggggaacataacattgaggtcaaagagcagacactgtgcatcttagccaacatagcggatgggacaacagcaaaagatcttattatgaccaatgatgatatcctacagaaaatcaagtattacatgggccattcacatgttaaactgcagcttgcagccatgttttgtatatcaaacctcatatggaatgaagaggaaggttcacaagaacgccaggataaattacgagacatgggcatcgtagatattctacacaaactgagtcagtcaccagattcaaacctttgtgacaaggcaaagatggcactgcagcagtacctggcatgatgggagtgcccctgggcacctgcgagcatcccacctccttgtttaaggaagtacaggaaccagcctcatttgattccttctatttgcacaagtcaccttggactgcagggagctgttttgcaaaagcagtttagtaggcttagatctcaaattcatcttgagaacatttttttgaggtagtaatttcctcagaagactcttgtgttttgttttggtttttttttctgagctactcggactctttattagaacaatcaatcattttcctttggacctacaatttttgcctatgctgcagccactttgtgagtgagaatgaatatgtctgtgtgaacacacaggcatgcgtgtgtatgtgcacgtacatgggccagaatgaatggatgtgtgtgtgtgagggatacctcagatttttcttttcttattttgtgtgaaaatctcttttctacagattttccagggtttaagcattgcttgctgtataaaaaactttactgaattatatacagtttgaatgaaatgttattttaaaaacaaaacaattgttaagtgttccataaaggttatgttgaattttggtcagatgaatatttgtaagtaaaaaatatatgcatttctgaacctcaacttacatagattttctttatataaaaaaaa

SEQ ID NO: 186404 - DNA, 2777 bp, Artificial Sequence
  derived and/or modified sequence
gcttccacctctaacccaggctcagagtagctgctgtttctgagagaacgattcgtaggacagcccctgacgccattcccttttgcccttctttctgcgggcctttccggtacttgagcggtgtccagagcgtggccagttctcgtctatctggctgcctttagggagcggtgcctagcgttggccaatagttggctgtcgaaagtgccggcccccgcgccggcgcctgcagcagccgggtgggaaggctcaagatggcgtgcttgttggagaccccaatccgcatgagcgtcctttcggaccaggaatgaaagttactgggagataacttcgaaggattttgcaacaaattcgagctgtccgactctgagaatgagacatgaaaaatgctgtaattggaaacaacaagcagaaagccaatctcattgttttaggagctgttccaagattgttgtacttgcttcagcaagaaacctcaagcacagagctgaaaactgaatgtgcagtggtgttgggaagtcttgctatgggtactgaaaacaatgtcaagtctctactggactgccatattatccctgccttattgcaaggactactgtccccagacctgaagtttattgaagcttgcctccgatgcctgcgtaccatcttcaccagtcctgtcactccagaggagctactgtatacagatgccacagtgataccacacctcatggcactgcttagcaggtcccgctatacccaggagtacatctgtcagatcttctcacactgctgtaaagggccagatcatcaaacaattttatttaaccacggtgcagttcagaatattgctcacctactaacctcactgtcctacaaagttcgaatgcaagcactgaaatgtttctcagttttagcttttgaaaacccccaggtatcgatgaccctggtaaatgttttggttgatggagaattgttaccacagatttttgtgaagatgttacagagggataagcctattgagatgcagctcacatcagcaaaatgtttaacttacatgtgtagagctggagcaattcggacagatgataactgtattgtattaaagacattaccttgtttggttcgaatgtgcagtaaggagagattactagaggagagagttgaaggagctgagacacttgcctatctgattgaaccagatgttgagctacagagaatcgctagcataactgatcacctcattgccatgcttgctgattatttcaagtatcccagctcagtgagtgccatcactgatattaaaaggcttgatcatgatttaaaacatgctcacgaactccgccaggctgcattcaagctctatgcctctcttggagcaaatgatgaagacatccggaagaagatcattgagactgaaaatatgatggaccgaattgtgactggcttgtctgagtctagtgtcaaggtgcggttagctgccgtcagatgtttgcacagtttatccagatctgtgcagcagcttcgaaccagtttccaggatcatgctgtttggaaacctttaatgaaggttttacaaaatgcaccagatgaaatcctagtggtagcatcttccatgctgtgtaatcttcttcttgaattttctccaagcaaagagccaattttggaatcaggagccgtagagctactttgtggattaactcagagtgaaaatcctgctttacgagtgaatggaatttgggctttaatgaatatggcatttcaggctgaacaaaaaataaaagcagatattttacgaagcttgagtactgaacagctattccggttattatcagattcagatttgaatgtgctgatgaagacattgggacttcttagaaatctcctctccactcgtcctcatatagataaaataatgagtactcatggaaagcaaattatgcaagccgtcactcttattctagaaggggaacataacattgaggtcaaagagcagacactgtgcatcttagccaacatagcggatgggacaacagcaaaagatcttattatgaccaatgatgatatcctacagaaaatcaagtattacatgggccattcacatgttaaactgcagcttgcagccatgttttgtatatcaaacctcatatggaatgaagaggaaggttcacaagaacgccaggataaattacgagacatgggcatcgtagatattctacacaaactgagtcagtcaccagattcaaacctttgtgacaaggcaaagatggcactgcagcagtacctggcatgatgggagtgcccctgggcacctgcgagcatcccacctccttgtttaaggaagtacaggaaccagcctcatttgattccttctatttgcacaagtcaccttggactgcagggagctgttttgcaaaagcagtttagtaggcttagatctcaaattcatcttgagaacatttttttgaggtagtaatttcctcagaagactcttgtgttttgttttggtttttttttctgagctactcggactctttattagaacaatcaatcattttcctttggacctacaatttttgcctatgctgcagccactttgtgagtgagaatgaatatgtctgtgtgaacacacaggcatgcgtgtgtatgtgcacgtacatgggccagaatgaatggatgtgtgtgtgtgagggatacctcagatttttcttttcttattttgtgtgaaaatctcttttctacagattttccagggtttaagcattgcttgctgtataaaaaactttactgaatta

SEQ ID NO: 186405 - DNA, 2122 bp, Artificial Sequence
  derived and/or modified sequence
taccaggatgccacagtgataccacacctcatggcactgcttagcaggtcccgctatacccaggagtacatctgtcagatcttctcacactgctgtaaagggccagatcatcaaacaattttatttaaccacggtgcagttcagaatattgctcacctactaacctcactgtcctacaaagttcgaatgcaagcactgaaatgtttctcagttttagcttttgaaaacccccaggtatcgatgaccctggtaaatgttttggttgatggagaattgttaccacagatttttgtgaagatgttacagagggataagcctattgagatgcagctcacatcagcaaaatgtttaacttacatgtgtagagctggagcaattcggacagatgataactgtattgtattaaagacattaccttgtttggttcgaatgtgcagtaaggagagattactagaggagagagttgaaggagctgagacacttgcctatctgattgaaccagatgttgagctacagagaatcgctagcataactgatcacctcattgccatgcttgctgattatttcaagtatcccagctcagtgagtgccatcactgatattaaaaggcttgatcatgatttaaaacatgctcacgaactccgccaggctgcattcaagctctatgcctctcttggagcaaatgatgaagacatccggaagaagatcattgagactgaaaatatgatggaccgaattgtgactggcttgtctgagtctagtgtcaaggtgcggttagctgccgtcagatgtttgcacagtttatccagatctgtgcagcagcttcgaaccagtttccaggatcatgctgtttggaaacctttaatgaaggttttacaaaatgcaccagatgaaatcctagtggtagcatcttccatgctgtgtaatcttcttcttgaattttctccaagcaaagagccaattttggaatcaggagccgtagagctactttgtggattaactcagagtgaaaatcctgctttacgagtgaatggaatttgggctttaatgaatatggcatttcaggctgaacaaaaaataaaagcagatattttacgaagcttgagtactgaacagctattccggttattatcagattcagatttgaatgtgctgatgaagacattgggacttcttagaaatctcctctccactcgtcctcatatagataaaataatgagtactcatggaaagcaaattatgcaagccgtcactcttattctagaaggggaacataacattgaggtcaaagagcagacactgtgcatcttagccaacatagcggatgggacaacagcaaaagatcttattatgaccaatgatgatatcctacagaaaatcaagtattacatgggccattcacatgttaaactgcagcttgcagccatgttttgtatatcaaacctcatatggaatgaagaggaaggttcacaagaacgccaggataaattacgagacatgggcatcgtagatattctacacaaactgagtcagtcaccagattcaaacctttgtgacaaggcaaagatggcactgcagcagtacctggcatgatgggagtgcccctgggcacctgcgagcatcccacctccttgtttaaggaagtacaggaaccagcctcatttgattccttctatttgcacaagtcaccttggactgcagggagctgttttgcaaaagcagtttagtaggcttagatctcaaattcatcttgagaacatttttttgaggtagtaatttcctcagaagactcttgtgttttgttttggtttttttttctgagctactcggactctttattagaacaatcaatcattttcctttggacctacaatttttgcctatgctgcagccactttgtgagtgagaatgaatatgtctgtgtgaacacacaggcatgcgtgtgtatgtgcacgtacatgggccagaatgaatggatgtgtgtgtgtgagggatacctcagatttttcttttcttattttgtgtgaaaatctcttttctacagattttccagggtttaagcattgcttgctgtataaaaaactttactgaattatatacagtttgaatgaaatgttatttt

SEQ ID NO: 186406 - protein, 453 aa, Artificial Sequence
  derived and/or modified sequence
MARKVVSRKRKAPASPGAGSDAQGPQFGWDHSLHKRKRLPPVKRSLVYYLKNREVRLQNETSYSRVLHGYAAQQLPSLLKEREFHLGTLNKVFASQWLNHRQVVCGTKCNTLFVVDVQTSQITKIPILKDREPGGVTQQGCGIHAIELNPSRTLLATGGDNPNSLAIYRLPTLDPVCVGDDGHKDWIFSIAWISDTMAVSGSRDGSMGLWEVTDDVLTKSDARHNVSRVPVYAHITHKALKDIPKEDTNPDNCKVRALAFNNKNKELGAVSLDGYFHLWKAENTLSKLLSTKLPYCRENVCLAYGSEWSVYAVGSQAHVSFLDPRQPSYNVKSVCSRERGSGIRSVSFYEHIITVGTGQGSLLFYDIRAQRFLEERLSACYGSKPRLAGENLKLTTGKGWLNHDETWRNYFSDIDFFPNAVYTHCYDSSGTKLFVAGGPLPSGLHGNYAGLWS

SEQ ID NO: 186407 - protein, 227 aa, Artificial Sequence
  derived and/or modified sequence
MEPQGYPAFGWDHSLHKRKRLPPVKRSLVYYLKNREVRLQNETSYSRVLHGYAAQQLPSLLKEREFHLGTLNKVFASQWLNHRQVVCGTKCNTLFVVDVQTSQITKIPILKDREPGGVTQQGCGIHAIELNPSRTLLATGGDNPNSLAIYRLPTLDPVCVGDDGHKDWIFSIAWISDTMAVSGSRDGSMGLWEVTDDVLTKSDARHNVSRVPVYAHITHKALKDIPK

SEQ ID NO: 186408 - DNA, 1362 bp, Artificial Sequence
  derived and/or modified sequence
atggccagaaaggtggtgagcagaaagagaaaggcccccgccagccccggcgccggcagcgacgcccagggcccccagttcggctgggaccacagcctgcacaagagaaagagactgccccccgtgaagagaagcctggtgtactacctgaagaacagagaggtgagactgcagaacgagaccagctacagcagagtgctgcacggctacgccgcccagcagctgcccagcctgctgaaggagagagagttccacctgggcaccctgaacaaggtgttcgccagccagtggctgaaccacagacaggtggtgtgcggcaccaagtgcaacaccctgttcgtggtggacgtgcagaccagccagatcaccaagatccccatcctgaaggacagagagcccggcggcgtgacccagcagggctgcggcatccacgccatcgagctgaaccccagcagaaccctgctggccaccggcggcgacaaccccaacagcctggccatctacagactgcccaccctggaccccgtgtgcgtgggcgacgacggccacaaggactggatcttcagcatcgcctggatcagcgacaccatggccgtgagcggcagcagagacggcagcatgggcctgtgggaggtgaccgacgacgtgctgaccaagagcgacgccagacacaacgtgagcagagtgcccgtgtacgcccacatcacccacaaggccctgaaggacatccccaaggaggacaccaaccccgacaactgcaaggtgagagccctggccttcaacaacaagaacaaggagctgggcgccgtgagcctggacggctacttccacctgtggaaggccgagaacaccctgagcaagctgctgagcaccaagctgccctactgcagagagaacgtgtgcctggcctacggcagcgagtggagcgtgtacgccgtgggcagccaggcccacgtgagcttcctggaccccagacagcccagctacaacgtgaagagcgtgtgcagcagagagagaggcagcggcatcagaagcgtgagcttctacgagcacatcatcaccgtgggcaccggccagggcagcctgctgttctacgacatcagagcccagagattcctggaggagagactgagcgcctgctacggcagcaagcccagactggccggcgagaacctgaagctgaccaccggcaagggctggctgaaccacgacgagacctggagaaactacttcagcgacatcgacttcttccccaacgccgtgtacacccactgctacgacagcagcggcaccaagctgttcgtggccggcggccccctgcccagcggcctgcacggcaactacgccggcctgtggagctag

SEQ ID NO: 186409 - DNA, 684 bp, Artificial Sequence
  derived and/or modified sequence
atggagccccagggctaccccgccttcggctgggaccacagcctgcacaagagaaagagactgccccccgtgaagagaagcctggtgtactacctgaagaacagagaggtgagactgcagaacgagaccagctacagcagagtgctgcacggctacgccgcccagcagctgcccagcctgctgaaggagagagagttccacctgggcaccctgaacaaggtgttcgccagccagtggctgaaccacagacaggtggtgtgcggcaccaagtgcaacaccctgttcgtggtggacgtgcagaccagccagatcaccaagatccccatcctgaaggacagagagcccggcggcgtgacccagcagggctgcggcatccacgccatcgagctgaaccccagcagaaccctgctggccaccggcggcgacaaccccaacagcctggccatctacagactgcccaccctggaccccgtgtgcgtgggcgacgacggccacaaggactggatcttcagcatcgcctggatcagcgacaccatggccgtgagcggcagcagagacggcagcatgggcctgtgggaggtgaccgacgacgtgctgaccaagagcgacgccagacacaacgtgagcagagtgcccgtgtacgcccacatcacccacaaggccctgaaggacatccccaagtag

SEQ ID NO: 186410 - DNA, 1362 bp, Artificial Sequence
  derived and/or modified sequence
atggcacgcaaagtcgtatctaggaaaaggaaggcacccgcgtctcctggtgcaggcagcgatgcccaaggccctcagttcgggtgggatcacagcctccataagcgaaaaaggctaccccctgttaaaagatccctggtatactacctcaagaatagggaggtgcggctgcagaatgaaacgtcctactctagggtgttgcacgggtacgcagcgcagcagttaccctcacttttaaaggaacgggagttccatctgggcaccctgaacaaagtctttgcatcacagtggctgaaccatcggcaggtggtgtgtggaaccaagtgcaacacgttgttcgtggtcgacgtgcagacctcacagattactaagatcccgattctaaaggacagagagcccggaggcgtcacgcaacaagggtgtgggattcacgcgatagagctcaacccttcccgtacccttctggctaccggaggagataaccctaattctcttgcaatttatagactgcctacactcgatccagtgtgtgtgggagacgatggccataaagactggatctttagtatcgcttggatcagcgatactatggctgtgagcggttcgcgcgatggctccatgggactctgggaagttactgatgatgtgctcacgaagagtgatgctaggcataatgtctctagggtgccagtgtatgcccatattacacacaaagccctgaaggacatacctaaagaggacacaaatcccgataactgtaaggtccgggccctcgcgttcaacaacaaaaacaaagagctaggcgctgttagccttgacggatatttccacctgtggaaggccgagaacactctatccaaattgctatctacaaagcttccttactgtcgagagaacgtgtgcctggcctatggctctgagtggagtgtgtatgccgtgggctctcaggctcacgtgtcgttcctggatccaaggcagccaagctataatgtgaagagtgtatgttctcgtgaacgaggcagcggaatcagatccgtgtccttctatgaacacattatcacagtggggaccggtcagggatccctcttgttttacgacatccgcgcccagagatttttggaggaacggctctctgcttgttacgggagcaagcccaggttagccggcgaaaatcttaagttaaccactggcaaagggtggcttaaccatgatgagacttggaggaattactttagcgatatcgattttttccctaacgccgtgtatacgcactgctatgatagctcaggaaccaagctgttcgttgccggaggtcccctgcccagcggcttgcacggcaactatgctggattgtggagctag

SEQ ID NO: 186411 - DNA, 3530 bp, Artificial Sequence
  derived and/or modified sequence
tttccgtggcgacgctatccgaagtgcggctgcgcaagggtgacggcgcgcgagcaagggggagggggtgttttggttctagccgctcgccgtccttgcaggctctgccgtcggaaagccgctcattctcgcttccccttccctttcccggctcaagtccttcctctctctttcctttctttccgcctatcttttttctgctgccgctccgggtccgggccattttccgggccgggcgcactaaggtgcgcggccccggggcccagtatatgacccgccgtcctgctatccttcgcttcccccgccccatgtggctgcggggccgcggcggcgctgcccactatggcccggaaagtagttagcaggaagcggaaagcgcccgcctcgccgggagctgggagcgacgctcagggcccgcagtttggctgggatcactcgcttcacaaaaggaaaagacttcctcctgtgaagagatccttagtatactacttgaagaaccgggaagtcaggctacagaatgaaaccagctactctcgagtgttgcatggttatgcagcacagcaacttcccagtctcctgaaggagagagagtttcaccttgggacccttaataaagtgtttgcatctcagtggttgaatcataggcaagtggtgtgtggcacaaaatgcaacacgctatttgtcgtagatgtccagacaagccagatcaccaagatccccattctgaaagaccgggagcctggaggtgtgacccagcagggctgtggtatccatgccatcgagctgaatccttctagaacactgctagccactggaggagacaaccccaacagtcttgccatctatcgactacctacgctggatcctgtgtgtgtaggagatgatggacacaaggactggatcttttccatcgcatggatcagcgacactatggcagtgtctggctcacgtgatggttctatgggactctgggaggtgacagatgatgttttgaccaaaagtgatgcgagacacaatgtgtcacgggtccctgtgtatgcacacatcactcacaaggccttaaaggacatccccaaagaagacacaaaccctgacaactgcaaggttcgggctctggccttcaacaacaagaacaaggaactgggagcagtgtctctggatggctactttcatctctggaaggctgaaaatacactatctaagctcctctccaccaaactgccatattgccgtgagaatgtgtgtctggcttatggtagtgaatggtcagtttatgcagtgggctcccaagctcatgtctccttcttggatccacggcagccatcatacaacgtcaagtctgtctgttccagggagcgaggcagtggaatccggtcagtgagtttctacgagcacatcatcactgtgggaacagggcagggctccctgctgttctatgacatccgagctcagagatttctggaagagaggctctcagcttgttatgggtccaagcccagactagcaggggagaatctgaaactaaccactggcaaaggctggctgaatcatgatgaaacctggaggaattacttttcagacattgacttcttccccaatgctgtttacacccactgctacgactcgtctggaacgaaactctttgtggcaggaggtcccctcccttcagggctccatggaaactatgctgggctctggagttaatgacaactccccaaatgcagagatttacactaacttccattctcagtttccttgtttcttttgattttttttttcctaattgtgtgaggctcttgtgttttagtgggaacaccaaagtttgcctatagtttaggcacttaataggaagaagctctgtacagaaatctgaaagttgttttgctttttgttttcccctttggtaatcaaaattttactatcttttattatttctggcttttcaaccaaacattgttgctaatccctatttttctttaagtgacacacattctcctgtctctggcttcttcaggctgaaatgacatagctcacccttacttcactcttgagaggtagggctcctttataattacatggttgctctcagactttctgtgaaagtttgggagctgtgtgtgtctgtgtgtgtgtgagagagagatcttgtctgcgtgtgtgtgtgtgatcttgtgtgcctgtaggtactgtgtgtcactgaaattacctggagtgaggattacttgtaattaaaatatttataaaagaaacaactttattcacagagtccagctttgggactagtctgtatcttgttttttaagtctaacaacactgataataggaagtaaaaacagaaaggaaaagaaattaccactgggaaaatctttttagttagattgtaggcttcctggggcctcccatgccaggactgcaaagtgatccagccctacctgtcttcccacctgtgtgtcccccgtgtgggaagttggtgtcacttccccttcccaccctcacatctgcttagccagtagccacacccctaaaacatcagactcaccatccaggtgcagctccagaggctacaaaaggcttcatgggacttgaatccccatcctagcttctctctccttcccctcaagacctgatctggttttaaggggcctggagctgggagtctcaagtctgctaagattcacatccatagcccccatggctttgaggagaatcctctctgccattcttccaatctccccagtgggttttgctattattttctaaattgggttaagtctaagaaggtgggggtgagcagggggtttatctgtgtgtagtgagtgcttcatgtgtggaatattcattttcttactgcagtgggacttggggttgaagccacccctcctactctgttggcttagccctgagatggtgacaggctggcctgcagtcagcatcattgtgcatgtgacagcatcaatgtgattagtaatttgtctgttcctcccttgaactgtctgtttagtctgaggtttttaaacttgcaggcagctgactgtgatgtccacttgttccctgatttttacacatcatgtcaaagataacagctgttcccacccaccagttcctctaagcacatactctgcttttctgtcaacatcccattttggggaaaggaaaagtcatatttattcctgcaccccagttttttaacttgttctcccagttgtccccctcttctctgggtgtaagaagggaaattggaaaaaaaattatatatatattctccttttaatggtggggggctactggagaggagagacagcaagtccaccctaacttgttacacagcacataccacaggttctggaattctcatcttcgaacctagagaaataggtgctataaacagggaattaagcaaaatgctggatgctatagatcttttaattgtcttaattttttttctattattaaactacaggctgtagatttcttagttctcacagaacttctatcattttaaactgacttgtatatttaaaaaaaaaatc

SEQ ID NO: 186412 - DNA, 684 bp, Artificial Sequence
  derived and/or modified sequence
atggagccccaagggtatcctgcctttgggtgggatcacagcctgcacaagagaaagagactaccaccggttaaaaggtccctggtctattacctgaagaatagggaggtacggttgcagaatgagacctcgtacagcagagtgctgcacggctacgcagcgcaacagctgccatctttgctgaaagagagagagttccacctggggactctgaataaggttttcgcaagccagtggctgaatcacagacaagtagtgtgcggcactaagtgcaacacgttattcgtggtggacgttcagacatcccagataaccaagattccaattttaaaggatcgggagccggggggtgtgacacaacaggggtgtggcatacatgctatagagctaaatcccagcaggaccctactcgcgactggtggggacaatccaaactccctggcaatctaccggctgccaacattggatcccgtgtgtgtaggggacgacggccataaagactggattttcagtattgcctggatatccgacaccatggcagtctctggaagccgggatgggagcatgggcttatgggaagtcaccgacgatgttctgactaaatcagatgctagacataatgtatccagggtccccgtttacgctcatatcacacacaaggctctgaaggatatacctaagtag

SEQ ID NO: 186413 - DNA, 1362 bp, Artificial Sequence
  derived and/or modified sequence
atggccaggaaggtggtgtccaggaagaggaaggccccagccagccctggggccggcagtgatgcccagggcccccagtttggctgggaccacagcctgcacaagaggaagaggctgccccctgtgaagaggagcctggtgtactacctgaagaaccgggaggtgcggctgcagaatgagaccagctacagccgggtgctgcacggctatgctgcccagcagctgcccagcctgctgaaggagcgggagttccacctgggcaccctgaacaaggtgtttgccagccagtggctgaaccaccggcaggtggtgtgtggcaccaagtgcaacaccctgtttgtggtggatgtgcagaccagccagatcaccaagatccccatcctgaaggaccgggagcctggaggagtgacccagcagggctgcggcatccacgccatcgagctgaaccccagcaggaccctgctggccactggaggagacaaccccaacagcctggccatctaccgcctgcccaccctggaccctgtgtgtgtgggagatgatggccacaaggactggatcttcagcatcgcctggatcagtgacaccatggctgtgtctggcagcagagatggctccatgggcctgtgggaggtgacagatgatgtgctgaccaagagtgatgcccggcacaacgtgtcccgggtgcctgtgtatgcccacatcacccacaaggccctgaaggacatccccaaggaggacaccaacccagacaactgcaaggtgcgggccctggccttcaacaacaagaacaaggagctgggcgctgtgtccctggatggctacttccacctgtggaaggccgagaacaccctgagcaagctgctgagcaccaagctgccctactgccgggagaatgtgtgcctggcctacggcagcgagtggagcgtgtatgctgtgggcagccaggcccacgtgtccttcctggacccccggcagcccagctacaacgtgaagtctgtgtgcagccgggagcggggcagcggcatccgctctgtgtccttctatgagcacatcatcaccgtgggcaccggccagggcagcctgctcttctatgacatccgggcccagcgcttcctggaggagcggctgagcgcctgctacggcagcaagccccggctggccggggagaacctgaagctgaccaccgggaagggctggctgaaccatgatgagacctggaggaactacttcagtgacatcgacttcttccccaatgctgtgtacacccactgctatgacagcagcggcaccaagctgtttgtggccggcggccccctgcccagcggcctgcacggcaactatgccggcctgtggagctag

SEQ ID NO: 186414 - DNA, 684 bp, Artificial Sequence
  derived and/or modified sequence
atggagccccagggctacccagccttcggctgggaccacagcctgcacaagaggaagaggctgccccctgtgaagaggagcctggtgtactacctgaagaaccgggaggtgcggctgcagaatgagaccagctacagccgggtgctgcacggctatgctgcccagcagctgcccagcctgctgaaggagcgggagttccacctgggcaccctgaacaaggtgtttgccagccagtggctgaaccaccggcaggtggtgtgtggcaccaagtgcaacaccctgtttgtggtggatgtgcagaccagccagatcaccaagatccccatcctgaaggaccgggagcctggaggagtgacccagcagggctgcggcatccacgccatcgagctgaaccccagcaggaccctgctggccactggaggagacaaccccaacagcctggccatctaccgcctgcccaccctggaccctgtgtgtgtgggagatgatggccacaaggactggatcttcagcatcgcctggatcagtgacaccatggctgtgtctggcagcagagatggctccatgggcctgtgggaggtgacagatgatgtgctgaccaagagtgatgcccggcacaacgtgtcccgggtgcctgtgtatgcccacatcacccacaaggccctgaaggacatccccaagtag

SEQ ID NO: 186415 - DNA, 1362 bp, Artificial Sequence
  derived and/or modified sequence
atggcccggaaggtggtgagccggaagcggaaggcccccgccagcccaggagccgggagtgacgcccagggcccacagttcgggtgggatcactcgttgcataagcgcaaacgtctgccccccgtgaaaagatcgcttgtctattacctgaaaaacagggaggtccgattacaaaacgagacttcctactcacgcgtgctgcacggatacgcggcacagcagctcccatcactcctcaaggagcgagaattccacctcggcaccctgaataaggttttcgctagtcagtggttaaaccatcgacaagtagtgtgtggaaccaagtgtaacaccctgtttgtggtcgacgtgcagactagccaaatcaccaagatccctattctgaaggatagggagcctggcggagtcactcagcagggctgcggaatacatgcgatcgagctcaatccaagccgtacactgctggctacaggcggcgataatcctaactcactggccatctaccgactccccaccttagatcccgtatgcgtgggcgacgacggacacaaagattggatttttagtatcgcgtggatttccgacactatggcagtttctggttcgcgggacggctccatgggcctatgggaggtcaccgatgatgtgctgactaagagcgatgcaaggcataatgtctcacgggtgcctgtctacgctcatatcacccacaaggcactgaaagatataccgaaagaagacaccaaccctgacaactgtaaagtgcgagctttggccttcaacaacaagaataaggagctgggagctgtatccctcgatgggtattttcatctctggaaggcagagaatacacttagcaagctgctctctactaaattgccatattgtcgcgaaaacgtctgcttggcatatggtagtgagtggagcgtgtatgctgtaggcagtcaggcccatgtgtccttcctggatcccaggcagcctagctataatgtgaagtccgtatgctcccgtgagcggggctccggaattagaagcgtctcattctacgagcatattattaccgtcggcacaggccaggggtctctattattttacgacattagggcccagagattcctggaagagaggctgtccgcttgttacggaagcaaacccaggctcgcaggcgagaacctgaagctgacaaccggcaagggctggctaaatcacgatgaaacctggaggaactatttctcagatatcgactttttccccaatgccgtttatacccactgctacgatagctctggaaccaagctttttgttgcggggggacccctaccctcgggactgcacggtaactatgcgggcttgtggagctag

SEQ ID NO: 186416 - DNA, 803 bp, Artificial Sequence
  derived and/or modified sequence
tggaaatctaaagggaatggtgaagttgcaccgtaaggggaaggtgactgaggagctgaaactgactgaggggctgaagcatttcggacaggagaaaggatcaggaggagacagagcggagaatggagcctcagggctacccagcgtttggctgggatcactcgcttcacaaaaggaaaagacttcctcctgtgaagagatccttagtatactacttgaagaaccgggaagtcaggctacagaatgaaaccagctactctcgagtgttgcatggttatgcagcacagcaacttcccagtctcctgaaggagagagagtttcaccttgggacccttaataaagtgtttgcatctcagtggttgaatcataggcaagtggtgtgtggcacaaaatgcaacacgctatttgtcgtagatgtccagacaagccagatcaccaagatccccattctgaaagaccgggagcctggaggtgtgacccagcagggctgtggtatccatgccatcgagctgaatccttctagaacactgctagccactggaggagacaaccccaacagtcttgccatctatcgactacctacgctggatcctgtgtgtgtaggagatgatggacacaaggactggatcttttccatcgcatggatcagcgacactatggcagtgtctggctcacgtgatggttctatgggactctgggaggtgacagatgatgttttgaccaaaagtgatgcgagacacaatgtgtcacgggtccctgtgtatgcacacatcactcacaaggccttaaaggacatccccaaa

SEQ ID NO: 186417 - DNA, 684 bp, Artificial Sequence
  derived and/or modified sequence
atggagccccagggctaccccgccttcggctgggaccacagcctgcataaacgaaagcgtctgcctcctgtgaagagatcactggtctattacttaaagaatagagaagttaggcttcaaaacgaaacgtcctactcaagagtgctgcacggatatgctgctcagcagcttccttccctcttgaaggaacgcgagtttcacctagggaccctgaataaagtatttgcctctcagtggttgaatcacaggcaggttgtgtgtggtacaaagtgcaatacgctctttgtggtcgatgtgcagaccagtcagatcacaaagattccgattctgaaagatcgagaaccaggcggggtgacccagcagggatgtgggatccatgccattgagctgaatccgagccggacactattggctactggcggggacaaccctaatagtttggcgatttaccggttacccacattggacccggtctgcgtgggggacgacgggcataaggactggatcttctcaattgcatggatcagcgacaccatggctgtatctggttcccgagatggaagcatggggttatgggaggtcacagatgatgtgctcacaaagtcagatgcccgacataatgtgtctcgggtgccagtctatgcccacattacccacaaggccctgaaagacattcctaagtag

SEQ ID NO: 186418 - DNA, 1362 bp, Artificial Sequence
  derived and/or modified sequence
atggccaggaaagttgtgagtaggaaacgtaaggcaccagcatcccctggcgcaggatctgacgcccagggcccacaattcggctgggaccatagcctccataagaggaagcgtctacctccggttaaaaggtcccttgtgtattacctgaagaacagggaggtccgcctgcaaaatgaaacgtcatattcccgcgtgctgcacggctacgcagcccagcagttgccttctcttttgaaagagagggaattccacttgggcaccctcaacaaggtgtttgcttcgcagtggttaaaccacaggcaggtagtatgtggcaccaagtgtaacaccctttttgtggtggacgtgcaaacatcgcagataacgaagattccaatcctgaaagatcgagagcccggaggcgttacacagcagggatgcgggatccacgcaattgagctgaacccaagccggaccttgctggcaacaggcggtgataatcccaacagcctggctatctatcgacttcccactctggatcctgtgtgcgtgggggatgacggacacaaggattggatcttcagcatcgcttggattagtgacaccatggctgtctccggctctagagacggaagcatgggcctctgggaggttacagatgatgtcctcactaaatctgatgctcggcacaacgtgagccgggtgccggtgtacgcccacattactcacaaagctctcaaggacattccgaaagaagatacgaaccctgacaattgtaaggtgcgtgccctcgctttcaacaataagaacaaagagctcggagccgtgagcctggacggatacttccacctgtggaaggctgagaacacattgtcaaaactgctctccacaaagctgccttactgcagagagaatgtgtgtctcgcctacggcagcgaatggtccgtgtacgcagtcggttcccaggcccatgtcagcttcctggacccacggcagccctcgtacaacgtaaagtctgtctgctcccgagaacggggtagcgggatcaggtcggtgagcttctacgagcacattattacagtaggaacgggccagggatccctgctgttttacgatatccgagcccagcgattccttgaggaaagattgtctgcctgttacggctccaagccacgtctggccggtgaaaatttaaagctgaccacggggaaggggtggctaaatcatgatgagacttggcgcaattacttctccgacatcgactttttcccaaatgcggtttatactcattgttatgatagctctggaactaagctttttgtcgccggaggcccattgccgtccgggctgcacggaaattatgctgggctatggtcctag

SEQ ID NO: 186419 - DNA, 684 bp, Artificial Sequence
  derived and/or modified sequence
atggaacctcagggatacccagccttcggttgggaccactccctccacaagaggaagaggttgcctccagtcaagcgctctctggtgtattatctgaaaaaccgggaggttcgacttcaaaatgaaactagttacagtagagttctacacggctacgcggctcaacagttgccgtcactgttgaaggagcgagagttccatttgggaactttgaacaaggtgtttgcctctcaatggctgaaccaccggcaggttgtctgtggcacaaagtgtaacaccttattcgtcgtagatgtgcagacaagtcaaatcaccaagatcccaatactaaaggatcgggaaccaggtggggtgacccagcaggggtgcggaatccacgccatcgagcttaatccatccaggacactgctcgctaccggtggcgacaaccctaattcattggcgatttatcgccttcctactcttgatcctgtctgcgtgggtgacgatggacacaaggattggattttcagcattgcgtggatctccgatactatggccgttagcgggagccgtgacgggtccatgggcctgtgggaggttactgacgacgttttgaccaagtcagacgccagacataatgtcagcagggttcccgtatatgcccacataactcacaaagctctcaaggacattcctaagtag

SEQ ID NO: 186420 - protein, 482 aa, Artificial Sequence
  derived and/or modified sequence
MLFEGKVNPQTQSLLAECGEWTRRSLHLRVLGRQLILPTDKGVQHFQGSTPASAVHRPPLSACGHSSNIRELCISGSQIVPAALSASALPGPDDTGVADLTARSSLEEEVYHVDGKIEEYFAFDRKEDDDECLEQKPAQPGRKWRKLGLPPVSPRDCVKDAVAAEVFDHVWTNMVELLEELIRKHWETTLTEGKKQRETLKVAGNRFPHVLVPHAHADGASGPPSGHAEAHGISLASRLNPPQIHHFSSSFYSDMNGVMTIQAKPLQRRPAYFADRTQNEKEDKASGGGAGALSSAPHRLGRASDTHGLSPSAKKTPVPWRLPSLASDSQRLKTPNIYSDEVLRGTKLPTGVDHMASPLVQTSRSRFPPLVTETRGQNTAVPGCRLVSYRGRHLQNRVLSAMPDGTERSRLRERTATLERLSRPSTTHTFRQSDTPRKSSLTQMEFAAHTWTGQSILTGSQYVPKSFQRTTLTFKRRFQVTS

SEQ ID NO: 186421 - protein, 773 aa, Artificial Sequence
  derived and/or modified sequence
MKAAVLDLGSLLAKLFETSTAPPAGPSSRPSGGAAAAGSGGSRAGTPLGTAPTLLRALAPDSPSASRRSPAPLLSSPYSRGSAASRAAGAVGTLLSWPSSPRAGKAPPQPPTPSGGGCSPARLVVPARPPSGPGGVWAALPRNPLQPGPGERELGACVAPGAGPRTLFLTLPDIGEEGASDGDSGDGEARGLSEGRRRHGFTVRSKDSLPTHFTRNVQKAIDKYTCKSLSSFSSSGSHTPTGAHTSWSGSATQSSTTGSSTERGSVYSWRDDEFDEASSQSVQRLLWEVEEMLFEGKVNPQTQSLLAECGEWTRRSLHLRVLGRQLILPTDKGVQHFQGSTPASAVHRPPLSACGHSSNIRELCISGSQIVPAALSASALPGPDDTGVADLTARSSLEEEVYHVDGKIEEYFAFDRKEDDDECLEQKPAQPGRKWRKLGLPPVSPRDCVKDAVAAEVFDHVWTNMVELLEELIRKHWETTLTEGKKQRETLKVAGNRFPHVLVPHAHADGASGPPSGHAEAHGISLASRLNPPQIHHFSSSFYSDMNGVMTIQAKPLQRRPAYFADRTQNEKEDKASGGGAGALSSAPHRLGRASDTHGLSPSAKKTPVPWRLPSLASDSQRLKTPNIYSDEVLRGTKLPTGVDHMASPLVQTSRSRFPPLVTETRGQNTAVPGCRLVSYRGRHLQNRVLSAMPDGTERSRLRERTATLERLSRPSTTHTFRQSDTPRKSSLTQMEFAAHTWTGQSILTGSQYVPKSFQRTTLTFKRRFQVTS

SEQ ID NO: 186422 - protein, 61 aa, Artificial Sequence
  derived and/or modified sequence
MLFEGKVNPQTQSLLAECGEWTRRSLHLRVLGRQLILPTDKGVQHFQGSTPASAVHRPPLS

SEQ ID NO: 186423 - DNA, 1449 bp, Artificial Sequence
  derived and/or modified sequence
atgctgttcgagggaaaggtcaacccacaaacgcagagcctcctcgccgagtgtggagagtggacaaggaggagcttgcacctgcgcgtgctgggccgccagctcatccttcccacagacaaaggcgttcagcatttccagggcagcacccccgcgagcgcagttcataggccaccactgtcggcctgtggccactcaagcaatatccgagagctatgcatttctggcagccagattgtgcctgcagctcttagtgctagcgcactgcctgggcccgatgacacgggggttgccgatttgaccgctaggagttccctcgaagaggaggtgtaccatgtggatggaaagatagaggagtatttcgccttcgatcgaaaagaagacgatgatgaatgtctcgaacagaaacccgcgcagccaggccgtaagtggaggaagctaggcttgccacctgttagccccagagattgtgtgaaggatgccgtggctgctgaagtgtttgaccatgtatggaccaatatggttgagcttcttgaagagttgatccgtaaacattgggagacaaccctgacagagggcaagaaacagagagagacactgaaagtcgcaggtaacagatttccgcacgtgctcgtcccccacgcccacgcagatggggcaagtggccctccttcagggcatgcagaagcacacggaatctctctcgcctctagactcaaccctccccaaattcaccacttctccagctctttttatagtgatatgaacggagtgatgacaatccaggccaaaccgttgcagcggcgtccagcctacttcgccgatcgcacacagaacgaaaaagaagataaggctagcggtgggggagctggcgctctctcctctgcgcctcatcgactgggtagagcctctgacacacacggcctcagtccatccgccaaaaaaactccggttccatggcggctccccagcttggcgagcgactcccagcggcttaaaacacccaacatttacagcgacgaagtcctccggggcacaaaattacctactggggtggaccatatggccagtcccctcgtgcaaacctcaaggtcccgttttccacccctcgttacagaaacacgcggccagaatacagccgtacccggatgtcgtctggttagttaccggggccggcacctccagaaccgtgttctttcagctatgccggatggaacagaaaggtcccgtctcagggagaggaccgcaacactcgagcgactgtcacgtcccagtacaactcatacatttagacagagcgacactccccggaagtcatcactaacccagatggagttcgccgctcacacctggacagggcaaagtatcctcactgggtctcagtatgtgccaaaatccttccagaggacgaccctcacgtttaaaaggcgctttcaagtaaccagctag

SEQ ID NO: 186424 - DNA, 1449 bp, Artificial Sequence
  derived and/or modified sequence
atgctgtttgagggcaaggtgaacccccagacccagagcctgctggctgaatgtggggagtggaccaggaggagcctgcacctgcgggtgctgggccggcagctgatcctgcccacagacaagggcgtgcagcacttccagggcagcaccccagccagcgctgtgcaccggccccccctgagcgcctgtggccacagcagcaacatccgggagctgtgcatcagcggcagccagatcgtgcctgctgccctgagcgccagcgccctgcccggcccagatgacacaggagtggccgacctgacagcccggagcagcctggaggaggaggtgtaccacgtggatggcaagattgaggagtactttgcctttgacagaaaagaagatgatgatgaatgtctggagcagaagccagcccagcccggcaggaagtggaggaagctgggcctgccccctgtgagcccccgggactgtgtgaaggatgctgtggccgctgaggtgtttgaccacgtgtggaccaacatggtggagctgctggaggagctgatcaggaagcactgggagaccaccctgacagagggcaagaagcagcgggagaccctgaaggtggccggcaaccgcttcccccacgtgctggtgccccacgcccatgctgatggagccagcggccccccatctggccacgccgaggcccacggcatcagcctggccagccggctgaaccccccccagatccaccacttcagcagcagcttctacagcgacatgaatggagtgatgaccatccaggccaagcccctgcagaggaggcctgcctactttgctgacaggacccagaatgagaaggaggacaaggccagcggcggcggggccggggccctgagcagcgccccccaccggctgggccgggccagtgacacccacggcctgagccccagcgccaagaagacccctgtgccctggaggctgcccagcctggccagtgacagccagaggctgaagacccccaacatctacagtgatgaggtgctgcggggcaccaagctgcccaccggggtggaccacatggccagccccctggtgcagaccagccgcagccgcttcccccccctggtgacagagacccggggccagaacacagctgtgcccggctgccgcctggtgtcctaccggggccgccacctgcagaacagagtgctgagcgccatgccagatggaacagagaggagccggctgcgggagaggacagccaccctggagcggctgagccggcccagcaccacccacaccttccggcagagcgacacccccaggaagagcagcctgacccagatggagtttgctgcccacacctggacaggccagagcatcctgaccggcagccagtatgtgcccaagagcttccagaggaccaccctgaccttcaagaggcgcttccaggtgaccagctag

SEQ ID NO: 186425 - DNA, 1449 bp, Artificial Sequence
  derived and/or modified sequence
atgctgttcgagggcaaggtgaacccccagacccagagcctgctggcagaatgtggcgagtggacccggcgaagcctacacctgcgggtgctcggtcgccagttaatacttccaacagataaaggcgtccagcacttccaaggtagtacaccagctagtgctgtgcacaggcctccgttaagtgcctgtggacacagcagtaacatccgagagttgtgcatttcagggagccagattgtgcctgccgcactgtcggcctccgccttacccggtccagatgacactggtgtagccgaccttactgcccgcagcagtttggaggaggaagtataccatgtagacggcaagatcgaggagtatttcgcatttgacaggaaagaagatgatgacgagtgcttggagcagaaacctgctcagcccggcaggaaatggaggaagctgggcctgccaccagtatccccgagagactgtgtcaaggacgccgtcgccgccgaggtgtttgatcacgtatggaccaacatggtagaattactggaagagttgatcaggaaacactgggaaaccaccctcacggaaggaaaaaaacagcgcgagactttgaaggtggccggcaacagatttcctcacgtgcttgtgccgcacgcccatgctgatggggcaagcggaccacccagcggccatgctgaagcccacggcatttctttggcctcccgcctcaaccctccacaaattcatcacttctcaagcagtttctatagtgacatgaacggcgtcatgaccattcaagcaaagcctctacagagaagacctgcatattttgctgaccgaacccagaacgaaaaagaggacaaggccagcggtggaggtgccggtgctctgtccagcgccccccaccgcctgggcagagctagtgacactcacgggctgtccccctccgccaaaaagacgcccgtgccgtggcgactgccaagtctggccagcgactctcagcgccttaagacccctaacatttatagtgacgaggtgctaaggggcacaaaacttcccaccggcgttgatcatatggccagcccacttgtgcaaacctctagatctcgatttcctccacttgttaccgagacaagaggtcagaataccgctgttccaggatgtcggctcgtgtcatacagagggagacacttacagaatcgcgttttgagtgccatgccagacggtacagagcgttccagacttagagaacgcactgcaaccctggagagactgtctagaccctccacgactcacacatttaggcaatcagacacaccccgtaagagctccctaactcaaatggaatttgctgcccacacgtggacaggccagagtattctcaccggctcccagtatgtacctaagagttttcagcgtacaactttgacattcaaacgacgattccaggtcacctcctag

SEQ ID NO: 186426 - DNA, 1449 bp, Artificial Sequence
  derived and/or modified sequence
atgctcttcgaaggtaaagtgaatccacagactcagagcctgcttgccgaatgtggcgagtggacgagacgatccctacatttaagagtgctgggtagacagcttattctcccaactgataagggggtgcaacactttcaggggagcacgccggcatctgccgtgcatcggcctcctctgtctgcctgtggccactcaagtaacattcgggagctttgcatctcaggtagccagattgtgccagctgctcttagtgcctctgctctgccgggtcctgacgacacaggcgttgcagatctgactgcacggtctagcttggaagaagaggtataccatgttgatgggaagatcgaggagtattttgcctttgatcgtaaagaggatgatgatgagtgcttggagcagaagcccgcacagccgggacggaagtggaggaaactgggtctccctccagtgagtccacgcgattgtgtgaaagatgccgttgctgctgaagtgtttgaccacgtgtggaccaatatggtagagctattggaggagctgataaggaagcactgggaaaccactttaaccgagggaaagaaacagagggaaacactgaaagttgctggcaataggttccctcatgtcctggttccgcacgctcacgcggacggcgcatcaggccctccgtcaggccatgccgaggctcacggcattagcctcgcaagcagattaaaccctccccaaatccaccacttctcaagctcattttactcagacatgaatggggtgatgacaattcaagctaaacctctgcagcgccgacctgcatatttcgctgacagaactcagaacgagaaagaggacaaagcttcggggggaggcgctggcgcactgagctctgcgccacatagacttgggagagcaagtgatacccacggactcagcccctctgcaaaaaagacaccggtaccttggcgtctccccagccttgctagtgacagtcagagactaaaaacgcctaatatttactcagacgaagtgctgaggggaacgaagctgcctactggcgtagaccacatggcctccccactggtgcagacgagtcgaagtagattccctccgctggtaaccgagaccaggggtcaaaatacagctgtccctggttgtaggctggtgagttataggggccgtcatctccagaatcgcgtccttagcgcaatgcctgacggcacagaacggtccaggcttagagaaagaactgcaactttggagcggctgtcaagaccttcaaccacccatactttccgacagagtgacacgcccagaaagtccagtctcacccaaatggagtttgctgcccacacctggacgggccagtcaatcttgaccggaagccagtacgtgcccaagtcattccaaagaaccacactcaccttcaagcggaggttccaggtgaccagttag

SEQ ID NO: 186427 - DNA, 1449 bp, Artificial Sequence
  derived and/or modified sequence
atgctgttcgagggcaaggtgaacccccagacccagagcctgctggccgagtgcggcgagtggaccagaagaagcctgcacctgagagtgctgggcagacagctgatcctgcccaccgacaagggcgtgcagcacttccagggcagcacccccgccagcgccgtgcacagaccccccctgagcgcctgcggccacagcagcaacatcagagagctgtgcatcagcggcagccagatcgtgcccgccgccctgagcgccagcgccctgcccggccccgacgacaccggcgtggccgacctgaccgccagaagcagcctggaggaggaggtgtaccacgtggacggcaagatcgaggagtacttcgccttcgacagaaaggaggacgacgacgagtgcctggagcagaagcccgcccagcccggcagaaagtggagaaagctgggcctgccccccgtgagccccagagactgcgtgaaggacgccgtggccgccgaggtgttcgaccacgtgtggaccaacatggtggagctgctggaggagctgatcagaaagcactgggagaccaccctgaccgagggcaagaagcagagagagaccctgaaggtggccggcaacagattcccccacgtgctggtgccccacgcccacgccgacggcgccagcggcccccccagcggccacgccgaggcccacggcatcagcctggccagcagactgaaccccccccagatccaccacttcagcagcagcttctacagcgacatgaacggcgtgatgaccatccaggccaagcccctgcagagaagacccgcctacttcgccgacagaacccagaacgagaaggaggacaaggccagcggcggcggcgccggcgccctgagcagcgccccccacagactgggcagagccagcgacacccacggcctgagccccagcgccaagaagacccccgtgccctggagactgcccagcctggccagcgacagccagagactgaagacccccaacatctacagcgacgaggtgctgagaggcaccaagctgcccaccggcgtggaccacatggccagccccctggtgcagaccagcagaagcagattcccccccctggtgaccgagaccagaggccagaacaccgccgtgcccggctgcagactggtgagctacagaggcagacacctgcagaacagagtgctgagcgccatgcccgacggcaccgagagaagcagactgagagagagaaccgccaccctggagagactgagcagacccagcaccacccacaccttcagacagagcgacacccccagaaagagcagcctgacccagatggagttcgccgcccacacctggaccggccagagcatcctgaccggcagccagtacgtgcccaagagcttccagagaaccaccctgaccttcaagagaagattccaggtgaccagctag

SEQ ID NO: 186428 - DNA, 2322 bp, Artificial Sequence
  derived and/or modified sequence
atgaaggccgccgtgctggacctgggcagcctgctggccaagctgttcgagaccagcaccgccccccccgccggccccagcagcagacccagcggcggcgccgccgccgccggcagcggcggcagcagagccggcacccccctgggcaccgcccccaccctgctgagagccctggcccccgacagccccagcgccagcagaagaagccccgcccccctgctgagcagcccctacagcagaggcagcgccgccagcagagccgccggcgccgtgggcaccctgctgagctggcccagcagccccagagccggcaaggcccccccccagccccccacccccagcggcggcggctgcagccccgccagactggtggtgcccgccagaccccccagcggccccggcggcgtgtgggccgccctgcccagaaaccccctgcagcccggccccggcgagagagagctgggcgcctgcgtggcccccggcgccggccccagaaccctgttcctgaccctgcccgacatcggcgaggagggcgccagcgacggcgacagcggcgacggcgaggccagaggcctgagcgagggcagaagaagacacggcttcaccgtgagaagcaaggacagcctgcccacccacttcaccagaaacgtgcagaaggccatcgacaagtacacctgcaagagcctgagcagcttcagcagcagcggcagccacacccccaccggcgcccacaccagctggagcggcagcgccacccagagcagcaccaccggcagcagcaccgagagaggcagcgtgtacagctggagagacgacgagttcgacgaggccagcagccagagcgtgcagagactgctgtgggaggtggaggagatgctgttcgagggcaaggtgaacccccagacccagagcctgctggccgagtgcggcgagtggaccagaagaagcctgcacctgagagtgctgggcagacagctgatcctgcccaccgacaagggcgtgcagcacttccagggcagcacccccgccagcgccgtgcacagaccccccctgagcgcctgcggccacagcagcaacatcagagagctgtgcatcagcggcagccagatcgtgcccgccgccctgagcgccagcgccctgcccggccccgacgacaccggcgtggccgacctgaccgccagaagcagcctggaggaggaggtgtaccacgtggacggcaagatcgaggagtacttcgccttcgacagaaaggaggacgacgacgagtgcctggagcagaagcccgcccagcccggcagaaagtggagaaagctgggcctgccccccgtgagccccagagactgcgtgaaggacgccgtggccgccgaggtgttcgaccacgtgtggaccaacatggtggagctgctggaggagctgatcagaaagcactgggagaccaccctgaccgagggcaagaagcagagagagaccctgaaggtggccggcaacagattcccccacgtgctggtgccccacgcccacgccgacggcgccagcggcccccccagcggccacgccgaggcccacggcatcagcctggccagcagactgaaccccccccagatccaccacttcagcagcagcttctacagcgacatgaacggcgtgatgaccatccaggccaagcccctgcagagaagacccgcctacttcgccgacagaacccagaacgagaaggaggacaaggccagcggcggcggcgccggcgccctgagcagcgccccccacagactgggcagagccagcgacacccacggcctgagccccagcgccaagaagacccccgtgccctggagactgcccagcctggccagcgacagccagagactgaagacccccaacatctacagcgacgaggtgctgagaggcaccaagctgcccaccggcgtggaccacatggccagccccctggtgcagaccagcagaagcagattcccccccctggtgaccgagaccagaggccagaacaccgccgtgcccggctgcagactggtgagctacagaggcagacacctgcagaacagagtgctgagcgccatgcccgacggcaccgagagaagcagactgagagagagaaccgccaccctggagagactgagcagacccagcaccacccacaccttcagacagagcgacacccccagaaagagcagcctgacccagatggagttcgccgcccacacctggaccggccagagcatcctgaccggcagccagtacgtgcccaagagcttccagagaaccaccctgaccttcaagagaagattccaggtgaccagctag

SEQ ID NO: 186429 - DNA, 2322 bp, Artificial Sequence
  derived and/or modified sequence
atgaaggctgctgtgctagatctagggagcctgcttgccaagttgttcgaaacatctaccgccccaccagcgggcccgagctcccggccatccgggggcgctgctgctgccggaagtggaggctcgagggccggtacgccactgggaactgcgcccacattgttacgggccctcgcccctgactcgccctcagcttctcgcaggtctcctgctcccctccttagttccccatactctagaggttctgcggcttctagggctgccggtgcagtggggactctgttgtcatggccaagttcccctcgggccgggaaggcacccccacagcctccaacgccaagtggaggcgggtgtagtcctgcccgcctggtggtgcccgctcggccccccagcggaccaggcggcgtgtgggctgccctgccccggaacccccttcaaccaggacccggagaacgcgaactgggcgcttgcgtggcacccggcgcaggacctcgcacactcttcttgacactgccagacatcggcgaggagggtgcttccgacggggacagcggcgacggagaagcgaggggcctgtccgagggacgtcgtcgacacggcttcaccgtgcggtccaaagactccctgcctacacacttcaccagaaacgtgcagaaggcaattgataaatacacatgtaagtctcttagtagcttttcatccagtggctctcatactcctacaggggcacacaccagctggtcgggctccgctactcaatcctcaacaacggggtctagcaccgaacgaggaagcgtgtactcatggagagatgacgaatttgatgaggccagcagccaaagtgtgcagcggctcctctgggaggtggaggagatgctgttcgagggcaaggtgaatcctcaaacgcaaagtctcctagctgaatgtggcgaatggactcgcagaagcttacacctgagggttttaggaagacagctgattctgcctaccgacaagggggtgcagcacttccagggaagtacacccgctagtgccgtgcataggcctcctctctcagcatgtggtcacagcagtaacataagagagttatgcatctccggaagccagattgtcccagccgccttatccgcctctgcccttcctggcccagatgataccggcgtcgccgacctgacagccaggtctagccttgaagaggaggtatatcacgttgatggcaagattgaggagtacttcgccttcgatcggaaggaggatgacgatgagtgccttgaacagaaacctgcccagcccggtagaaagtggcgaaaattgggtcttccaccggtttcaccacgggactgcgttaaggatgctgtcgctgctgaagtgttcgaccatgtttggacaaatatggttgaattgctggaggagctgatacgaaaacactgggagactactcttaccgagggcaaaaagcagcgcgaaactctgaaagtcgctggtaatcgcttcccccatgttttggtgccacatgcgcacgccgacggcgcctccggaccaccttctggccacgctgaagctcatggcatctctctggctagtagacttaacccaccgcagattcatcatttctcttcatctttctactctgacatgaatggtgtgatgacaattcaggcaaaacctctgcagcgaagacccgcgtatttcgctgacagaacacagaacgagaaggaggacaaggcgtccggtggaggagccggagcattgagctcagcgccacaccggttggggagggcaagtgacacccatggcctgtctccaagcgcgaaaaagaccccagtgccatggcgactgccttctctagcttctgattcccaacggctcaagacccctaacatatatagcgatgaagtccttcgcggcactaaactgcccaccggcgtggaccacatggccagtcccctagtgcaaacttcaaggagtcggtttccacccttggtgactgagacacgagggcaaaataccgccgtccctggatgtcgactggtctcctacaggggccggcacctgcagaatagagtgctcagcgccatgccagatggcactgagaggagccgcctgagggaaaggaccgcgacgctcgaaaggctgtcccgcccaagcacaacgcacacattccgccagagtgacacacctcggaaatccagcctaacccagatggagtttgctgcccacacatggacagggcagtccatcctcaccggatcacagtacgtcccaaagtcgtttcagcgcaccacactgaccttcaagcgaaggttccaggtaactagctag

SEQ ID NO: 186430 - DNA, 1449 bp, Artificial Sequence
  derived and/or modified sequence
atgctgttcgagggaaaagtcaacccgcagacacaatctctgctggccgagtgcggggagtggactcgacgatccctgcacctgagagtgctcggtaggcagctgattctgcccaccgataaaggagtgcaacacttccagggaagcacgcccgcaagcgccgtacatcggcccccactgtccgcatgcggacactcttctaacatacgggagctatgcatttccggtagccaaattgtgcccgccgctctctccgccagcgccttgcccggtccagacgataccggggtcgccgatctgaccgcccgttcgtccctggaagaggaagtgtatcacgtagatggaaaaatagaggagtacttcgcctttgaccggaaagaggatgatgacgaatgtctggaacagaaacctgctcagcccgggagaaaatggcgcaagctcggtctgcctccagtgtccccgcgcgactgtgtcaaggacgcggtcgcagcggaggtttttgaccatgtttggaccaacatggtggaactcctggaagagcttatccggaagcactgggagacaaccctgactgagggcaagaagcagagagagacactaaaagtcgctgggaaccgcttccctcacgtcctggtaccgcacgcacatgcagatggagcctctggcccacccagtggtcacgcggaggcccacggaatttctctagcgtctcggctgaaccctccgcagatccatcacttcagctcatctttctattcagacatgaacggtgttatgacaattcaggcaaagcccctgcagaggaggcccgcttatttcgctgataggacacagaatgaaaaagaggacaaggcaagcgggggaggggctggggccttgtcatccgcccctcatcgcttgggacgagcatctgacacgcatggcctgagccccagcgctaagaagacccccgttccttggagactgccttccctagcaagtgactctcagcggctgaagacaccgaatatttacagcgatgaagtcctgcgcgggaccaaactcccaaccggtgtggaccacatggcaagtcctttggttcagacttcaaggtcccggttccccccattggtcaccgaaacgcgggggcagaatacggccgtacctggctgcaggctagttagctaccggggacgtcacctccaaaaccgggtcctgagtgcaatgccagatggaaccgagcgctcgaggctccgagagcgtaccgctaccctcgaaagactctctcgaccctctacaacacacactttccggcagtcagacaccccaagaaaatcatcattgacacagatggaatttgccgcacacacatggactggacagagcattctcaccggttcacagtacgtaccaaagagcttccagcgcaccacacttaccttcaaaaggcgattccaggtgaccagctag

SEQ ID NO: 186431 - DNA, 1449 bp, Artificial Sequence
  derived and/or modified sequence
atgctgtttgagggaaaagtcaatccccagactcagtccctgctggcagaatgcggcgagtggacccgcagatcgctgcaccttcgggtcctggggcgtcaactgattctgccaactgacaaaggcgtacagcactttcaaggatccacacccgctagtgcagtccaccggcctcctctttccgcctgtgggcactcctccaacattcgggagctgtgtatctccgggtcgcagattgtgcccgccgcgctgagcgcttcggcactgcccggaccagacgatacaggagtcgcagaccttacagccagatcctctttggaggaggaagtctatcatgtggacggaaagatcgaggaatactttgcattcgacaggaaagaggacgacgatgagtgcctggagcagaagcccgctcagcctgggaggaagtggaggaagttgggcttaccccctgttagccctagagattgcgtcaaagacgcagtcgcggcagaggttttcgatcacgtgtggacaaacatggtggaactgctcgaggagctcattcggaagcactgggaaacaaccctaacggaggggaagaaacagcgtgagacattgaaagttgctggcaatcgctttccacatgtgctcgtcccccatgcccacgccgacggggcttcaggtccaccatccgggcacgccgaggcccatggcatctcccttgcctctcgccttaatccaccacagatccaccacttttcgtcctctttttattccgatatgaacggcgttatgacaattcaagctaagcctctccagcgacggcctgcatactttgctgaccgaacgcagaacgagaaggaggataaagccagcggcggcggcgctggtgctctctcaagtgccccacatcggttaggtagggcatcagatacccacggcctgtcacctagtgccaaaaaaacccctgtcccttggcggctgcctagcctcgcctctgattcccagcgtctgaagacaccaaacatttacagcgatgaagtgctgcgtggaaccaagctgccaaccggtgtggatcacatggcctctcctctggtccagacttcccgctcacgttttccccctctggttacggaaacccgaggccaaaataccgcagtgccaggatgtcggctggtgagctaccgcggtagacacctgcagaaccgagtgctctcagctatgccggacggtacagagaggtcacgcctgagagaaaggaccgctacattggaacgtctgagcaggcccagcaccacccatacgttccgtcagtccgacacgccccgtaagtcatctctcacccagatggagttcgctgctcatacatggaccgggcagtccatcctgaccggttcacagtacgtaccgaagagttttcagcggacaacgctgactttcaagagaagattccaggtgacctcttag

SEQ ID NO: 186432 - DNA, 2708 bp, Artificial Sequence
  derived and/or modified sequence
gcggaggatctggagagggaaggggcgtgcgagccccgcggaccccgggcgcgcccgggccgcctgagctgggccagccgcgcggcgggcgcgggcgcgggcgcgggcgcgggcgcgggcgggtggggagccccagccccggggccgcgggggcgcgtgaccggctgtctgcgtggggcccgcgcgcggtgcctctgcctgacggtgcccgagcctagcgcggagcctggcgcgggggctgcgagcacaggcccggggctgatcgtaatcggaagaggactgtcagaaggacgtagaaggcacggttttactgtgaggagcaaagattctttacctacgcattttacaagaaatgtgcagaaagccattgataaatatacctgcaaatccttgtcatccttttcctccagcggaagccatacacccacgggagcccacacctcttggtctgggtcggccacacagagctctaccaccggctcatccacggagaggggctccgtttattcctggagagatgacgaatttgacgaagccagttcacagtcagtgcagcggttactctgggaggtggaggaaatgttatttgaagggaaagtgaaccctcagacccagagtctgctggccgaatgcggggagtggacaagaagatccctccatttgagagtattaggaagacagctgatcctgcccactgacaaaggcgtccagcatttccagggcagcactcctgcctccgcagtccacagacccccgctcagtgcctgcggacacagcagcaacatcagagagttgtgcatttctggctctcaaatagtcccagcagcactctcagcctctgccctgccaggccctgatgacacaggggttgctgacctaacggcacgttcatccctggaagaagaggtttaccatgtggatggaaagattgaggagtatttcgcttttgacagaaaagaggatgatgatgaatgtcttgaacaaaaaccagctcagcccggtaggaaatggcgcaaactcggacttcctcctgtttccccgcgtgactgtgtcaaagatgccgtggcagcagaagtgtttgatcacgtctggacaaatatggtagaacttttggaagagctgattagaaaacactgggaaactacactcacagaagggaaaaaacagagagaaacattgaaagtggctggaaacagatttccgcacgtcctcgttccacacgctcacgccgatggagccagtggccccccgtccggacacgccgaggctcacggcatctccctggcttctcgtctgaacccgccccagattcatcacttctccagcagtttttatagtgacatgaatggtgtcatgacaattcaagcaaaaccgcttcagcggagacctgcctattttgctgacagaacgcagaatgagaaggaggacaaagcatcgggtggaggggcaggtgctctctcctccgcaccgcacagactgggacgggcctcagacactcatggattatcaccttctgcaaagaaaacaccagtgccctggaggctgccttctcttgcttcagattcacagagactaaaaactcccaacatctatagtgacgaagttcttcggggaacaaaactgccgactggcgtggaccacatggcttccccactggttcaaacgtcacggagcaggttccccccgctagtcacggagaccagggggcagaatacagcagttcctggatgccgccttgtttcttacagaggaaggcatctacaaaaccgtgtgttgagtgccatgcctgacggtacagaacgatcgcgtcttcgagaaagaacagccaccctggaacggttgtcaaggcccagcacaacccacacgttccggcagtcggatacgcctcgaaaaagttcattgacacaaatggaatttgctgctcacacatggacaggtcaaagtattttgacaggttcacaatatgtgcctaaatcttttcagaggacaactttgactttcaagaggagattccaagtgacatcttgaaaccacctcaccagaaccattggagcacctgtggcctcggcacactgcttatcacttgaaaaatggaggaacaagtgttatatttatctgtgtgtctgacagtgtgagatgttagaccgagagaaaagcaaacaaataaatcacttaatcttgaacactttgcactgtaaagagagtgaaagtcaaacccaccaagctgccttgctgaaagcatctccaaggttctgtaggctttgttcagaagcccctgatgtgtgtttgcagtccgtcattttatcaatgatacgcaaacataattagcatgtgtatgtactcacacactaattacatgtaagaatatattatctaggaatatgtcatttgtaactttgtactctgacgtattttctagtctcaccctattagtaattctgtcaaaatcctagacgctagtagatattagtatttgagacaatatgtcagagtctgaataagactcagcttgttctagtcatgctgagtttctcatatattttttaaaagtgcttccgccatgaacctctttgagaaatgtcagtggcaaaatctcccaagctaattttctttttctatgttccatcttcaaattcagacagttcacgtgaagtaccccacatttattgatcttagggttgaatataaacgcaattaaaagctatggc

SEQ ID NO: 186433 - DNA, 2997 bp, Artificial Sequence
  derived and/or modified sequence
atgaaggctgctgtgctggaccttgggtctctcttggccaaactcttcgagacctcgacggcgccccccgcaggcccctcctccagaccctcgggaggtgctgccgctgcagggtcggggggctccagggcgggcaccccgttgggtaccgccccgaccctcctccgcgccctggctccggactccccctccgcctcgcggcggtcgcccgccccgctgctctcctccccctactcccggggctccgccgccagccgcgccgcgggagcagtggggaccctgctctcttggcccagtagccctagagcgggtaaagccccgccccagccccccactccctccggcgggggctgctcccctgctcgcctggtggtcccagcgcggccgccctcgggccccggcggggtctgggccgcgctccccaggaacccgctccagcctggccccggagagcgagagctcggcgcctgcgtggcccccggggctggccccagaaccctgttccttacgctgcctgacatcggcgaggagggggcctcggacggcgactccggggatggcgaagcaagaggactgtcagaaggacgtagaaggcacggttttactgtgaggagcaaagattctttacctacgcattttacaagaaatgtgcagaaagccattgataaatatacctgcaaatccttgtcatccttttcctccagcggaagccatacacccacgggagcccacacctcttggtctgggtcggccacacagagctctaccaccggctcatccacggagaggggctccgtttattcctggagagatgacgaatttgacgaagccagttcacagtcagtgcagcggttactctgggaggtggaggaaatgttatttgaagggaaagtgaaccctcagacccagagtctgctggccgaatgcggggagtggacaagaagatccctccatttgagagtattaggaagacagctgatcctgcccactgacaaaggcgtccagcatttccagggcagcactcctgcctccgcagtccacagacccccgctcagtgcctgcggacacagcagcaacatcagagagttgtgcatttctggctctcaaatagtcccagcagcactctcagcctctgccctgccaggccctgatgacacaggggttgctgacctaacggcacgttcatccctggaagaagaggtttaccatgtggatggaaagattgaggagtatttcgcttttgacagaaaagaggatgatgatgaatgtcttgaacaaaaaccagctcagcccggtaggaaatggcgcaaactcggacttcctcctgtttccccgcgtgactgtgtcaaagatgccgtggcagcagaagtgtttgatcacgtctggacaaatatggtagaacttttggaagagctgattagaaaacactgggaaactacactcacagaagggaaaaaacagagagaaacattgaaagtggctggaaacagatttccgcacgtcctcgttccacacgctcacgccgatggagccagtggccccccgtccggacacgccgaggctcacggcatctccctggcttctcgtctgaacccgccccagattcatcacttctccagcagtttttatagtgacatgaatggtgtcatgacaattcaagcaaaaccgcttcagcggagacctgcctattttgctgacagaacgcagaatgagaaggaggacaaagcatcgggtggaggggcaggtgctctctcctccgcaccgcacagactgggacgggcctcagacactcatggattatcaccttctgcaaagaaaacaccagtgccctggaggctgccttctcttgcttcagattcacagagactaaaaactcccaacatctatagtgacgaagttcttcggggaacaaaactgccgactggcgtggaccacatggcttccccactggttcaaacgtcacggagcaggttccccccgctagtcacggagaccagggggcagaatacagcagttcctggatgccgccttgtttcttacagaggaaggcatctacaaaaccgtgtgttgagtgccatgcctgacggtacagaacgatcgcgtcttcgagaaagaacagccaccctggaacggttgtcaaggcccagcacaacccacacgttccggcagtcggatacgcctcgaaaaagttcattgacacaaatggaatttgctgctcacacatggacaggtcaaagtattttgacaggttcacaatatgtgcctaaatcttttcagaggacaactttgactttcaagaggagattccaagtgacatcttgaaaccacctcaccagaaccattggagcacctgtggcctcggcacactgcttatcacttgaaaaatggaggaacaagtgttatatttatctgtgtgtctgacagtgtgagatgttagaccgagagaaaagcaaacaaataaatcacttaatcttgaacactttgcactgtaaagagagtgaaagtcaaacccaccaagctgccttgctgaaagcatctccaaggttctgtaggctttgttcagaagcccctgatgtgtgtttgcagtccgtcattttatcaatgatacgcaaacataattagcatgtgtatgtactcacacactaattacatgtaagaatatattatctaggaatatgtcatttgtaactttgtactctgacgtattttctagtctcaccctattagtaattctgtcaaaatcctagacgctagtagatattagtatttgagacaatatgtcagagtctgaataagactcagcttgttctagtcatgctgagtttctcatatattttttaaaagtgcttccgccatgaacctctttgagaaatgtcagtggcaaaatctcccaagctaattttctttttctatgttccatcttcaaattcagacagttcacgtgaagtaccccacatttattgatcttagggttgaatataaacgcaattaaaagct

SEQ ID NO: 186434 - DNA, 2404 bp, Artificial Sequence
  derived and/or modified sequence
aagaggactgtcagaaggacgtagaaggcacggttttactgtgaggagcaaagattctttacctacgcattttacaagaaatgtgcagaaagccattgataaatatacctgcggaagccatacacccacgggagcccacacctcttggtctgggtcggccacacagagctctaccaccggctcatccacggagaggggctccgtttattcctggagagatgacgaatttgacgaagccagttcacagtcagtgcagcggttactctgggaggtggaggaaatgttatttgaagggaaagtgaaccctcagacccagagtctgctggccgaatgcggggagtggacaagaagatccctccatttgagagtattaggaagacagctgatcctgcccactgacaaaggcgtccagcatttccagggcagcactcctgcctccgcagtccacagacccccgctcagtgcctgcggacacagcagcaacatcagagagttgtgcatttctggctctcaaatagtcccagcagcactctcagcctctgccctgccaggccctgatgacacaggggttgctgacctaacggcacgttcatccctggaagaagaggtttaccatgtggatggaaagattgaggagtatttcgcttttgacagaaaagaggatgatgatgaatgtcttgaacaaaaaccagctcagcccggtaggaaatggcgcaaactcggacttcctcctgtttccccgcgtgactgtgtcaaagatgccgtggcagcagaagtgtttgatcacgtctggacaaatatggtagaacttttggaagagctgattagaaaacactgggaaactacactcacagaagggaaaaaacagagagaaacattgaaagtggctggaaacagatttccgcacgtcctcgttccacacgctcacgccgatggagccagtggccccccgtccggacacgccgaggctcacggcatctccctggcttctcgtctgaacccgccccagattcatcacttctccagcagtttttatagtgacatgaatggtgtcatgacaattcaagcaaaaccgcttcagcggagacctgcctattttgctgacagaacgcagaatgagaaggaggacaaagcatcgggtggaggggcaggtgctctctcctccgcaccgcacagactgggacgggcctcagacactcatggattatcaccttctgcaaagaaaacaccagtgccctggaggctgccttctcttgcttcagattcacagagactaaaaactcccaacatctatagtgacgaagttcttcggggaacaaaactgccgactggcgtggaccacatggcttccccactggttcaaacgtcacggagcaggttccccccgctagtcacggagaccagggggcagaatacagcagttcctggatgccgccttgtttcttacagaggaaggcatctacaaaaccgtgtgttgagtgccatgcctgacggtacagaacgatcgcgtcttcgagaaagaacagccaccctggaacggttgtcaaggcccagcacaacccacacgttccggcagtcggatacgcctcgaaaaagttcattgacacaaatggaatttgctgctcacacatggacaggtcaaagtattttgacaggttcacaatatgtgcctaaatcttttcagaggacaactttgactttcaagaggagattccaagtgacatcttgaaaccacctcaccagaaccattggagcacctgtggcctcggcacactgcttatcacttgaaaaatggaggaacaagtgttatatttatctgtgtgtctgacagtgtgagatgttagaccgagagaaaagcaaacaaataaatcacttaatcttgaacactttgcactgtaaagagagtgaaagtcaaacccaccaagctgccttgctgaaagcatctccaaggttctgtaggctttgttcagaagcccctgatgtgtgtttgcagtccgtcattttatcaatgatacgcaaacataattagcatgtgtatgtactcacacactaattacatgtaagaatatattatctaggaatatgtcatttgtaactttgtactctgacgtattttctagtctcaccctattagtaattctgtcaaaatcctagacgctagtagatattagtatttgagacaatatgtcagagtctgaataagactcagcttgttctagtcatgctgagtttctcatatattttttaaaagtgcttccgccatgaacctctttgagaaatgtcagtggcaaaatctcccaagctaattttctttttctatgttccatcttcaaattcagacagttcacgtgaagtaccccacatttattgatcttagggttgaatataaacgcaattaaaagct

SEQ ID NO: 186435 - DNA, 2011 bp, Artificial Sequence
  derived and/or modified sequence
gctgctgtttcaagctcgttcgcccaaatacatctttctacccaccttccctatcgtcagagaggtggcctgaccccagcacgtgcaagcttgtcaggctggaagaggactgtcagaaggacgtagaaggcacggttttactgtgaggagcaaagattctttacctacgcattttacaagaaatgtgcagaaagccattgataaatatacctgcaaatccttgtcatccttttcctccagcggaagccatacacccacgggagcccacacctcttggtctgggtcggccacacagagctctaccaccggctcatccacggagaggggctccgtttattcctggagagatgacgaatttgacgaagccagttcacagtcagtgcagcggttactctgggaggtggaggaaatgttatttgaagggaaagtgaaccctcagacccagagtctgctggccgaatgcggggagtggacaagaagatccctccatttgagagtattaggaagacagctgatcctgcccactgacaaaggcgtccagcatttccagggcagcactcctgcctccgcagtccacagacccccgctcagtgcctgcggacacagcagcaacatcagagagttgtgcatttctggctctcaaatagtcccagcagcactctcagcctctgccctgccaggccctgatgacacaggggttgctgacctaacggcacgttcatccctggaagaagaggtttaccatgtggatggaaagattgaggagtatttcgcttttgacagaaaagaggatgatgatgaatgtcttgaacaaaaaccagctcagcccggtaggaaatggcgcaaactcggacttcctcctgtttccccgcgtgactgtgtcaaagatgccgtggcagcagaagtgtttgatcacgtctggacaaatatggtagaacttttggaagagctgattagaaaacactgggaaactacactcacagaagggaaaaaacagagagaaacattgaaagtggctggaaacagatttccgcacgtcctcgttccacacgctcacgccgatggagccagtggccccccgtccggacacgccgaggctcacggcatctccctggcttctcgtctgaacccgccccagattcatcacttctccagcagtttttatagtgacatgaatggtgtcatgacaattcaagcaaaaccgcttcagcggagacctgcctattttgctgacagaacgcagaatgagaaggaggacaaagcatcgggtggaggggcaggtgctctctcctccgcaccgcacagactgggacgggcctcagacactcatggattatcaccttctgcaaagaaaacaccagtgccctggaggctgccttctcttgcttcagattcacagagactaaaaactcccaacatctatagtgacgaagttcttcggggaacaaaactgccgactggcgtggaccacatggcttccccactggttcaaacgtcacggagcaggttccccccgctagtcacggagaccagggggcagaatacagcagttcctggatgccgccttgtttcttacagaggaaggcatctacaaaaccgtgtgttgagtgccatgcctgacggtacagaacgatcgcgtcttcgagaaagaacagccaccctggaacggttgtcaaggcccagcacaacccacacgttccggcagtcggatacgcctcgaaaaagttcattgacacaaatggaatttgctgctcacacatggacaggtcaaagtattttgacaggttcacaatatgtgcctaaatcttttcagaggacaactttgactttcaagaggagattccaagtgacatcttgaaaccacctcaccagaaccattggagcacctgtggcctcggcacactgcttatcacttgaaaaatggaggaacaagtgttatatttatctgtgtgtctgacagtgtgagatgttagaccgagagaaaagcaaacaaataaatcacttaatcttg

SEQ ID NO: 186436 - DNA, 2322 bp, Artificial Sequence
  derived and/or modified sequence
atgaaggctgctgtgctggacctgggcagcctgctggccaagctgtttgagaccagcacagcccccccagctggccccagcagccggcccagcggcggcgctgctgctgctggcagcggcggcagccgggccggcacccccctgggcacagcccccaccctgctgcgggccctggccccagacagccccagcgccagcagaagaagccctgcccccctgctgagcagcccctacagccggggcagcgctgccagcagagctgctggagctgtgggcaccctgctgtcctggcccagcagccccagggctgggaaggccccaccccagccccccacccccagcggcggcggctgcagccctgcccggctggtggtgcctgcccggcccccatctggccctggaggagtgtgggccgccctgcccaggaaccccctgcagcccggccctggagagcgggagctgggcgcctgtgtggcccctggggccggccccaggaccctcttcctgaccctgcctgacatcggggaggagggcgccagtgatggagacagcggagatggagaggcccggggcctgtctgagggcagaagaagacatggcttcaccgtgcgcagcaaggacagcctgcccacccacttcaccagaaatgtgcagaaggccatcgacaagtacacctgcaagagcctgagcagcttcagcagcagcggcagccacacccccactggagcccacacctcctggagcggcagcgccacccagagcagcaccaccggcagcagcacagagcggggctctgtgtacagctggagagatgatgaatttgatgaggccagcagccagagcgtgcagaggctgctgtgggaggtggaggagatgctgtttgagggcaaggtgaacccccagacccagagcctgctggccgagtgtggggagtggacccggcgcagcctgcacctgcgggtgctgggccggcagctgatcctgcccacagacaagggcgtgcagcacttccagggcagcaccccagccagcgctgtgcacaggcctcccctgagcgcctgtggccacagcagcaacatccgggagctgtgcatcagcggcagccagatcgtgcctgctgccctgagcgccagcgccctgcccggcccagatgacaccggggtggccgacctgacagcccggagcagcctggaggaggaggtgtaccacgtggatggcaagattgaggagtactttgcctttgacaggaaggaggatgatgatgagtgcctggagcagaagccagcccagcccggcaggaagtggaggaagctgggcctgccccctgtgagcccccgggactgtgtgaaggatgctgtggccgctgaggtgtttgaccacgtgtggaccaacatggtggagctgctggaggagctgatcaggaagcactgggagaccaccctgacagagggcaagaagcagcgggagaccctgaaggtggccggcaaccgcttcccccacgtgctggtgccccacgcccacgcagatggagccagcggcccccccagcggccatgctgaggcccacggcatcagcctggccagccggctgaaccccccccagatccaccacttcagcagcagcttctacagcgacatgaatggagtgatgaccatccaggccaagcccctgcagaggaggcctgcctactttgctgacaggacccagaatgagaaggaggacaaggccagcggcggcggggccggggccctgagcagcgccccccaccggctgggccgggccagtgacacccacggcctgagccccagcgccaagaagacccctgtgccctggaggctgcccagcctggccagtgacagccagaggctgaagacccccaacatctacagtgatgaggtgctgcggggcaccaagctgcccactggagtggaccacatggccagccccctggtgcagaccagccgcagccgcttcccccccctggtgacagagacccggggccagaacacagctgtgcccggctgccgcctggtgtcctaccggggccgccacctgcagaacagagtgctgagcgccatgccagatggaacagagaggagccggctgcgggagaggacagccaccctggagcggctgagccggcccagcaccacccacaccttccggcagagcgacacccccaggaagagcagcctgacccagatggagtttgctgcccacacctggacaggccagagcatcctgaccggcagccagtatgtgcccaagagcttccagaggaccaccctgaccttcaagaggcgcttccaggtgaccagctag

SEQ ID NO: 186437 - DNA, 2322 bp, Artificial Sequence
  derived and/or modified sequence
atgaaggccgccgtgctggacctgggcagcctgctggccaagctgttcgagactagtaccgccccccctgccggaccttcttctcgaccctccggaggtgctgccgctgcaggaagcggaggttctagggccggaactcccctgggaacagctccaactctactcagagccctggcaccggattcaccatctgcgagcaggcgctcaccagcaccgcttctgagcagcccctacagtagaggcagtgcggcttcccgagccgctggtgcggttggaactctcttatcctggcccagctctccaagggcggggaaagctccaccccagccaccaactcctagtggaggtggctgctcacccgccaggctggtggtcccagcgagaccgccaagcggccctggtggcgtgtgggccgctttgcctcgaaatcccctgcagcccggtcctggcgaacgggagctgggagcatgcgttgcccctggtgctggcccccgcacattattcctaacgctccctgacatcggcgaagaaggagcttccgatggcgacagcggcgacggagaagcgcggggtctctccgaggggcgacggcgacacgggtttacagtgaggagcaaggattcgctgcctactcacttcactagaaacgtccagaaagcaatagataagtacacatgtaagtcactttcctccttttcttcaagtggcagccatacacctacaggcgcccatactagctggagcgggtctgccacccagtcatcgactacagggtcatcaaccgagagggggtccgtgtactcctggagggacgacgagtttgacgaggcgagctcccagagcgtgcagagactcttatgggaagttgaagagatgttgttcgaaggcaaagtgaatccccaaacacagtcacttctggccgagtgtggcgagtggacccgaagaagtctgcatctgcgggtgctggggagacagttgattctgcctaccgataaaggagtacagcactttcagggcagcacacctgcctccgcagtacaccgcccacctctgagtgcatgtggacacagttctaacattagagaactgtgcattagtggaagccagatagtgcctgctgcgctgagcgcctcagctttacctggcccagacgacacgggtgtcgctgacctgactgctcggtcctccctggaagaagaagtgtaccacgtagacggcaaaattgaggagtacttcgcgttcgacagaaaggaggacgatgatgaatgtctggaacaaaaacccgctcagccagggaggaaatggagaaagttagggttgccaccagtgtcccctagggactgcgtgaaagatgcagttgcagcagaagtgtttgaccacgtatggactaacatggtcgaacttctggaagagcttatacgcaaacattgggagacaactctgactgagggcaagaaacagcgagagactctcaaagtggccggaaataggttcccgcatgttttggtgcctcacgcacacgctgacggcgcttcgggacctccctccgggcatgcagaagctcatggaatttccctggccagtagattaaatccgccccagattcatcatttttctagcagcttttattcagacatgaacggcgtgatgaccatacaggcgaaacctctgcaaaggagacctgcatacttcgcagatcgtacacagaacgaaaaagaggacaaagcgtccggcgggggggctggagccctgagttcagccccccaccggttgggacgagcttcagatactcatggcctttcaccctcagccaaaaaaacccccgtcccgtggcggttgccctctctcgcttctgatagtcagagactcaaaacccctaacatttatagcgacgaggttctcagggggacgaagctgcccaccggcgtggatcacatggcctctccgttagtccagactagtcggtcacgttttccaccgttggtcacagagacaaggggccagaatacggccgtaccaggatgtagactcgtgagttatcggggtcgccacctccaaaacagggtgctctctgccatgccggatgggacagaaagatcacgtttgcgggagcggaccgcaactctggagcggctgtcccgcccttccaccactcatacctttcggcagtctgatacgccaagaaagtccagcctgactcaaatggaattcgctgcccatacctggaccggccagtctattctcaccgggtcacagtacgttccgaagtccttccagcgcacaactctgacttttaaaaggaggtttcaggtgacatcatag

SEQ ID NO: 186438 - DNA, 1449 bp, Artificial Sequence
  derived and/or modified sequence
atgctgttcgagggcaaggtgaacccccagacccagagcctgctggctgagtgcggagaatggactcgtcgctccctgcatctgcgcgttctgggcagacagctcatcctgccaactgataaaggagttcagcactttcagggctctacacctgcgagtgctgtgcacagaccgcctctctcagcctgtggacactcttctaatatacgggaactttgcatcagcggaagtcagattgtacccgccgcgctgagcgcctccgcgctgccggggcccgacgacacgggcgttgccgacttaactgcacgctcctcactggaagaagaagtctatcatgttgacggcaagattgaggagtactttgccttcgatcgaaaagaagatgatgacgaatgcctcgagcaaaaacccgctcagcctggcaggaaatggagaaagctagggttgcctccagtttctcctagggattgcgtcaaggatgccgtggcagccgaagtgtttgatcatgtgtggactaatatggtcgaactgttagaagaactgattcggaaacattgggaaacaactctcacagaaggtaaaaagcagagggaaaccctcaaagtcgccggcaataggttccctcatgtgctggtgcctcacgctcacgccgatggagcttccggcccgccctcagggcatgccgaggcacacggcatatctttagcatctagattaaaccctccacagatacatcatttctcttccagcttttactccgatatgaacggagtcatgaccatccaggctaagccactgcaaagaagacccgcctacttcgcagacagaacccaaaacgagaaggaggacaaagcatcaggaggcggcgccggtgcactgtctagtgctccccaccgcttgggcagagcctcggacacccacggtttatcgccctcagcgaagaagacccctgtgccctggagactcccgagcctggctagtgattcccagagactcaagaccccgaacatatatagcgacgaggtgctccgcggaaccaagctgcctacgggtgtcgaccacatggcctcccctttagtccaaacatccagaagccgcttcccacccttggtaacagagaccagaggccagaataccgccgttccagggtgtaggttagtctcttatcgcggtaggcatttacaaaaccgggtgctgagcgccatgcctgatggaactgagcgttcaagacttagggaacggacagccactttagagcgcctgagccgaccctctacaacacacacattccggcagagcgatacccctcgcaaatcttcactcacgcagatggaattcgcggctcatacatggacggggcagagcatcttaacaggcagccagtacgttcctaagtccttccaacgcactactttaacattcaagcgtcgcttccaggtaacctcatag

SEQ ID NO: 186439 - DNA, 1449 bp, Artificial Sequence
  derived and/or modified sequence
atgctgttcgagggcaaggtgaacccccagacccagagcctgctggctgagtgtggggagtggacacgccgttccttgcatctccgcgtcctgggcagacaattgatcctaccgacagataaaggcgttcagcatttccaggggtctacacccgcaagtgcggtgcacagacccccacttagcgcctgtggacactcaagtaacatccgtgagttgtgtataagcgggagtcagatcgtacctgccgccctgtccgccagcgctctgcctggtccagacgacaccggcgtggccgaccttaccgcgcgttctagcctagaagaagaggtgtaccacgtggatggcaaaatcgaagagtacttcgcctttgacagaaaggaagatgatgatgaatgcttggaacagaaaccagcacagcctggcagaaaatggcgtaagctgggccttccaccagtgtcaccgagggactgcgtgaaggacgcagttgcagcagaggtcttcgatcacgtctggacaaacatggtagagctcctggaggagctaatccgaaaacattgggagaccaccttgacagagggcaagaaacagagggaaacgctgaaagtggccggtaaccgcttcccacacgtgctggtccctcatgctcatgccgatggggcatctggcccacccagcggtcacgccgaagcccacggtataagcctggcttccaggctcaacccacctcagatccaccacttctcaagttccttttatagtgacatgaacggagtgatgaccatccaggcaaaaccattgcaaaggcgacctgcttacttcgccgacagaacgcagaacgaaaaagaggataaggcttcgggaggcggggccggtgccctctcaagtgcgccgcatagattggggcgcgccagcgatactcatgggttatcacccagtgcgaaaaagactccagttccctggcggctgcccagcctggcatccgactcccagaggctcaaaacgcctaatatatactccgacgaggtgcttcgggggacgaagcttccaacaggggtggaccacatggcctccccattagttcagacaagtcgaagtcgctttcccccgctcgtaaccgaaactagaggacagaatactgccgttccagggtgtagactggtgtcttatagaggacgacatctgcagaaccgggtgttatccgcaatgcctgacggtacagaaaggtcaaggctcagggagagaactgcaactctggagcgactaagccggccttctactactcacacctttcggcaatcagataccccgagaaagagcagcctcacgcagatggaattcgctgctcacacatggacaggtcagagtattctgactgggagtcagtatgtccccaaaagtttccagaggactacacttaccttcaagagaagattccaagttacttcatag

SEQ ID NO: 186440 - DNA, 2322 bp, Artificial Sequence
  derived and/or modified sequence
atgaaggcagccgttttggatctgggatctctgttagccaaactctttgaaacatctacagcaccacccgcaggcccttcctcccgcccatccgggggtgctgccgcagccggttccgggggaagcagggccggtaccccactggggactgctccaacactcttgcgtgcacttgccccagactcaccaagcgcctcccggaggtctcccgcaccactgctgtcctccccgtattccaggggcagtgcagcgagccgggcagctggagccgtcggaaccctcctgtcctggccatccagcccccgagcaggcaaagcacctcctcaacctccaaccccttcaggaggtgggtgctcaccagccaggctggtggttcccgctagacccccatctggtcctggcggagtgtgggccgctcttccacgcaaccccctccaacccggtccaggcgaaagggagctgggggcttgtgtggccccaggcgctggacctcggactctcttcttgactctgccagacatcggtgaagaaggagcctctgacggggattctggcgatggggaggccagggggctttccgagggcagaagaaggcatggatttaccgttcgaagcaaggactctctccctacccattttacccgcaatgtccagaaggccatcgacaaatacacttgtaaaagcctgtcctccttctcaagttccggcagccatactccaacaggcgctcataccagctggtccgggtcagccactcaatctagcaccaccggttcctctacagagaggggttccgtatactcttggagggacgacgagttcgatgaggcttcatctcagtctgtgcagaggctgttgtgggaggtggaggaaatgctgttcgaaggaaaggtgaaccctcaaacccagtccctgcttgctgaatgcggcgaatggacaagacgctccctgcacctaagggtccttggcaggcaactcattcttccaaccgataaaggagtacagcactttcaggggtcaacacctgcgagtgcagttcacagacctccgctgagtgcctgtggccacagctccaatattcgagagctgtgtatttccggatcgcagatcgtgcctgctgccctttcagcctcagcactgcccggaccggatgacactggggtcgccgacctgaccgcacgatcctctttagaggaggaagtctaccacgtcgacgggaagatcgaagaatacttcgcctttgacagaaaagaagacgatgacgagtgtctggaacagaagcccgcacagcctgggcgtaagtggcgaaaactgggactgccacctgtctccccaagagattgcgttaaggacgcagtggccgcagaggtctttgatcatgtgtggactaacatggtcgagctgctcgaggaactgataagaaaacactgggagaccactctgacagaggggaagaagcagcgcgaaaccctgaaggtcgccggtaacagattcccgcatgtgctggtcccgcacgctcacgcagatggcgcatccggcccaccatcaggccacgcagaagctcacggaatttcgcttgctagccgcttgaaccctcctcagatccaccactttagcagcagcttctactccgacatgaacggagtgatgaccattcaggccaagcctctgcaacgtagacctgcctattttgccgacaggactcagaacgagaaggaagataaggccagcggtgggggagccggagctttatcaagtgcccctcaccggttggggagggcgtctgatacccatggattgagcccgtcagctaaaaagacgcccgtcccttggcgcctgccttctcttgcatccgacagtcagcggttgaaaacacccaatatctatagcgacgaagtgctgcgcggaacaaaactgcctaccggcgttgaccacatggcaagtcctttagtgcagacctctaggagccggttccctcccttagttaccgagacaaggggtcagaatactgccgtccccggatgccgtctggtgagttatcgcggtagacatcttcagaatcgcgtgctctcagccatgccagatggcactgagcggtcaaggttgagagagcggacagccaccttggagcgcctatccagaccttctacaacacacacattccggcagagtgacacccctcggaagtcatctttgacgcaaatggaatttgctgcccatacatggacagggcagtctatccttactggatcacagtatgtgcccaaatcttttcaacgaaccacactaacttttaagcgcagattccaggtgactagctag

SEQ ID NO: 186441 - DNA, 1449 bp, Artificial Sequence
  derived and/or modified sequence
atgcttttcgaagggaaggttaacccccagactcagtcccttctggccgaatgtggggaatggactcggaggagtctacacctcagagtgctgggacgacaattaattctcccgacagataagggtgtgcagcacttccagggctcaactccggcaagtgccgtacataggcccccactttcagcctgtggtcactcctcgaatatccgagagttatgcatttctgggagtcagattgtccctgcagcattgtcggcctctgccttgcctggacccgacgatactggtgtggcagaccttacagcgaggtcctcgttggaggaggaggtgtaccacgtcgacgggaagattgaggaatatttcgccttcgaccgaaaggaagacgatgatgagtgtctagagcagaaaccggctcagcccggtaggaaatggcgcaaactagggctaccacccgttagtcctcgggactgcgtgaaggatgccgtcgcagctgaggtgttcgaccacgtttggacaaacatggtggagctactggaagagttaattcgtaaacactgggaaacaaccctgactgagggaaagaagcagagggagacactgaaagtggccggaaatagattccctcacgtgctggtgccccacgcgcacgccgatggtgcatcaggaccaccttccgggcatgccgaggcccatggcatcagcttagccagccgacttaatccccctcagattcaccatttctcatcatctttctattccgacatgaacggtgtaatgacgatccaggctaagcccctgcagagacgccctgcatattttgccgacagaacccagaacgagaaggaggataaggccagtggaggaggggctggagccttgagcagcgccccacatcgcctcgggagggcatcagacactcacggcctaagtccaagcgctaaaaagacgcccgtgccctggcgtctgccctctctggctagcgatagccaaaggctgaagactcccaacatatattctgacgaggtgctgcggggaacgaaacttcctaccggcgtagaccatatggcttcaccgttagtccagaccagccgatctcgtttcccccctctagtcactgaaactcggggacagaacactgccgtgccaggatgtcgccttgtgtcatacagaggcaggcacctgcaaaatagagtgctctccgccatgcctgacggcaccgaaaggtcccggttaagggagagaacggccactttggaacgcctctctagaccgtcaactacacatacttttcggcagagtgatactcctcgaaagtcatcccttactcaaatggagtttgcagcacacacctggactggtcagtctattttgacgggctcacagtatgttccaaaaagcttccagaggacaacgctcacatttaagcgaaggtttcaggttacttcttag

SEQ ID NO: 186442 - DNA, 1449 bp, Artificial Sequence
  derived and/or modified sequence
atgctttttgagggaaaggtcaacccgcaaacccagtccctgctggccgaatgtggtgaatggacgagaaggtcacttcatcttcgggtcctggggagacagctgattctgccaactgacaagggtgtgcagcacttccaaggctcgactcctgcgagcgctgtgcacagaccgccactgtcagcttgcgggcattctagcaacatcagagaactttgcatctcagggtcgcagatcgtgcctgcagccctctccgcatctgcactgcctggaccagatgacaccggcgtggcggatctgacagcccgatcaagccttgaagaggaagtataccatgtggatggcaagatcgaggaatatttcgcattcgatcggaaggaagatgacgatgagtgtctggagcagaagccagcccagccagggaggaagtggagaaaactaggtcttcctccagtcagtccgagagactgtgtgaaggatgccgtggccgcagaagttttcgatcacgtatggacaaatatggtggagctgctcgaagaactcatccggaagcactgggaaaccacactgaccgaggggaaaaagcaaagagaaacgttgaaggttgccggaaatagattcccgcatgttctcgtgccacatgctcacgccgacggggcatctggtccaccttcgggacacgccgaagcacacggtatttccctagcctcaaggctgaaccccccacaaatccaccacttctcaagctccttctactccgacatgaatggcgtgatgactatccaggccaaaccactgcagcggagacccgcatactttgcagaccgcacacagaatgaaaaagaagacaaggcttcaggcggaggcgcaggagcactctcctccgctcctcatagattgggtagggcttcagacacacacggcctctcaccctctgccaagaaaacaccagtgccctggcgcctcccctctctggcatctgatagccagcggctcaagaccccaaacatttacagcgatgaggttctcagggggacgaaattgcccacgggcgttgaccacatggccagccccttggtccagactagccgatctcgattcccaccgctcgtgaccgaaacccgaggccagaacacggctgtgcctgggtgccgcctcgtgagttatcgtggaaggcacctacagaaccgcgtgctctccgccatgcccgatggcacggagcgaagcagacttcgggagcggacagccaccctggaaagattaagcaggccctccaccacacacaccttcagacagtctgacacccctagaaagtcgagtttgacccagatggagtttgccgctcatacatggaccgggcagagtattttgaccggatctcagtacgtgcctaagtcgtttcagcgcaccacactgacttttaagagaaggtttcaggtcaccagttag

SEQ ID NO: 186443 - protein, 246 aa, Artificial Sequence
  derived and/or modified sequence
MPVQPPSKDTEEMEAEGDSAAEMNGEEEESEEERSGSQTESEEESSEMDDEDYERRRSECVSEMLDLEKQFSELKEKLFRERLSQLRLRLEEVGAERAPEYTEPLGGLQRSLKIRIQVAGIYKGFCLDVIRNKYECELQGAKQHLESEKLLLYDTLQGELQERIQRLEEDRQSLDLSSEWWDDKLHARGSSRSWDSLPPSKRKKAPLVSGPYIVYMLQEIDILEDWTAIKKARAAVSPQKRKSDGP

SEQ ID NO: 186444 - protein, 244 aa, Artificial Sequence
  derived and/or modified sequence
MPVQPPSKDTEEMEAEGDSAAEMNGEEEESEEERSGSQTESEEESSEMDDEDYERRRSECVSEMLDLEKQFSELKEKLFRERLSQLRLRLEEVGAERAPEYTEPLGGLQRSLKIRIQVAGIYKGFCLDVIRNKYECELQGAKQHLESEKLLLYDTLQGELQERIQRLEEDRQSLDLSSEWWDDKLHARGSSRSWDSLPPSKRKKAPLVSGPYIVYMLQEIDILEDWTAIKKARAAVSPQKRKSD

SEQ ID NO: 186445 - DNA, 741 bp, Artificial Sequence
  derived and/or modified sequence
atgcctgtccaaccccctagcaaagacacagaagaaatggaggctgagggtgatagtgccgctgagatgaacggagaagaggaagagagcgaagaagaaaggtcaggctctcaaaccgaatccgaggaagaaagctccgaaatggacgacgaggactacgagaggaggcggtccgaatgcgtgagcgaaatgctagatctcgaaaagcagttttccgagttaaaggagaaactgttccgagaaagactcagccaactgcgcctcaggctggaagaggtgggagccgagcgtgcgccagaatacacagaacctcttggcggcctgcagcggtctcttaaaattagaatccaggtcgccggcatttacaagggtttctgtctggatgttattagaaacaagtacgaatgcgaacttcagggcgcgaaacagcaccttgagtcagaaaaactgctgctgtacgatacactgcagggcgagttacaggaacgcatccagcgacttgaggaggaccgccagtcacttgacctatcatctgaatggtgggacgataaactgcatgcacgaggatccagtcgatcttgggattcactgccaccctccaaacggaagaaggccccattagtcagtggaccctacattgtttatatgctccaagagattgacattctcgaagattggacagcgattaaaaaagcccgcgccgccgtgtccccgcagaagcggaagagtgatgggccgtag

SEQ ID NO: 186446 - DNA, 735 bp, Artificial Sequence
  derived and/or modified sequence
atgcctgttcagcctccgtccaaagatacggaggagatggaggccgagggggattccgcggccgagatgaacggggaggaggaggaatcggaagaagaaagatcaggaagtcaaactgagtccgaggaggagagtagcgagatggacgatgaagactacgaacggcgaaggtcagaatgtgttagcgaaatgctggatctggagaaacagttttctgagctgaaagagaagttgttccgggaacggctgtctcagcttcgacttagactcgaggaggttggcgctgaacgcgcacccgaatacacagagcctcttggcggacttcagcggagtctgaagatccggatacaagtggccggtatttataaggggttttgcctcgacgtgattcgcaataagtacgagtgcgaactccagggcgcaaagcagcatctggaaagcgagaaactgctcctgtatgacacacttcagggcgagctccaggaacgtatacagcgcctggaagaggacagacagtcattggacctcagctctgagtggtgggatgacaagttgcatgccagggggagttcccggtcatgggatagtctgcctcccagcaaacgcaaaaaggcccccttagtcagtggcccgtatatcgtctacatgctccaggaaatagacatcctcgaagattggacagccattaaaaaagctcgtgccgctgtgtctcctcagaagaggaaatccgactag

SEQ ID NO: 186447 - DNA, 741 bp, Artificial Sequence
  derived and/or modified sequence
atgcctgtgcagccccccagcaaggacacagaggagatggaggccgagggggacagcgctgctgagatgaatggagaggaggaggagagcgaggaggagaggagcggcagccagacagaaagtgaggaggagagcagcgagatggatgatgaagattatgaaagaagaagaagtgaatgtgtgtctgagatgctggacctggagaagcagttcagcgagctgaaggagaagctgttccgggagcggctgagccagctgcggctgcggctggaggaggtgggcgctgagcgggcccctgagtacacagagcccctgggcggcctgcagaggagcctgaagatccgcatccaggtggccggcatctacaagggcttctgcctggatgtgatccggaacaagtatgaatgtgagctgcagggcgccaagcagcacctggagagcgagaagctgctgctgtatgacaccctgcagggcgagctgcaggagcgcatccagaggctggaggaggaccggcagagcctggacctgagcagcgagtggtgggatgacaagctgcacgcccggggcagcagccgctcctgggacagcctgccccccagcaagaggaagaaggcccccctggtgtctggcccctacatcgtgtacatgctgcaggagattgacatcctggaggactggacagccatcaagaaggcccgggctgctgtgagcccccagaagaggaagagtgatggcccctag

SEQ ID NO: 186448 - DNA, 735 bp, Artificial Sequence
  derived and/or modified sequence
atgcctgtgcagccccccagcaaggacacagaggagatggaggccgagggggacagcgctgctgagatgaatggagaggaggaggagagcgaggaggagaggagcggcagccagacagaaagtgaggaggagagcagcgagatggatgatgaagattatgaaagaagaagaagtgaatgtgtgtctgagatgctggacctggagaagcagttcagcgagctgaaggagaagctgttccgggagcggctgagccagctgcggctgcggctggaggaggtgggcgctgagcgggcccctgagtacacagagcccctgggcggcctgcagaggagcctgaagatccgcatccaggtggccggcatctacaagggcttctgcctggatgtgatccggaacaagtatgaatgtgagctgcagggcgccaagcagcacctggagagcgagaagctgctgctgtatgacaccctgcagggcgagctgcaggagcgcatccagaggctggaggaggaccggcagagcctggacctgagcagcgagtggtgggatgacaagctgcacgcccggggcagcagccgctcctgggacagcctgccccccagcaagaggaagaaggcccccctggtgtctggcccctacatcgtgtacatgctgcaggagattgacatcctggaggactggacagccatcaagaaggcccgggctgctgtgagcccccagaagaggaagagtgactag

SEQ ID NO: 186449 - DNA, 741 bp, Artificial Sequence
  derived and/or modified sequence
atgcccgtgcagccccccagcaaggacaccgaggagatggaggccgaaggcgacagtgccgccgagatgaacggagaagaagaggagagtgaagaagaacgttcagggtcacagacagaatcggaagaggaatccagcgaaatggatgacgaggactatgaacgcaggcggtcagaatgcgttagtgagatgctggatttagaaaaacagttctccgaactgaaggagaaactctttcgagagcgcctgagccaactgcgactgaggctcgaagaagtgggggccgaacgggccccagaatacacggagccccttggaggacttcagcggagtctgaaaattagaatacaggtcgctggtatctataaagggttttgccttgatgtcatccgaaacaaatatgagtgcgaactgcaaggcgcaaaacaacacctggaatccgaaaaactgctgctctacgataccttacaaggggaactacaggagcggattcaaaggctggaggaagaccgccagagtctagatctatcatcggaatggtgggatgataaactacacgcccggggatcttctcggagctgggatagcctgccacctagcaagcgaaaaaaggcccccctggtgtcaggaccttacatcgtatatatgctgcaggaaattgacatactggaagattggaccgccatcaagaaggccagggctgccgtttccccacaaaaaaggaaaagcgacggcccctag

SEQ ID NO: 186450 - DNA, 735 bp, Artificial Sequence
  derived and/or modified sequence
atgcccgtgcagccccccagcaaggacaccgaggagatggaggccgagggcgactctgctgccgagatgaatggtgaagaggaggagagtgaggaggaaagatccggatcccagacggagtcagaggaggaatcatctgagatggatgatgaagactacgagagaagaaggtcagagtgcgtgtctgagatgctagaccttgaaaagcagttcagtgaactcaaagagaagttgtttagagagcggttgagccagctgcggcttagactcgaggaggtcggggccgaacgagctcccgagtataccgagccccttggggggcttcaacggtctctaaaaatccgcatacaggttgccgggatctacaagggcttctgcttggacgtcatcaggaataagtatgagtgtgagctgcagggcgctaaacagcacctggaatcagagaaactgctgctttatgatactctgcagggggaattgcaggagcggatccagcggctcgaagaggaccgccaatcactagatctcagttcagaatggtgggacgacaagctgcacgctcgaggcagttccaggtcctgggattctctaccaccgtctaaacgaaagaaggctcccctggtcagtggcccttacatcgtgtatatgctgcaagaaattgacatcctcgaggactggacagctattaaaaaagctcgggcagctgtaagccctcagaagcggaaatctgattag

SEQ ID NO: 186451 - DNA, 741 bp, Artificial Sequence
  derived and/or modified sequence
atgccagtgcaacccccatccaaggataccgaggaaatggaggctgagggcgatagcgcagctgaaatgaacggggaggaagaagagtccgaggaggagcgaagtgggagccagacagagtccgaagaagaaagttctgagatggacgatgaagactacgaacggagacggtccgagtgtgtgtctgaaatgctggatctggagaaacagttctctgaattaaaggaaaagcttttccgtgagcgcttaagccagcttcgcttaaggttggaggaagtgggcgcagagagagcgccagagtataccgaaccactgggaggccttcagagaagcctgaaaatccgaatacaggtcgcagggatctacaagggattctgcctggacgtgatccggaataagtacgagtgcgagttgcaaggcgcaaagcagcatcttgagagcgagaagttgctgctatacgacactctacagggagagctacaggagagaatccagaggctcgaggaagatcgacagtcactggacctatcctctgagtggtgggacgacaaacttcacgcacggggatcctcacgcagctgggatagcctgcctccgtctaagaggaaaaaagccccactggtttctgggccttacatagtttatatgctgcaggagattgatatactggaggactggacagctattaaaaaggctcgcgctgccgttagtccccagaagcgaaagtctgacggaccatag

SEQ ID NO: 186452 - DNA, 735 bp, Artificial Sequence
  derived and/or modified sequence
atgccagtgcagcctccatccaaggataccgaggagatggaggccgaaggggactctgccgctgagatgaacggcgaggaggaagaaagcgaagaggagaggagcggatcccagaccgaatccgaggaggagtcgagtgagatggatgacgaggattatgaaaggaggcgatcagaatgtgtgtcagaaatgttagatttagaaaagcagttttccgagctaaaggagaaactttttcgagagcgcttgagccagctcaggctcaggctggaagaggttggagcggagagagcgccagagtataccgagccacttggtggattgcagcggtcgttaaaaatccgaatacaagtcgcaggcatctacaaagggttttgtttggatgttattagaaacaagtatgaatgtgagctgcagggtgctaaacagcatctggagagtgagaaactgctcctgtacgatacccttcagggagaactccaggaacgaattcagagactcgaagaggaccgccaatcattggacctgagctcagagtggtgggatgacaagttgcacgctcgcggatcctcgaggagttgggatagtctgccgccaagtaagcgtaaaaaggcgcctctagtttctggcccatatatcgtatacatgctgcaggaaatcgatatcttggaagactggactgccataaaaaaagcgagggcggcagtgtccccacagaaacggaagagcgactag

SEQ ID NO: 186453 - DNA, 963 bp, Artificial Sequence
  derived and/or modified sequence
agaagggagcgggaggccccctgggcgctgcggagaagctggattgacctctgcgagagtggggagggtctgccttccctaggggcctgccccggaggagctgccattctgaaaagataaattgcctgtgtacagcgctttacagtgtgcttttccatcccttaccacctgtgagctcctcaacactcagagcaggaatggttatccgctttttgcacccgggagtccagatgcctgtccagcctccaagcaaagacacagaagagatggaagcagagggtgattctgctgctgagatgaatggggaggaggaagagagtgaggaggagcggagcggcagccagacagagtcagaagaggagagctccgagatggatgatgaggactatgagcgacgccgcagcgagtgtgtcagtgagatgctggacctagagaagcagttctcggagctaaaggagaagttgttcagggaacgactgagtcagctgcggttgcggctggaggaagtgggggctgagagagcccctgaatacacggagccccttggggggctgcagcggagcctcaagattcgcattcaggtggcagggatctacaagggcttctgtctggatgtgatcaggaataagtacgaatgtgagctgcagggagccaaacagcacctggagagtgagaagctgctgctctatgacacgctgcagggggagctgcaggagcggatccagaggctggaggaggaccgccagagcctggacctcagctctgaatggtgggatgacaaactgcacgccagaggcagctccaggtcttgggactccctgccgcccagcaagaggaagaaggcacctctggtttctggcccatacatcgtgtacatgcttcaagagatcgacatcctggaggactggacagccatcaaaaaggctagggcagctgtgtcccctcagaagagaaaatcggatg

SEQ ID NO: 186454 - DNA, 741 bp, Artificial Sequence
  derived and/or modified sequence
atgcccgtgcagccccccagcaaggacaccgaggagatggaggccgagggcgacagcgccgccgagatgaacggcgaggaggaggagagcgaggaggagagaagcggcagccagaccgagagcgaggaggagagcagcgagatggacgacgaggactacgagagaagaagaagcgagtgcgtgagcgagatgctggacctggagaagcagttcagcgagctgaaggagaagctgttcagagagagactgagccagctgagactgagactggaggaggtgggcgccgagagagcccccgagtacaccgagcccctgggcggcctgcagagaagcctgaagatcagaatccaggtggccggcatctacaagggcttctgcctggacgtgatcagaaacaagtacgagtgcgagctgcagggcgccaagcagcacctggagagcgagaagctgctgctgtacgacaccctgcagggcgagctgcaggagagaatccagagactggaggaggacagacagagcctggacctgagcagcgagtggtgggacgacaagctgcacgccagaggcagcagcagaagctgggacagcctgccccccagcaagagaaagaaggcccccctggtgagcggcccctacatcgtgtacatgctgcaggagatcgacatcctggaggactggaccgccatcaagaaggccagagccgccgtgagcccccagaagagaaagagcgacggcccctag

SEQ ID NO: 186455 - DNA, 735 bp, Artificial Sequence
  derived and/or modified sequence
atgcccgtgcagccccccagcaaggacaccgaggagatggaggccgagggcgacagcgccgccgagatgaacggcgaggaggaggagagcgaggaggagagaagcggcagccagaccgagagcgaggaggagagcagcgagatggacgacgaggactacgagagaagaagaagcgagtgcgtgagcgagatgctggacctggagaagcagttcagcgagctgaaggagaagctgttcagagagagactgagccagctgagactgagactggaggaggtgggcgccgagagagcccccgagtacaccgagcccctgggcggcctgcagagaagcctgaagatcagaatccaggtggccggcatctacaagggcttctgcctggacgtgatcagaaacaagtacgagtgcgagctgcagggcgccaagcagcacctggagagcgagaagctgctgctgtacgacaccctgcagggcgagctgcaggagagaatccagagactggaggaggacagacagagcctggacctgagcagcgagtggtgggacgacaagctgcacgccagaggcagcagcagaagctgggacagcctgccccccagcaagagaaagaaggcccccctggtgagcggcccctacatcgtgtacatgctgcaggagatcgacatcctggaggactggaccgccatcaagaaggccagagccgccgtgagcccccagaagagaaagagcgactag

SEQ ID NO: 186456 - protein, 991 aa, Artificial Sequence
  derived and/or modified sequence
MHSPGADGTQVSPGAHYCSPTGAGCPRPCADTPGPQPQPMDLRVGQRPPVEPPPEPTLLALQRPQRLHHHLFLAGLQQQRSVEPMRLSMDTPMPELQVGPQEQELRQLLHKDKSKRSAVASSVVKQKLAEVILKKQQAALERTVHPNSPGIPYRTLEPLETEGATRSMLSSFLPPVPSLPSDPPEHFPLRKTVSEPNLKLRYKPKKSLERRKNPLLRKESAPPSLRRRPAETLGDSSPSSSSTPASGCSSPNDSEHGPNPILGSEALLGQRLRLQETSVAPFALPTVSLLPAITLGLPAPARADSDRRTHPTLGPRGPILGSPHTPLFLPHGLEPEAGGTLPSRLQPILLLDPSGSHAPLLTVPGLGPLPFHFAQSLMTTERLSGSGLHWPLSRTRSEPLPPSATAPPPPGPMQPRLEQLKTHVQVIKRSAKPSEKPRLRQIPSAEDLETDGGGPGQVVDDGLEHRELGHGQPEARGPAPLQQHPQVLLWEQQRLAGRLPRGSTGDTVLLPLAQGGHRPLSRAQSSPAAPASLSAPEPASQARVLSSSETPARTLPFTTGLIYDSVMLKHQCSCGDNSRHPEHAGRIQSIWSRLQERGLRSQCECLRGRKASLEELQSVHSERHVLLYGTNPLSRLKLDNGKLAGLLAQRMFVMLPCGGVGVDTDTIWNELHSSNAARWAAGSVTDLAFKVASRELKNGFAVVRPPGHHADHSTAMGFCFFNSVAIACRQLQQQSKASKILIVDWDVHHGNGTQQTFYQDPSVLYISLHRHDDGNFFPGSGAVDEVGAGSGEGFNVNVAWAGGLDPPMGDPEYLAAFRIVVMPIAREFSPDLVLVSAGFDAAEGHPAPLGGYHVSAKCFGYMTQQLMNLAGGAVVLALEGGHDLTAICDASEACVAALLGNRVDPLSEEGWKQKPNLNAIRSLEAVIRVHSKYWGCMQRLASCPDSWVPRVPGADKEEVEAVTALASLSVGILAEDRPSEQLVEEEEPMNL

SEQ ID NO: 186457 - DNA, 2976 bp, Artificial Sequence
  derived and/or modified sequence
atgcacagccccggcgccgacggcacccaggtgagccccggcgcccactactgcagccccaccggcgccggctgccccagaccctgcgccgacacccccggcccccagccccagcccatggacctgagagtgggccagagaccccccgtggagcccccccccgagcccaccctgctggccctgcagagaccccagagactgcaccaccacctgttcctggccggcctgcagcagcagagaagcgtggagcccatgagactgagcatggacacccccatgcccgagctgcaggtgggcccccaggagcaggagctgagacagctgctgcacaaggacaagagcaagagaagcgccgtggccagcagcgtggtgaagcagaagctggccgaggtgatcctgaagaagcagcaggccgccctggagagaaccgtgcaccccaacagccccggcatcccctacagaaccctggagcccctggagaccgagggcgccaccagaagcatgctgagcagcttcctgccccccgtgcccagcctgcccagcgacccccccgagcacttccccctgagaaagaccgtgagcgagcccaacctgaagctgagatacaagcccaagaagagcctggagagaagaaagaaccccctgctgagaaaggagagcgccccccccagcctgagaagaagacccgccgagaccctgggcgacagcagccccagcagcagcagcacccccgccagcggctgcagcagccccaacgacagcgagcacggccccaaccccatcctgggcagcgaggccctgctgggccagagactgagactgcaggagaccagcgtggcccccttcgccctgcccaccgtgagcctgctgcccgccatcaccctgggcctgcccgcccccgccagagccgacagcgacagaagaacccaccccaccctgggccccagaggccccatcctgggcagcccccacacccccctgttcctgccccacggcctggagcccgaggccggcggcaccctgcccagcagactgcagcccatcctgctgctggaccccagcggcagccacgcccccctgctgaccgtgcccggcctgggccccctgcccttccacttcgcccagagcctgatgaccaccgagagactgagcggcagcggcctgcactggcccctgagcagaaccagaagcgagcccctgccccccagcgccaccgccccccccccccccggccccatgcagcccagactggagcagctgaagacccacgtgcaggtgatcaagagaagcgccaagcccagcgagaagcccagactgagacagatccccagcgccgaggacctggagaccgacggcggcggccccggccaggtggtggacgacggcctggagcacagagagctgggccacggccagcccgaggccagaggccccgcccccctgcagcagcacccccaggtgctgctgtgggagcagcagagactggccggcagactgcccagaggcagcaccggcgacaccgtgctgctgcccctggcccagggcggccacagacccctgagcagagcccagagcagccccgccgcccccgccagcctgagcgcccccgagcccgccagccaggccagagtgctgagcagcagcgagacccccgccagaaccctgcccttcaccaccggcctgatctacgacagcgtgatgctgaagcaccagtgcagctgcggcgacaacagcagacaccccgagcacgccggcagaatccagagcatctggagcagactgcaggagagaggcctgagaagccagtgcgagtgcctgagaggcagaaaggccagcctggaggagctgcagagcgtgcacagcgagagacacgtgctgctgtacggcaccaaccccctgagcagactgaagctggacaacggcaagctggccggcctgctggcccagagaatgttcgtgatgctgccctgcggcggcgtgggcgtggacaccgacaccatctggaacgagctgcacagcagcaacgccgccagatgggccgccggcagcgtgaccgacctggccttcaaggtggccagcagagagctgaagaacggcttcgccgtggtgagaccccccggccaccacgccgaccacagcaccgccatgggcttctgcttcttcaacagcgtggccatcgcctgcagacagctgcagcagcagagcaaggccagcaagatcctgatcgtggactgggacgtgcaccacggcaacggcacccagcagaccttctaccaggaccccagcgtgctgtacatcagcctgcacagacacgacgacggcaacttcttccccggcagcggcgccgtggacgaggtgggcgccggcagcggcgagggcttcaacgtgaacgtggcctgggccggcggcctggacccccccatgggcgaccccgagtacctggccgccttcagaatcgtggtgatgcccatcgccagagagttcagccccgacctggtgctggtgagcgccggcttcgacgccgccgagggccaccccgcccccctgggcggctaccacgtgagcgccaagtgcttcggctacatgacccagcagctgatgaacctggccggcggcgccgtggtgctggccctggagggcggccacgacctgaccgccatctgcgacgccagcgaggcctgcgtggccgccctgctgggcaacagagtggaccccctgagcgaggagggctggaagcagaagcccaacctgaacgccatcagaagcctggaggccgtgatcagagtgcacagcaagtactggggctgcatgcagagactggccagctgccccgacagctgggtgcccagagtgcccggcgccgacaaggaggaggtggaggccgtgaccgccctggccagcctgagcgtgggcatcctggccgaggacagacccagcgagcagctggtggaggaggaggagcccatgaacctgtag

SEQ ID NO: 186458 - DNA, 2976 bp, Artificial Sequence
  derived and/or modified sequence
atgcatagtcctggcgccgatggaacccaggtttcccccggcgcccactactgctccccaaccggtgccgggtgcccccgcccatgtgcggatacacctggaccccaacctcaacccatggatcttcgcgtgggccagagacccccagtagagccaccaccggaacccactttactagcgcttcagcgaccccagcgtctccaccatcatctctttctggctggtttgcagcagcagcgttcagtcgaaccaatgcggctatcgatggatacccccatgccagagctgcaggtcgggccccaagagcaggagttacgccagctcttacacaaggataagtctaagcgcagcgcagtggcaagctccgtggtaaagcagaagctggctgaagtgatactgaagaagcagcaggcggctcttgagcgaactgtccaccccaacagtcccggaatcccataccgcacccttgaacccctcgagacggaaggtgctacaaggtctatgctgagtagcttcctgccgcctgttccctccctccccagcgatcctccagaacactttcctctgaggaagaccgtgagtgaacctaatctcaaacttcggtataaaccaaaaaaatccttggaacgacggaagaatcctctactacgcaaggagtctgcccctccatccctccggcgcagaccggccgagaccctgggagattcatcacccagttcctcgtctactcccgccagcggatgcagtagtcctaacgatagcgaacacggtcccaatcccatcctaggttccgaagcgctgcttggccagaggttaagattacaggagacatccgttgcgccttttgcgcttcccaccgtcagtttgttaccagctattacattgggtctgccagccccagcacgcgcagatagcgacagaagaacccaccccactcttggtccacgaggccccattctgggtagccctcatacccctttatttcttccacacggacttgaacctgaggccgggggaacccttccttcacgactccagcccattctccttctggacccctcgggatctcacgctccccttctgacggtaccggggctgggtcctttacctttccatttcgcacagagcctcatgaccacagagagactttccggtagtgggctgcactggcctctaagccgtacaagaagcgaaccgcttcctccttccgccactgcacccccccccccggggccgatgcagccacggctggagcaactcaagactcatgttcaggtaattaagcggtccgctaaaccgtcagaaaagcctagattaaggcaaataccatccgccgaggacctggagactgatggcggcggacccggacaggtcgtggacgacgggcttgagcaccgggaactcggccacggacaacccgaagcccgggggcctgcacctttacagcagcatccgcaggtgcttttgtgggaacagcagcgcctggccggacgcctgcctcgagggtcaacaggggatacagttctcttgcctttagctcaaggcggtcaccggccactgtctcgagcgcagtctagccccgccgctccagcttccttaagcgcccctgagcctgcctcgcaagctagagtgctaagctctagcgaaacacctgctcgcacccttccttttactaccggactcatttacgattctgtgatgcttaaacatcagtgctcgtgcggagacaatagtcggcatcccgaacacgccggccgcatccagtccatttggtccagactccaggagcgtgggctacggtcccaatgcgagtgcctgagggggcgcaaagcttctctcgaggaactccagtcagtgcacagtgagcgccacgtgctcctgtacggcactaaccccctcagtaggctcaagctcgataacggcaaattggccggcttactggcccaaagaatgttcgtgatgctgccttgcgggggcgtaggggttgacacggataccatttggaacgagttgcactcttccaatgcagcaaggtgggccgcaggttcggttacagatctcgccttcaaggtggcctcccgcgaattgaagaacgggttcgccgtggtgaggcccccaggccaccatgccgaccattccacagcgatggggttttgcttctttaacagcgttgccatagcctgcaggcagttgcaacagcaaagtaaagctagtaaaatactaattgtggactgggatgtccatcatggaaatggtacgcagcagaccttttatcaggatccttcagtgctctatatttctctgcatcggcatgacgatggtaacttttttcctggtagtggggcagtggatgaggtcggtgcaggttctggtgagggctttaacgtaaacgtcgcgtgggccgggggtctcgatccacccatgggcgatccagagtatctcgcagcctttagaatcgtcgtgatgcctattgcgagggagttttctcctgatctggtcctggtgtctgccgggttcgacgcagccgaaggccatcctgcacccctgggcggataccatgtgtccgcaaaatgcttcggatacatgacacagcagttgatgaacctcgccggtggggcagtcgtgctcgcacttgaagggggccacgatctcacggctatctgtgacgcatccgaggcctgcgtcgcagctttgctcgggaatagggtggacccattgtctgaggagggatggaagcagaagcccaatctgaacgccatcagatcattggaggccgtgatccgcgttcactctaagtattggggctgcatgcagagactggcaagctgtcccgactcctgggtgccaagggtaccaggcgccgacaaagaagaggttgaggcggtgactgctttagcctctctgagtgtagggatcttggccgaagaccgaccatccgagcaacttgtcgaggaagaagaaccgatgaacctttag

SEQ ID NO: 186459 - DNA, 4095 bp, Artificial Sequence
  derived and/or modified sequence
atgcacagccccggcgctgatgggacccaggtgagcccgggtgcccactactgcagccccactggcgcaggctgccccaggccctgtgcagacacaccaggccctcagccgcagcccatggacctgcgggtgggccagcggcccccagtggagcccccaccagagcccacattgctggccctgcagcgtccccagcgcctgcaccaccacctcttcctagcaggcctgcagcagcagcgctcggtggagcccatgaggctctccatggacacgccgatgcccgagttgcaggtgggaccccaggaacaagagctgcggcagcttctccacaaggacaagagcaagcgaagtgctgtagccagcagcgtggtcaagcagaagctagcggaggtgattctgaaaaaacagcaggcggccctagaaagaacagtccatcccaacagccccggcattccctacagaaccctggagcccctggagacggaaggagccacccgctccatgctcagcagctttttgcctcctgttcccagcctgcccagtgaccccccagagcacttccctctgcgcaagacagtctctgagcccaacctgaagctgcgctataagcccaagaagtccctggagcggaggaagaatccactgctccgaaaggagagtgcgccccccagcctccggcggcggcccgcagagaccctcggagactcctccccaagtagtagcagcacgcccgcatcagggtgcagctcccccaatgacagcgagcacggccccaatcccatcctgggctcggaggcgctcttgggccagcggctgcggctgcaggagacttctgtggccccgttcgccttgccgacagtgtccttgctgcccgcaatcactctggggctgcccgcccctgccagggctgacagtgaccgcaggacccatccgactctgggccctcgggggccaatcctggggagcccccacactcccctcttcctgccccatggcttggagcccgaggctgggggcaccttgccctctcgcctgcagcccattctcctcctggacccctcaggctctcatgccccgctgctgactgtgcccgggcttgggcccttgcccttccactttgcccagtccttaatgaccaccgagcggctctctgggtcaggcctccactggccactgagccggactcgctcagagcccctgccccccagtgccaccgctcccccaccgccgggccccatgcagccccgcctggagcagctcaaaactcacgtccaggtgatcaagaggtcagccaagccgagtgagaagccccggctgcggcagataccctcggctgaagacctggagacagatggcgggggaccgggccaggtggtggacgatggcctggagcacagggagctgggccatgggcagcctgaggccagaggccccgctcctctccagcagcaccctcaggtgttgctctgggaacagcagcgactggctgggcggctcccccggggcagcaccggggacactgtgctgcttcctctggcccagggtgggcaccggcctctgtcccgggctcagtcttccccagccgcacctgcctcactgtcagccccagagcctgccagccaggcccgagtcctctccagctcagagacccctgccaggaccctgcccttcaccacagggctgatctatgactcggtcatgctgaagcaccagtgctcctgcggtgacaacagcaggcacccggagcacgccggccgcatccagagcatctggtcccggctgcaggagcgggggctccggagccagtgtgagtgtctccgaggccggaaggcctccctggaagagctgcagtcggtccactctgagcggcacgtgctcctctacggcaccaacccgctcagccgcctcaaactggacaacgggaagctggcagggctcctggcacagcggatgtttgtgatgctgccctgtggtggggttggggtggacactgacaccatctggaatgagcttcattcctccaatgcagcccgctgggccgctggcagtgtcactgacctcgccttcaaagtggcttctcgtgagctaaagaatggtttcgctgtggtgcggcccccaggacaccatgcagatcattcaacagccatgggcttctgcttcttcaactcagtggccatcgcctgccggcagctgcaacagcagagcaaggccagcaagatcctcattgtagactgggacgtgcaccatggcaacggcacccagcaaaccttctaccaagaccccagtgtgctctacatctccctgcatcgccatgacgacggcaacttcttcccggggagtggggctgtggatgaggtaggggctggcagcggtgagggcttcaatgtcaatgtggcctgggctggaggtctggacccccccatgggggatcctgagtacctggctgctttcaggatagtcgtgatgcccatcgcccgagagttctctccagacctagtcctggtgtctgctggatttgatgctgctgagggtcacccggccccactgggtggctaccatgtttctgccaaatgttttggatacatgacgcagcaactgatgaacctggcaggaggcgcagtggtgctggccttggagggtggccatgacctcacagccatctgtgacgcctctgaggcctgtgtggctgctcttctgggtaacagggtggatcccctttcagaagaaggctggaaacagaaacccaacctcaatgccatccgctctctggaggccgtgatccgggtgcacagtaaatactggggctgcatgcagcgcctggcctcctgtccagactcctgggtgcctagagtgccaggggctgacaaagaagaagtggaggcagtgaccgcactggcgtccctctctgtgggcatcctggctgaagataggccctcggagcagctggtggaggaggaagaacctatgaatctctaaggctctggaaccatctgcccgcccaccatgcccttgggacctggttctcttctaacccctggcaatagcccccattcctgggtctttagagatcctgtgggcaagtagttggaaccagagaacagcctgcctgctttgacagttatcccagggagcgtgagaaaatccctgggtctagaatgggaactggagaggaccctgagaggagacgggctgggcggcgacccccacagggctctcgagaacagattctcccctccagtatgggccctggctgtggcccccattcctcaggactgcacagaggaggactggctccggctccgtcgggctcacccttaaccactattcctggctctgcaaaccccagactttgcacacagcctcaggctccacacagaaatgtgaacttggcctcagacaggctggcccttcctaggctctaggggctaggggggagtggggagccaagaggtcccatattcctgagtgcaggggtagtccctctcacctgcttcctcagacgactctggaagcttccctctaccactgggcactgagacgaagctccctgacagccgagactggcagccctccatctggtccgtaccctcgccagaggcccccctacatcaacctcctggcgatgccctggtggagcagatgggtgctctgggagtcctgtgcttcctgatccaatggtgccaaacccttcatctccccaagaagcgcagcatacccctgggacccctcggccactgcccactcggggagccttctctgtttctggggcctcccccaccatagctctgattcccaccccacataggagtagcctgactgagggggaaggggtgggagagaagatacagacatggaggaggggaggctgctctggcaaagtcttcaaggcttttgggggtccaggcctggggtcaagaaggaaaatgtgtgtgagcatgtgtgtgagtgaggcgtgtgtgtgagcgtgtgtgtgagtgaggcgtgtgtgtgtgtctttcctaggacccaccataccctgtgtatgtatgcatgtttttgtaaaaaggaagaaaatggaaaaaaatctgaacaataaatgttttatttgctttaaaa

SEQ ID NO: 186460 - DNA, 2976 bp, Artificial Sequence
  derived and/or modified sequence
atgcacagccctggagcagatggcacccaggtgtcccctggggcccactactgcagccccactggagctggctgcccccggccctgtgccgacaccccaggcccccagccccagcccatggacctgcgggtgggccagaggcctcctgtggagcccccacctgagcccaccctgctggccctgcagaggccccagaggctgcaccaccacctgttcctggccggcctgcagcagcagaggtctgtggagcccatgaggctgtccatggacacccccatgcctgagctgcaggtgggcccccaggagcaggagctgcggcagctgctgcacaaggacaagagcaagaggtctgctgtggccagctctgtggtgaagcagaagctggccgaggtgatcctgaagaagcagcaggccgccctggagaggacagtgcaccccaacagccctggcatcccctaccgcaccctggagcccctggagacagaaggagccaccaggtccatgctgagcagcttcctgccccctgtgcccagcctgcccagcgaccccccagagcacttccccctgaggaagacagtgtctgagcccaacctgaagctgcgctacaagcccaagaagagcctggagaggaggaagaaccccctgctgaggaaggagagcgccccacccagcctgcggcggcggcctgctgagaccctgggggacagcagccccagcagcagcagcaccccagccagcggctgcagcagccccaatgacagcgagcacggccccaaccccatcctgggcagcgaggccctgctgggccagaggctgcggctgcaggagacctctgtggccccctttgccctgcccaccgtgtccctgctgcctgccatcaccctgggcctgcctgccccagcccgggctgacagcgacaggaggacccaccccaccctgggcccccggggccccatcctgggcagcccccacacccccctcttcctgccccacggcctggagcctgaggccggcggcaccctgcccagccggctgcagcccatcctgctgctggaccccagcggcagccacgcccccctgctgactgtgcccggcctgggccccctgcccttccactttgcccagagcctgatgaccacagagcggctgagcggcagcggcctgcactggcccctgagcaggaccaggtctgagcccctgcccccatctgccacagcccctcctcctcctggccccatgcagccccggctggagcagctgaagacccacgtgcaggtgatcaagaggtctgccaagcccagcgagaagccccggctgcggcagatccccagcgctgaggacctggagacagatggcggcggccctggccaggtggtggatgatggcctggagcaccgggagctgggccacggccagcctgaggcccggggccctgcccccctgcagcagcacccccaggtgctgctgtgggagcagcagaggctggccggccgcctgccccggggcagcactggagacacagtgctgctgcccctggcccagggcggccaccggcccctgagccgggcccagagcagccctgctgccccagccagcctgagcgcccctgagcccgccagccaggcccgggtgctgagcagcagcgagaccccagcccggaccctgcccttcaccaccggcctcatctatgattctgtgatgctgaagcaccagtgcagctgtggggacaacagccgccaccctgagcacgccggccgcatccagagcatctggagccggctgcaggagcggggcctgcggagccagtgtgagtgcctgcggggcaggaaggccagcctggaggagctgcagagcgtgcacagcgagcggcacgtgctgctgtatggcaccaaccccctgagccggctgaagctggacaacgggaagctggccggcctgctggcccagaggatgtttgtgatgctgccctgtggcggcgtgggcgtggacacagacaccatctggaatgagctgcacagcagcaatgctgcccgctgggccgccggctctgtgacagacctggccttcaaggtggccagccgggagctgaagaatggatttgctgtggtgcggcccccaggccaccacgccgaccacagcacagccatgggcttctgcttcttcaacagcgtggccatcgcctgccggcagctgcagcagcagagcaaggccagcaagatcctgattgtggactgggatgtgcaccacggcaatggcacccagcagaccttctaccaggaccccagcgtgctgtacatcagcctgcacagacatgatgatggcaacttcttccctggcagcggggctgtggatgaggtgggcgccggcagcggggagggcttcaacgtgaatgtggcctgggccggcggcctggacccccccatgggagaccctgagtacctggccgccttcagaattgtggtgatgcccatcgcccgggagttctccccagacctggtgctggtgtctgctggctttgatgctgctgagggccacccagcccccctgggcggctaccacgtgtctgccaagtgcttcggctacatgacccagcagctgatgaacctggccggcggcgctgtggtgctggccctggagggcggccatgacctgacagccatctgtgatgccagcgaggcctgtgtggccgccctgctgggcaacagagtggaccccctgtctgaggagggctggaagcagaagcccaacctgaatgccatccgcagcctggaggccgtcatccgggtgcacagcaagtactggggctgcatgcagaggctggccagctgcccagacagctgggtgccccgggtgcctggagctgacaaggaggaggtggaggccgtgacagccctggccagcctgtctgtgggcatcctggctgaagatcggcccagcgagcagctggtggaggaggaggagcccatgaacctgtag

SEQ ID NO: 186461 - DNA, 2976 bp, Artificial Sequence
  derived and/or modified sequence
atgcacagccccggcgccgacggcacccaggtgagccccggcgcccactactgttctcccactggggccggatgtccacgaccgtgcgctgacactcccggaccccagcctcaaccaatggatctccgagtcggccagagaccacccgtggaacctcctccggaacccaccctcctcgctctgcaaagaccccagcgccttcatcaccacctttttctcgcaggcttgcaacagcagcggagtgtggaacctatgcgcctatctatggatactcccatgccagaactgcaagtgggcccacaggagcaagagcttagacagctgcttcataaggacaagtccaaaagatccgcggtggcgagctcagttgtaaagcagaagctggcagaagtcatcttgaaaaagcaacaggcagcccttgagagaaccgtgcaccccaacagccccggtatcccttatcgtaccctggaaccgctggagactgagggtgctacccgctcaatgctctcttcttttctgccaccggtgccctcactgccctccgatccccccgagcactttccccttcgcaagaccgtctccgaacctaacctcaaactgcggtataaacctaaaaagagcctggaacgccgaaagaacccattgctgcgcaaagagagcgccccaccctcattacggcgtcggcccgccgaaacactgggagattcgtccccttcgagctcctcaacacccgcctccggatgctccagtcctaacgattctgaacacggtcctaatccaatcctcggctcagaggccctgttggggcagaggcttcgcctccaagagacctcagtggcccccttcgccttaccgaccgtgagcctgcttcccgctattacactgggtttgccagcgcctgccagggccgacagcgacagaagaacccaccctaccctgggcccaaggggccctatcctcggatccccccatactcccctgttcctgcctcatggcctggaacccgaagccggtggtaccttgccctctcggctgcaaccaattctgttacttgacccaagtgggtctcatgcccccctgctgacagtacccggcctcggtcctctgcccttccattttgcacaaagccttatgaccaccgagagactgtcagggtcaggccttcactggccgctgtccagaacgcgttccgaacccctcccccccagcgccaccgcaccccctcctcccggccccatgcagccccggcttgaacaactcaaaactcacgtgcaagttatcaagcgttccgcgaagcccagtgagaagcctcggctgcgccagattccctccgctgaggacctcgaaaccgacggtggcggccccggtcaggtggtggacgacggcttggaacaccgcgagttggggcatggccagccggaggcacggggaccagcacctctccagcaacacccgcaggtgctgttatgggagcaacaacgactcgccggtagacttccacggggctctaccggggacacggttctgctaccgcttgcccagggtggccatcgtccgctgtcgcgtgcccagtcgtcccccgcggcaccagcaagcctgagcgccccagagccagccagtcaggccagagtgttaagctcaagcgagaccccagctaggaccttgccgttcactaccggccttatttatgattctgtaatgctgaagcaccagtgctcttgcggcgataactcccgccaccccgaacacgctggtagaattcaatccatttggagccggctgcaggagcggggtctgagatcgcaatgtgaatgcttgaggggaagaaaggcaagtctggaggagctgcagtccgtacatagtgaacgacatgtactgctctacgggacaaatccactatcccgcctgaaactggataatgggaagctggctggcctcctggctcagcgtatgttcgtgatgttgccctgcggaggggttggagtagatacggacacgatttggaacgagctccactcatcgaatgctgcccgctgggctgctgggagcgtgactgacctggccttcaaggtggcatctagggagctgaagaacggcttcgcagttgtgcgcccccctgggcaccatgcagatcatagcacagctatgggattttgcttcttcaatagcgtggcgatagcctgtaggcagctgcagcagcagtccaaggcaagtaagatcctgatagttgactgggatgtccaccacgggaatggtacacagcagacattctaccaggatcccagcgtgctttatattagtttgcatcgtcacgacgacggcaattttttccctggctctggagccgttgatgaggtgggggcgggaagtggagagggtttcaatgttaatgtggcgtgggcaggggggctcgacccaccgatgggcgatccagaatacttagcagcgttccggatcgtggtgatgcctattgcacgcgaattttccccggatctggtgttggtcagcgcggggttcgacgccgctgaaggacaccctgcccccttgggaggctaccacgtgtctgccaagtgttttgggtatatgacacagcaactgatgaatttggccggaggcgcagtcgtcctggctctcgaaggcggtcatgacctcacggccatctgtgatgccagcgaagcgtgcgtcgccgccctgctcggcaaccgggtcgacccactcagcgaagaaggctggaagcagaaacccaatcttaatgcaattcgcagtctggaagcggttattagagtccatagcaaatactggggttgtatgcaaaggcttgccagttgccctgatagctgggtgccccgggtgcccggtgcagacaaagaagaagtcgaagccgttaccgccctcgcgtccctttctgtaggaatactggctgaagatagaccatcggagcagctggtcgaggaagaggaaccgatgaatctttag

SEQ ID NO: 186462 - DNA, 2976 bp, Artificial Sequence
  derived and/or modified sequence
atgcattcacctggcgcagacggcacacaggtctctccaggggcacattactgctccccaactggggctggctgtcctcggccttgcgccgatactccaggacctcagccacagcccatggatttgcgtgttggtcagcgtccacctgtcgaacccccacccgagcctactttactggcattacaacgccctcagaggttacatcatcacctgttccttgctggattgcagcagcagcgaagcgttgagcctatgaggctctccatggatactccgatgccagaacttcaggttgggccacaggagcaagaattaaggcagctgctgcataaagacaagagtaagagaagtgccgtggcctcttcagtggtaaagcagaagctggcagaagtgatcttaaagaagcagcaggccgctctcgaaaggacagtgcatcctaacagcccaggcatcccttaccgaactctggagcctcttgaaaccgagggtgctacaaggtctatgctgtcatcattccttccacctgtgccttctctgcctagcgacccgccagaacacttccctctgagaaagaccgtctcagaacccaacttaaaactgagatataagcccaagaaaagcctcgagagaagaaagaaccctctgctgcgcaaagagtcggcacccccatcactgagaagaaggcctgctgaaaccctgggggacagctcaccgagtagttcatctactccagcgtccggttgcagctcccccaacgattccgagcacggtcctaaccccatcctcggaagcgaggcccttttgggtcagcgccttcgactgcaggagacatctgtcgccccattcgccttacccactgtttccttgctcccagccattacgctgggattaccagcccctgccagagcggattccgaccgcagaacacacccgacactgggccctagaggccctattctaggatcgccgcacacccctctgtttttaccacacggcctggagccagaggctggcggtacgcttccttccagactgcagcctatactcttgctggacccgagcggtagtcacgcccctctgttgaccgtgcctgggttaggccctctgcctttccacttcgcgcaatccttgatgacaacagaacgcctctctggctcaggactgcattggcctctgtcacgcaccagatcagaacctttgcccccatccgccaccgccccacctccaccaggacccatgcagcctcggctcgaacaactcaagacacatgtgcaggtgatcaaaaggagcgccaagccctccgagaagcctcgcctgcggcagatacccagtgcagaagaccttgagaccgacggaggcggaccgggacaagtggtcgacgatggtctggaacaccgcgagctgggacatggccagccggaagcacgaggtcccgctccgctccaacagcacccccaggttctgctatgggagcagcagcggctggcaggccgtctccctcgtgggagcactggcgatactgtgctcttgcctctcgcccagggaggacaccggccactgtcacgtgcacaaagctcgcctgccgctccagctagcctaagcgccccagagcccgctagtcaggcacgggtcctgtctagctccgagactccagctcgaactcttccgttcacgaccggactgatctatgatagtgtcatgttaaaacaccagtgttcctgcggggataactctagacatccagagcatgctggccgtatccaatctatctggtcgagattgcaagagaggggactacggagtcagtgtgagtgtttgagggggcgaaaagcgagcctggaggagctccaatctgtccacagcgagaggcacgtgctcttatatggaactaacccactttctcgccttaaactggacaacggtaagttagccggattgcttgcacagagaatgtttgtgatgctaccctgcggcggagtcggcgtggatactgacactatctggaatgagctgcattcctccaacgcagccaggtgggccgctggatccgtcaccgatctggccttcaaggttgcttccagggaactgaaaaatggattcgccgtggtcaggccgccaggtcaccacgccgaccattctacggcaatgggcttttgttttttcaactccgtagctatcgcatgccgccagctccaacagcaatctaaggctagcaagatccttattgtggactgggatgtccaccatgggaacgggacacagcaaaccttttaccaagatccgagcgtgctttacatctctctccatcgccacgatgatgggaactttttccccggtagcggggcagtggatgaggtaggcgcaggctctggggaagggttcaacgtcaatgtagcctgggccggtggactcgatcccccaatgggtgaccccgaatatctggcagcttttagaatagttgtgatgcctattgccagagagttctcacccgacctggtgctcgtgtctgcgggattcgacgccgctgaaggacaccccgcacctttaggaggctatcacgtgagcgccaagtgtttcggctacatgactcagcagttaatgaacctggcaggcggtgctgtggtgctcgctctggagggtggccatgacctcaccgcaatatgtgacgctagcgaagcctgtgtcgccgcactcttgggaaaccgagtcgatcccctgagcgaggagggatggaagcagaaacctaaccttaacgcgatccggtccctggaagctgtcattcgcgtgcactctaagtactggggctgcatgcaaaggcttgcctcctgcccggattcctgggtccctagagtgcccggagcggacaaagaggaggtcgaggctgtgactgccctggcgtcgctctcagttgggatactcgcggaagatcgaccctctgaacagctggtcgaagaggaagagcctatgaacctctag

SEQ ID NO: 186463 - DNA, 2976 bp, Artificial Sequence
  derived and/or modified sequence
atgcattcccctggagctgacggtacacaggtctccccaggagctcactactgcagtcctactggggcaggttgcccccgcccctgcgcggacacccccgggccacagccccagcctatggatcttcgggttggacagcgtccccctgtggaaccgccaccagaacccactctgttggccctgcaaaggccacaaagactgcatcaccatctcttcctggctggcctgcaacagcagaggagcgtggaacctatgcgccttagtatggatacaccaatgccagagctgcaagtggggccgcaagaacaggagcttcgtcagctgctccacaaagacaagagcaagagatcagctgtggcttcaagcgtggtgaaacagaaattagccgaagtgatattaaagaagcagcaagccgccctggaacggaccgtccatccaaattcccccggaattccataccgaacactggaacccctggagactgagggcgcgactagatcaatgctatcatcctttctcccccccgtgcctagcctgccatctgatccccccgagcacttccccttgagaaagaccgtctctgaacccaacctgaaactgcgatacaagccaaagaaaagtctcgagcgacgaaagaatccactgctccgcaaggaaagcgcacctcccagcctgaggagacggcctgctgagaccttgggcgactcatcaccaagtagctcatccacccccgcatctggatgttcttcccccaacgactctgaacatgggccgaatcccatcctcggaagtgaagccttactggggcagcgcctgagactgcaggagaccagcgtcgccccctttgccctgccaacggtgtccttgttaccagccataactttgggcctgcccgcgccagcgagagcagactccgataggcgcactcaccctaccctcgggccacgcggacccatacttgggagcccacatactccactctttcttcctcatggtttggagcctgaagcaggtggcaccttgccgagccgtctgcagcctattctgcttctcgacccgagcggctctcacgctcccctacttacggtccccggtttgggtcctctgccatttcatttcgcacagtcactgatgaccacagaaaggctctcaggctcaggtcttcactggccgctcagcagaacacgatccgaacccctgccaccatctgctaccgcaccccctccgccgggccctatgcagcctaggctggagcagctgaagacacacgtgcaagtgatcaaaagatctgccaagccttctgagaaaccacgccttcgccagataccgagcgccgaggatctggagactgatggtggtggccccggacaggtggtggatgacggacttgagcacagagaactggggcacggccagcccgaggcccggggccccgccccgttgcagcaacacccacaagtcttgctctgggaacaacagcggttggcgggcaggcttcctcgggggagcaccggggacacagtactcctgccattggcccaggggggccacaggcccctctcaagagctcagagttcacccgccgcccccgcatcgctcagtgcaccagagcccgcttcacaggctagggtgctgtcctcgtcagagaccccagccagaaccctgccatttactacgggcctgatctatgactcagtaatgctgaagcaccagtgttcttgcggcgataacagccgccacccagaacacgctgggcgtatacaatcaatttggtcgcgcttgcaagagagagggcttaggagtcaatgcgagtgtctgagaggtcgcaaagccagtctggaggaactgcagtctgtccattccgaaagacatgttttactctacgggaccaatcccctgtctcggttgaagcttgataatggcaaactggcaggcttgcttgcccaacgaatgtttgtcatgctgccttgtggcggagtcggtgtagacacagacaccatctggaatgagttacactcatcaaacgctgcacgatgggccgctggttctgttactgatctagctttcaaggtggcatccagagaactcaagaacggcttcgcggtggtgagaccaccaggccatcatgctgaccatagcactgccatgggcttctgcttctttaacagtgtggccatcgcttgtcgacagctacaacagcaatccaaagcctctaaaatacttatagtggattgggacgttcatcacggaaacggaacacagcaaaccttctaccaagacccctcagtgttgtacatctctcttcatagacacgatgacgggaatttctttcccggctccggcgcagtggacgaggtaggagcagggagtggggaaggatttaacgtcaacgttgcttgggccggcggccttgatcccccaatgggggatcccgaatacctggccgcctttcggattgtcgtgatgcccattgccagagagttttccccagatctggtgttagtctcagctggcttcgatgctgccgagggtcacccagcccctctcggaggttaccacgtttccgccaagtgtttcggctacatgacccagcagttgatgaacctcgccggcggtgcagtggttcttgccctggagggagggcatgatctgactgctatatgcgatgcgagcgaagcctgtgttgccgctctgctgggcaaccgggtcgaccccctgtcggaggagggctggaagcagaagcctaacttaaacgccattagatcactggaagcagtaattcgtgtgcacagtaaatactggggttgcatgcaaaggctcgcatcttgtcctgatagctgggtgccaagggtccctggcgctgataaggaggaagtggaggctgtgacagcgcttgcatccctaagtgttgggatcttagcagaggatagaccaagcgaacaattggtggaggaggaagagcctatgaacctgtag

SEQ ID NO: 186464 - DNA, 2976 bp, Artificial Sequence
  derived and/or modified sequence
atgcacagccctggagccgacggcacccaagtaagtcccggcgcccactactgtagtccaactggagccggttgtcctagaccatgcgctgacaccccagggcctcagccccagcccatggacctgcgagttggtcagagacctcccgttgaaccccccccagaacctacgctgctcgctcttcagcggcctcagagactccaccaccatctgttcctggcgggactccaacaacagcgcagcgtggaacctatgagactctccatggatacccctatgcccgagctgcaggtcggcccacaggagcaggaacttagacaactcctgcacaaagacaaaagcaagaggagcgccgtagcaagcagtgtggttaagcagaagttagccgaagtcatcctcaaaaagcagcaggccgccttggagcgcacggttcaccctaactctcccggaattccctataggacattggagcctctcgaaaccgagggggcaaccagaagcatgctgagtagttttctccccccagttcccagcctcccttccgatccaccagaacatttcccattacgaaagactgtctccgaacccaacctaaagttgcgttacaagcccaaaaagagtctcgagcgaagaaagaaccctctgcttcgcaaagagagcgcccctccttccctgaggcggagacctgctgaaacactgggagattctagcccttcctcatccagtaccccggcctccggctgttcttcccccaacgacagtgaacacgggccaaatccgattctgggttctgaagccttactgggccagaggttgcgactgcaggagaccagtgttgccccattcgctctgcctaccgttagtctgttacctgctataactttaggattgccagcgccagccagggccgattcagaccgccgcacccatcccaccctcgggccccgcgggccaatactgggctctccacatacccccctgtttctaccacacggcctcgagcctgaagccggaggaactcttccttccagactacagcctattctgcttttagaccctagcggctcacatgccccacttttgacagttcccggtcttggccctctgccatttcacttcgcgcagagtcttatgacaaccgagaggttgagcggtagtggcctccactggcctttgagtagaactaggagcgaaccattgcctcccagcgccacagcaccgcccccaccaggacccatgcaaccacgattagagcagctgaaaacacatgtgcaggtgataaaaagaagcgcaaagccctccgagaaacctagattaaggcaaattccaagtgcagaggatctcgaaacagatgggggcggcccaggacaggttgtggacgatgggttagagcaccgagaacttgggcatggacagcccgaagcccgcggccccgctcctttgcagcagcaccctcaggttcttctatgggagcagcagcgactcgccggaagactgcctcgaggctctaccggcgacacagtgctactccctctggcccaaggaggtcatcggccactgtcacgcgctcagtccagccccgctgcccccgcttcccttagtgccccggagcccgccagtcaggctcgcgtcctgtcctcttccgaaactcctgcccgcactctccccttcaccacaggcctgatctatgacagtgttatgttgaaacaccagtgttcatgcggagacaactcacggcaccctgaacacgctgggcggatccaatctatctggagcaggcttcaggagagggggctgagatcacaatgcgaatgtctgaggggacgaaaagcaagtctggaggagctgcagagtgtgcatagtgagagacacgtgttactatacggaaccaaccctctgagcaggcttaaactggataatggcaaactggcaggccttctagcccaacgaatgtttgtaatgctaccttgtggcggtgttggagtggatacagataccatttggaacgaacttcatagcagcaacgcagcacggtgggctgcaggatccgtcaccgaccttgcattcaaggtggccagccgggagctgaagaatggtttcgccgtcgtccgccctcccggccaccacgcagaccattccactgccatgggattctgcttctttaactcagtagccattgcttgcagacaattgcagcaacagtcgaaagcttccaaaatactaattgtcgactgggatgtgcatcacggcaacggtacccagcagacattttaccaagatccgtcagtactctacatctctctgcaccgccacgatgatggaaattttttccctggatcaggggccgttgacgaggtcggcgctggctccggggaaggtttcaatgtgaatgtcgcctgggccggagggctcgatcctcccatgggagatcccgagtacctagcagcatttagaatagtcgttatgccaattgcccgcgaattttcccccgacctagtcttggtgtcagccggtttcgatgccgccgaaggtcaccctgcccctttaggggggtaccatgtaagcgcgaaatgttttggttacatgacgcaacagttgatgaaccttgccggaggagccgtggttctcgccttagagggaggccacgacctgaccgcgatctgtgatgcctctgaagcttgtgtcgcagcattgctgggaaatagggttgaccctttaagtgaagaaggctggaagcaaaaacccaacttgaatgccataaggtccttggaggccgtcatacgggttcatagtaagtactggggctgcatgcagagactagccagttgccccgactcttgggttcccagggttcctggtgcggacaaagaggaagtcgaagccgtgaccgccctcgcctcgctgagcgtagggattttagccgaagacagaccatcagaacagctggttgaggaggaggagccgatgaacttatag

SEQ ID NO: 186465 - RNA, 2976 nt, Artificial Sequence
  derived and/or modified sequence
augcauuccccuggagcugacgguacacaggucuccccaggagcucacuacugcaguccuacuggggcagguugcccccgccccugcgcggacacccccgggccacagccccagccuauggaucuucggguuggacagcgucccccuguggaaccgccaccagaacccacucuguuggcccugcaaaggccacaaagacugcaucaccaucucuuccuggcuggccugcaacagcagaggagcguggaaccuaugcgccuuaguauggauacaccaaugccagagcugcaaguggggccgcaagaacaggagcuucgucagcugcuccacaaagacaagagcaagagaucagcuguggcuucaagcguggugaaacagaaauuagccgaagugauauuaaagaagcagcaagccgcccuggaacggaccguccauccaaauucccccggaauuccauaccgaacacuggaaccccuggagacugagggcgcgacuagaucaaugcuaucauccuuucucccccccgugccuagccugccaucugauccccccgagcacuuccccuugagaaagaccgucucugaacccaaccugaaacugcgauacaagccaaagaaaagucucgagcgacgaaagaauccacugcuccgcaaggaaagcgcaccucccagccugaggagacggccugcugagaccuugggcgacucaucaccaaguagcucauccacccccgcaucuggauguucuucccccaacgacucugaacaugggccgaaucccauccucggaagugaagccuuacuggggcagcgccugagacugcaggagaccagcgucgcccccuuugcccugccaacgguguccuuguuaccagccauaacuuugggccugcccgcgccagcgagagcagacuccgauaggcgcacucacccuacccucgggccacgcggacccauacuugggagcccacauacuccacucuuucuuccucaugguuuggagccugaagcagguggcaccuugccgagccgucugcagccuauucugcuucucgacccgagcggcucucacgcuccccuacuuacgguccccgguuuggguccucugccauuucauuucgcacagucacugaugaccacagaaaggcucucaggcucaggucuucacuggccgcucagcagaacacgauccgaaccccugccaccaucugcuaccgcacccccuccgccgggcccuaugcagccuaggcuggagcagcugaagacacacgugcaagugaucaaaagaucugccaagccuucugagaaaccacgccuucgccagauaccgagcgccgaggaucuggagacugauggugguggccccggacaggugguggaugacggacuugagcacagagaacuggggcacggccagcccgaggcccggggccccgccccguugcagcaacacccacaagucuugcucugggaacaacagcgguuggcgggcaggcuuccucgggggagcaccggggacacaguacuccugccauuggcccaggggggccacaggccccucucaagagcucagaguucacccgccgcccccgcaucgcucagugcaccagagcccgcuucacaggcuagggugcuguccucgucagagaccccagccagaacccugccauuuacuacgggccugaucuaugacucaguaaugcugaagcaccaguguucuugcggcgauaacagccgccacccagaacacgcugggcguauacaaucaauuuggucgcgcuugcaagagagagggcuuaggagucaaugcgagugucugagaggucgcaaagccagucuggaggaacugcagucuguccauuccgaaagacauguuuuacucuacgggaccaauccccugucucgguugaagcuugauaauggcaaacuggcaggcuugcuugcccaacgaauguuugucaugcugccuuguggcggagucgguguagacacagacaccaucuggaaugaguuacacucaucaaacgcugcacgaugggccgcugguucuguuacugaucuagcuuucaagguggcauccagagaacucaagaacggcuucgcgguggugagaccaccaggccaucaugcugaccauagcacugccaugggcuucugcuucuuuaacaguguggccaucgcuugucgacagcuacaacagcaauccaaagccucuaaaauacuuauaguggauugggacguucaucacggaaacggaacacagcaaaccuucuaccaagaccccucaguguuguacaucucucuucauagacacgaugacgggaauuucuuucccggcuccggcgcaguggacgagguaggagcagggaguggggaaggauuuaacgucaacguugcuugggccggcggccuugaucccccaaugggggaucccgaauaccuggccgccuuucggauugucgugaugcccauugccagagaguuuuccccagaucugguguuagucucagcuggcuucgaugcugccgagggucacccagccccucucggagguuaccacguuuccgccaaguguuucggcuacaugacccagcaguugaugaaccucgccggcggugcagugguucuugcccuggagggagggcaugaucugacugcuauaugcgaugcgagcgaagccuguguugccgcucugcugggcaaccgggucgacccccugucggaggagggcuggaagcagaagccuaacuuaaacgccauuagaucacuggaagcaguaauucgugugcacaguaaauacugggguugcaugcaaaggcucgcaucuuguccugauagcugggugccaagggucccuggcgcugauaaggaggaaguggaggcugugacagcgcuugcaucccuaaguguugggaucuuagcagaggauagaccaagcgaacaauugguggaggaggaagagccuaugaaccuguag

SEQ ID NO: 186466 - RNA, 2976 nt, Artificial Sequence
  derived and/or modified sequence
augcacagcccuggagccgacggcacccaaguaagucccggcgcccacuacuguaguccaacuggagccgguuguccuagaccaugcgcugacaccccagggccucagccccagcccauggaccugcgaguuggucagagaccucccguugaaccccccccagaaccuacgcugcucgcucuucagcggccucagagacuccaccaccaucuguuccuggcgggacuccaacaacagcgcagcguggaaccuaugagacucuccauggauaccccuaugcccgagcugcaggucggcccacaggagcaggaacuuagacaacuccugcacaaagacaaaagcaagaggagcgccguagcaagcagugugguuaagcagaaguuagccgaagucauccucaaaaagcagcaggccgccuuggagcgcacgguucacccuaacucucccggaauucccuauaggacauuggagccucucgaaaccgagggggcaaccagaagcaugcugaguaguuuucuccccccaguucccagccucccuuccgauccaccagaacauuucccauuacgaaagacugucuccgaacccaaccuaaaguugcguuacaagcccaaaaagagucucgagcgaagaaagaacccucugcuucgcaaagagagcgccccuccuucccugaggcggagaccugcugaaacacugggagauucuagcccuuccucauccaguaccccggccuccggcuguucuucccccaacgacagugaacacgggccaaauccgauucuggguucugaagccuuacugggccagagguugcgacugcaggagaccaguguugccccauucgcucugccuaccguuagucuguuaccugcuauaacuuuaggauugccagcgccagccagggccgauucagaccgccgcacccaucccacccucgggccccgcgggccaauacugggcucuccacauaccccccuguuucuaccacacggccucgagccugaagccggaggaacucuuccuuccagacuacagccuauucugcuuuuagacccuagcggcucacaugccccacuuuugacaguucccggucuuggcccucugccauuucacuucgcgcagagucuuaugacaaccgagagguugagcgguaguggccuccacuggccuuugaguagaacuaggagcgaaccauugccucccagcgccacagcaccgcccccaccaggacccaugcaaccacgauuagagcagcugaaaacacaugugcaggugauaaaaagaagcgcaaagcccuccgagaaaccuagauuaaggcaaauuccaagugcagaggaucucgaaacagaugggggcggcccaggacagguuguggacgauggguuagagcaccgagaacuugggcauggacagcccgaagcccgcggccccgcuccuuugcagcagcacccucagguucuucuaugggagcagcagcgacucgccggaagacugccucgaggcucuaccggcgacacagugcuacucccucuggcccaaggaggucaucggccacugucacgcgcucaguccagccccgcugcccccgcuucccuuagugccccggagcccgccagucaggcucgcguccuguccucuuccgaaacuccugcccgcacucuccccuucaccacaggccugaucuaugacaguguuauguugaaacaccaguguucaugcggagacaacucacggcacccugaacacgcugggcggauccaaucuaucuggagcaggcuucaggagagggggcugagaucacaaugcgaaugucugaggggacgaaaagcaagucuggaggagcugcagagugugcauagugagagacacguguuacuauacggaaccaacccucugagcaggcuuaaacuggauaauggcaaacuggcaggccuucuagcccaacgaauguuuguaaugcuaccuuguggcgguguuggaguggauacagauaccauuuggaacgaacuucauagcagcaacgcagcacggugggcugcaggauccgucaccgaccuugcauucaagguggccagccgggagcugaagaaugguuucgccgucguccgcccucccggccaccacgcagaccauuccacugccaugggauucugcuucuuuaacucaguagccauugcuugcagacaauugcagcaacagucgaaagcuuccaaaauacuaauugucgacugggaugugcaucacggcaacgguacccagcagacauuuuaccaagauccgucaguacucuacaucucucugcaccgccacgaugauggaaauuuuuucccuggaucaggggccguugacgaggucggcgcuggcuccggggaagguuucaaugugaaugucgccugggccggagggcucgauccucccaugggagaucccgaguaccuagcagcauuuagaauagucguuaugccaauugcccgcgaauuuucccccgaccuagucuuggugucagccgguuucgaugccgccgaaggucacccugccccuuuagggggguaccauguaagcgcgaaauguuuugguuacaugacgcaacaguugaugaaccuugccggaggagccgugguucucgccuuagagggaggccacgaccugaccgcgaucugugaugccucugaagcuugugucgcagcauugcugggaaauaggguugacccuuuaagugaagaaggcuggaagcaaaaacccaacuugaaugccauaagguccuuggaggccgucauacggguucauaguaaguacuggggcugcaugcagagacuagccaguugccccgacucuuggguucccaggguuccuggugcggacaaagaggaagucgaagccgugaccgcccucgccucgcugagcguagggauuuuagccgaagacagaccaucagaacagcugguugaggaggaggagccgaugaacuuauag

SEQ ID NO: 186467 - protein, 524 aa, Artificial Sequence
  derived and/or modified sequence
MANSAGFLGDLTTEGINKPGFYKGPAGSQVTLSSLGNQTRVLLEEQARHLLNEQEHATMAYYLDEYRGGSVSVEALVMALFKLLNTHAKFSLLSEVRGTISPQDLERFDHLVLRREIESMKARQPPGPGAGDTYSMVSYSDTGSSTGSHGTSTTVSSARNTLDLEETGEAVQGNINALPDVSVDDVRSTSQGLSSFKPLPRPPPLAQGNDLPLGQPRKLGREDLQPPSSMPSCSGTVFSAPQNRSPPAGTAPTPGTSSAQDLPSSPIYASVSPANPSSKRPLDAHLALVNQHPIGPFPRVQSPPHLKSPSAEATVAGGCLLPPSPSGHPDQTGTNQHFVMVEVHRPDSEPDVNEVRALPQTRTASTLSHLSDSGQTLSEDSGVDAGEAEASAPGRGRQSVSTKSRSSKELPRNERPTDGANKPPGLLEPTSTLVRVKKSAATLGIAIEGGANTRQPLPRIVTIQRGGSAHNCGQLKVGHVILEVNGLTLRGKEHREAARIIAEAFKTKDRDYIDFLVTEFNVML

SEQ ID NO: 186468 - protein, 907 aa, Artificial Sequence
  derived and/or modified sequence
MNAPLDGLSVSSSSTGSLGSAAGAGGGGGAGLRLLSANVRQLHQALTALLSEAEREQFTHCLNAYHARRNVFDLVRTLRVLLDSPVKRRLLPMLRLVIPRSDQLLFDQYTAEGLYLPATTPYRQPAWGGPDSAGPGEVRLVSLRRAKAHEGLGFSIRGGSEHGVGIYVSLVEPGSLAEKEGLRVGDQILRVNDKSLARVTHAEAVKALKGSKKLVLSVYSAGRIPGGYVTNHIYTWVDPQGRSISPPSGLPQPHGGALRQQEGDRRSTLHLLQGGDEKKVNLVLGDGRSLGLTIRGGAEYGLGIYITGVDPGSEAEGSGLKVGDQILEVNGRSFLNILHDEAVRLLKSSRHLILTVKDVGRLPRARTTVDETKWIASSRIRETMANSAGFLGDLTTEGINKPGFYKGPAGSQVTLSSLGNQTRVLLEEQARHLLNEQEHATMAYYLDEYRGGSVSVEALVMALFKLLNTHAKFSLLSEVRGTISPQDLERFDHLVLRREIESMKARQPPGPGAGDTYSMVSYSDTGSSTGSHGTSTTVSSARNTLDLEETGEAVQGNINALPDVSVDDVRSTSQGLSSFKPLPRPPPLAQGNDLPLGQPRKLGREDLQPPSSMPSCSGTVFSAPQNRSPPAGTAPTPGTSSAQDLPSSPIYASVSPANPSSKRPLDAHLALVNQHPIGPFPRVQSPPHLKSPSAEATVAGGCLLPPSPSGHPDQTGTNQHFVMVEVHRPDSEPDVNEVRALPQTRTASTLSHLSDSGQTLSEDSGVDAGEAEASAPGRGRQSVSTKSRSSKELPRNERPTDGANKPPGLLEPTSTLVRVKKSAATLGIAIEGGANTRQPLPRIVTIQRGGSAHNCGQLKVGHVILEVNGLTLRGKEHREAARIIAEAFKTKDRDYIDFLVTEFNVML

SEQ ID NO: 186469 - protein, 345 aa, Artificial Sequence
  derived and/or modified sequence
MNAPLDGLSVSSSSTGSLGSAAGAGGGGGAGLRLLSANVRQLHQALTALLSEAEREQFTHCLNAYHARRNVFDLVRTLRVLLDSPVKRRLLPMLRLVIPRSDQLLFDQYTAEGLYLPATTPYRQPAWGGPDSAGPGEVRLVSLRRAKAHEGLGFSIRGGSEHGVGIYVSLVEPGSLAEKEGLRVGDQILRVNDKSLARVTHAEAVKALKGSKKLVLSVYSAGRIPGGYVTNHIYTWVDPQGRSISPPSGLPQPHGGALRQQEGDRRSTLHLLQGGDEKKVSGVGKGGQPLRHRILPPNPEQQSCLEAARRGWFCPGSVFPQVCTEGWCFFFAFLFDLCSVCYNTG

SEQ ID NO: 186470 - protein, 556 aa, Artificial Sequence
  derived and/or modified sequence
MHGSLEALLFLPQVTLSLAHAHLICSNAQLEMCVFPHRFLGDLTTEGINKPGFYKGPAGSQVTLSSLGNQTRVLLEEQARHLLNEQEHATMAYYLDEYRGGSVSVEALVMALFKLLNTHAKFSLLSEVRGTISPQDLERFDHLVLRREIESMKARQPPGPGAGDTYSMVSYSDTGSSTGSHGTSTTVSSARNTLDLEETGEAVQGNINALPDVSVDDVRSTSQGLSSFKPLPRPPPLAQGNDLPLGQPRKLGREDLQPPSSMPSCSGTVFSAPQNRSPPAGTAPTPGTSSAQDLPSSPIYASVSPANPSSKRPLDAHLALVNQHPIGPFPRVQSPPHLKSPSAEATVAGGCLLPPSPSGHPDQTGTNQHFVMVEVHRPDSEPDVNEVRALPQTRTASTLSHLSDSGQTLSEDSGVDAGEAEASAPGRGRQSVSTKSRSSKELPRNERPTDGANKPPGLLEPTSTLVRVKKSAATLGIAIEGGANTRQPLPRIVTIQRGGSAHNCGQLKVGHVILEVNGLTLRGKEHREAARIIAEAFKTKDRDYIDFLVTEFNVML

SEQ ID NO: 186471 - DNA, 1575 bp, Artificial Sequence
  derived and/or modified sequence
atggcaaattcggctgggttcctgggagacctaactaccgaagggataaacaaaccaggcttctataagggacctgctggttcgcaagtcaccttaagctccctgggtaaccagaccagggtcctgttggaagaacaggcgcgccacctgcttaacgaacaagagcatgctactatggcttattatctggatgagtacaggggaggctccgtgtcagtggaagccttagtcatggcactgttcaagttactaaacacacatgccaagtttagcttactctcagaagtgcgtggaacaatttcaccacaagacctcgagaggtttgatcacctcgtgttgcgccgcgaaatcgagtccatgaaggctagacagccccctggccccggcgccggcgatacatattctatggtgagctactccgacacaggatcatcgaccgggagtcatggcacaagcactactgtgtcgtccgcgcgaaacaccctggatcttgaagagacaggggaggccgtccagggcaacatcaacgctctgccagacgtgtctgtggacgacgtgcgatccacgtcccagggcctgtcctcttttaagccgctccctagacctccaccccttgcccaggggaatgatcttcctttgggacagccacgcaaacttgggcgagaagatctccagcccccatcctcaatgcctagttgtagcggtactgtatttagcgctccccagaaccggtcccccccagctgggacagccccaacccccgggaccagttccgcacaagatctgcctagtagccccatctatgcatcagttagccccgccaatccgagcagcaaacgccccctcgatgctcatctcgcactggtgaatcaacaccccatcggcccttttccgcgggttcagagccccccccatttgaagtcaccttccgccgaggccactgtggcagggggatgtctgctgcctccgtcccccagcggacaccctgaccagaccggaacgaaccagcatttcgtcatggttgaggttcaccggccagactctgagcccgacgtgaatgaagtgagggcattaccccagactcgaaccgcttcaacgctgtcgcacttgagcgactcagggcagaccctctcagaagacagtggcgtcgacgccggcgaagcggaagccagtgctcctggcagaggtaggcaatcggtatccaccaaatcacgcagcagcaaagagttgccacggaatgagcggcctacagacggtgccaataagccgcccggcctgctggagccaacatcaacacttgtgcgtgtgaagaaatccgccgccaccctcggtatagccatcgagggcggggccaatactcggcaaccacttcctcgtatcgtcacgatccagagagggggctccgctcacaactgcggacagttaaaggttggccacgtaatcttagaggtgaatggcctgacccttaggggcaaggagcacagagaagcggctcgtattatcgccgaggctttcaaaactaaggatagagattacattgatttcctggtgaccgaattcaacgtcatgctgtag

SEQ ID NO: 186472 - DNA, 2724 bp, Artificial Sequence
  derived and/or modified sequence
atgaatgctcctctggacggattgtccgtcagtagtagcagcactggctccctcgggtcagcagctggtgccggaggcggtggcggggctggacttcgcttgctgagcgcaaacgtgcgccaactccatcaagccctgacagcacttctgtccgaggccgagagggaacagtttacccattgcctcaacgcataccacgccagacggaatgtttttgacttggtgcgaactctccgagtactgttagattcgcctgtcaagaggcggctgctgccaatgctgcgactggtcattcccaggtcggatcagctgctcttcgatcagtacactgccgagggcctctacctccccgctacaacgccatataggcaacctgcttggggcgggcccgatagtgctggacccggcgaagttagactggtgtctctcaggcgggcaaaagcccatgagggcctcggattctctatccgcgggggcagcgaacatggggtagggatctatgtgtccttggtggagcccgggagcctggctgaaaaagaaggtctccgggtgggggaccagattctcagggtgaacgataaaagcttggcccgcgtgacccacgccgaagccgtcaaagcacttaaagggtccaagaaactggttctcagcgtgtattccgcaggccgaatccccggaggctacgtgactaaccatatctatacatgggtcgatccgcaaggcaggtctataagccctccctccggcctccctcagccacacgggggagcactgaggcagcaggagggggatagaaggtccacgcttcaccttctgcaggggggggacgaaaagaaggtgaatctggtgctaggtgatggacggtcgctggggctgactattcgcggtggagctgaatatgggcttggcatctacatcactggagttgatcccggatcagaagcagaaggttcaggcctcaaagtaggggaccagattttggaagtgaatgggcgctccttcctgaacattctccacgatgaggccgtccgtttgttgaaatcctcccgacacctgatcctgaccgtgaaggacgtgggacgcttgccacgcgcccggactaccgtcgacgagaccaaatggattgcctcatctagaattagggaaaccatggccaatagcgctggcttcctcggggatctcactactgaaggtatcaacaagccagggttctataagggtcctgcgggctctcaggttaccttgagtagtttaggtaaccaaacaagggttttgttggaggagcaagccagacacctactgaatgagcaggagcacgccacgatggcatactatctggacgagtaccgggggggaagcgttagcgtagaagctctggtgatggcccttttcaaattgttgaacacccacgctaaattctcactgctgtctgaagtgcgtggaaccatttccccacaggacctggagaggttcgatcatctcgtcttaagacgggaaattgagagcatgaaagcccggcagcctcccggaccaggcgcaggcgacacatatagcatggtgagctactcagacaccggttcatctaccgggtcgcatggaacctcgacaaccgtttcttcagcccggaacacattggacttggaagagaccggtgaggccgtgcaaggtaacataaacgctctacccgacgtttcagtggatgatgtgcggagcacttcccaaggtctctctagtttcaaaccactgccaagaccgcctcctctggcacagggcaatgatctgcctctaggccagcccaggaagctcggcagggaggatctccagccaccaagctcaatgccaagttgctccgggaccgtattttcggcgccccagaatcgatcacccccagctggcaccgccccgacacctggaacgagttccgctcaggacctcccctcttctcccatctatgccagcgtcagcccagccaacccttcgtccaagagacctttggatgcccatctggccttggtgaatcagcaccctatcgggcctttccctcgggtgcagtcgcctccacacctgaagtcaccaagcgctgaggccaccgtcgccggcggctgcctgctaccgccctcaccatctggccacccagaccaaacaggaactaatcaacacttcgtgatggttgaggttcaccgacctgattctgaacctgatgtgaatgaagttagagccttgccacagacaaggaccgcatcaaccctgtcacacctcagcgacagcggacagactctatcggaggattcaggagtagacgctggcgaggccgaggcctccgccccagggaggggccggcaatcggtgtccacaaagagcagatcatccaaagagctgccccgtaatgagcgcccaactgacggcgctaataaaccacctgggctcctagagcccacaagcacgttggtgcgagtgaaaaagagcgccgccaccctcggaattgccattgaagggggggcgaacactaggcagccactgccccgaattgtgacgattcagcggggaggaagcgcccacaattgcggccagctgaaagtcgggcatgtcatcttggaagtcaatggacttactcttcgtggcaaagagcatcgtgaggccgctagaattatcgctgaggcctttaagacgaaagaccgcgactacatagactttcttgtgaccgagtttaatgtgatgctctag

SEQ ID NO: 186473 - DNA, 1671 bp, Artificial Sequence
  derived and/or modified sequence
atgcacgggagcctggaagccctcttgttcttaccccaggtgacactgtcacttgcacatgcgcacttgatttgttccaatgcccagctggagatgtgtgtgttcccgcaccggttcctgggagatttaacgactgaggggataaacaaacccgggttctataagggcccagcaggaagccaggtgactctgagcagccttggcaaccagacacgggtgttactggaagagcaggcacgccacctccttaatgagcaggagcacgccaccatggcatactatctcgatgaatatcggggcggctcagtgtccgtggaggccttagtaatggccctgtttaagctgctgaacactcacgctaagttttcactgctcagcgaagtgaggggcactatttcacctcaggacttagaaagatttgatcatttggtccttcgacgggagatcgaatctatgaaagcacgacagccacctggcccaggggctggtgacacatattctatggtgtcctatagcgatactggcagcagcaccgggtcacacggcacctccacaacggtttcgtcagcacgcaatactctggaccttgaagaaaccggggaggcggtacaagggaacatcaatgctcttcctgacgtgtctgtggacgatgtacggtcgacatcccagggtttgagcagcttcaagcctctgccccgcccccccccactggcccagggaaatgacctgcccttgggacagcctagaaaacttggcagagaagatcttcagcctcccagctcaatgccatcttgttctgggacagtgttttccgctccccagaaccgctctccccccgcggggaccgcccccactcccggcaccagctcagcccaggatcttcccagctctcccatatatgcatcagttagccccgctaacccgagctccaagcgtcccctggacgcccacctcgcactcgttaaccaacaccccattggtccatttcctagagttcagtcacctcctcatcttaagtccccttccgcggaagcaacggttgctggcggctgcctcctgccaccctcaccatcaggccatccagaccagaccggcaccaaccaacattttgttatggtcgaagtgcacagacctgattcggagcctgacgttaacgaagtgcgggccctgccgcagacgcgaaccgccagtacactgtcacacctgagtgacagtgggcagacactgagcgaagactctggcgtagacgcgggagaggccgaagcctccgcccccggcagagggcgccaaagcgtctccactaagtccaggtcatctaaggagctcccgcggaacgagcggccaactgacggagctaataagccacccggactgctggaaccaacgtctaccctcgttcgcgtcaagaaatctgcagcaaccctgggaatagctatcgaggggggagctaatacaaggcagccccttccaaggatcgtgactatacagcgcggcggcagtgctcacaattgcgggcagctgaaggtgggccatgtgatcctcgaggtcaacggactcacgttaagggggaaggagcatagagaggcagccagaatcattgctgaggcctttaaaaccaaggaccgcgactatatcgattttctggtgactgagtttaatgtgatgctctag

SEQ ID NO: 186474 - DNA, 1575 bp, Artificial Sequence
  derived and/or modified sequence
atggccaacagcgctggcttcctgggggacctgaccacagagggcatcaacaagccaggcttctacaagggccctgctggcagccaggtgaccctgagcagcctgggcaaccagaccagggtgctgctggaggagcaggcccggcacctgctgaatgagcaggagcacgccaccatggcctactacctggatgagtaccggggcggctctgtgtctgtggaggccctggtgatggccctcttcaagctgctgaacacccacgccaagttcagcctgctgtctgaggtgcggggcaccatcagcccccaggacctggagagatttgaccacctggtgctgcggcgggagattgaatccatgaaggcccggcagcccccaggccctggggccggggacacctacagcatggtgtcctacagcgacaccggcagcagcacaggcagccacggcaccagcaccaccgtgtcctctgccaggaacaccctggacctggaggagactggagaggccgtgcagggcaacatcaatgccctgcctgatgtgtctgtggatgatgtgcgcagcaccagccagggcctgagcagcttcaagcccctgccccggcccccacccctggcccagggcaatgacctgcccctgggccagcccaggaagctgggccgggaggacctgcagccccccagctccatgcccagctgcagcggcaccgtcttcagcgccccccagaacagaagccccccagctggaacagcccccaccccaggcaccagcagcgcccaggacctgcccagcagccccatctatgcctctgtgtccccagccaaccccagcagcaagaggcccctggatgcccacctggccctggtgaaccagcaccccatcggccccttcccccgggtgcagagccccccccacctgaagagccccagcgctgaggccaccgtggccggcggctgcctgctgccccccagccccagcggccacccagaccagacaggcaccaaccagcactttgtgatggtggaggtgcacaggccagacagcgagccagatgtgaatgaggtgcgggccctgccccagaccaggacagccagcaccctgagccacctgagtgacagcggccagaccctgtctgaagattctggagtggatgctggggaggccgaggccagcgcccctggccggggccggcagagcgtgtccaccaagagccgcagcagcaaggagctgcccagaaatgaaagacccacagatggagccaacaagcccccaggcctgctggagcccaccagcaccctggtgcgggtgaagaagtctgctgccaccctgggcatcgccattgaaggaggagccaacacccggcagcccctgccccgcatcgtgaccatccagaggggcggcagcgcccacaactgtggccagctgaaggtgggccacgtgatcctggaggtgaatggcctgaccctgcggggcaaggagcaccgggaggccgcccgcatcatcgccgaggccttcaagaccaaggaccgggactacatcgacttcctggtgacagagttcaacgtgatgctgtag

SEQ ID NO: 186475 - DNA, 2724 bp, Artificial Sequence
  derived and/or modified sequence
atgaatgcccccctggatggcctgtctgtgagcagcagcagcacaggcagcctgggcagcgctgctggggccggcggcggcggcggggccggcctgcggctgctgagcgccaacgtgcggcagctgcaccaggccctgacagccctgctgtctgaggccgagcgggagcagttcacccactgcctgaatgcctaccacgccaggagaaatgtgtttgacctggtgaggaccctgcgggtgctgctggacagccctgtgaagaggcggctgctgcccatgctgcggctggtgatccccaggagtgaccagctgctgtttgaccagtacacagctgagggcctgtacctgcctgccaccaccccctaccggcagcctgcctggggcggccctgacagcgctggccctggagaggtgcggctggtgtccctgcggcgggccaaggcccacgagggcctgggcttcagcatccggggcggcagcgagcacggcgtgggcatctacgtgtccctggtggagcccggcagcctggccgagaaggagggcctgcgggtgggggaccagatcctgcgggtgaatgacaagagcctggcccgggtgacccacgccgaggccgtgaaggccctgaagggcagcaagaagctggtgctgtctgtgtacagcgctggccgcatccctgggggctacgtgaccaaccacatctacacctgggtggacccccagggccgcagcatcagcccccccagcggcctgccccagccccacggcggggccctgcggcagcaggagggggacagaagaagcaccctgcacctgctgcagggcggagatgagaagaaggtgaacctggtgctgggagatggccgcagcctgggcctgaccatccggggcggcgcagaatatggcctgggcatctacatcactggagtggaccccggcagcgaggccgagggcagcggcctgaaggtgggggaccagatcctggaggtgaatggccgctccttcctgaacatcctgcatgatgaggccgtgcggctgctgaagagcagccgccacctgatcctgactgtgaaggatgtgggccgcctgccccgggcccggaccaccgtggatgagaccaagtggatcgccagcagccgcatccgggagaccatggccaacagcgctggcttcctgggggacctgaccacagagggcatcaacaagccaggcttctacaagggccctgctggcagccaggtgaccctgagcagcctgggcaaccagaccagggtgctgctggaggagcaggcccggcacctgctgaatgagcaggagcacgccaccatggcctactacctggatgagtacagaggaggctctgtgtctgtggaggccctggtgatggccctcttcaagctgctgaacacccacgccaagttcagcctgctgtctgaggtgcggggcaccatcagcccccaggacctggagagatttgaccacctggtgctgcggcgggagattgagagcatgaaggcccggcagcccccaggccctggagctggggacacctacagcatggtgtcctacagcgacaccggcagcagcacaggcagccacggcaccagcaccaccgtgagcagcgccaggaacaccctggacctggaggagaccggggaggccgtgcagggcaacatcaatgccctgcctgatgtgtctgtggatgatgtgcgcagcaccagccagggcctgagcagcttcaagcccctgccccggcccccacccctggcccagggcaatgacctgcccctgggccagcccaggaagctgggccgggaggacctgcagccccccagctccatgcccagctgcagcggcaccgtcttcagcgccccccagaacagaagccccccagctggaacagcccccaccccaggcaccagcagcgcccaggacctgcccagcagccccatctatgcctctgtgtccccagccaaccccagcagcaagaggcccctggatgcccacctggccctggtgaaccagcaccccatcggccccttcccccgggtgcagagccccccccacctgaagagccccagcgctgaggccaccgtggccggcggctgcctgctgccccccagccccagcggccacccagaccagacaggcaccaaccagcactttgtgatggtggaggtgcacaggccagattctgagccagatgtgaatgaggtgcgggccctgccccagaccaggacagccagcaccctgagccacctgagtgacagcggccagaccctgtctgaggacagcggcgtggatgctggggaggccgaggccagcgcccctggccggggccggcagagcgtgtccaccaagagccgcagcagcaaggagctgcccagaaatgaaagacccacagatggagccaacaagcccccaggcctgctggagcccaccagcaccctggtgcgggtgaagaagtctgctgccaccctgggcatcgccatcgagggcggggccaacacccggcagcccctgcccagaattgtgaccatccagagaggaggcagcgcccacaactgtggccagctgaaggtgggccacgtgatcctggaggtgaatggcctgaccctgcggggcaaggagcaccgggaggccgcccgcatcatcgccgaggccttcaagaccaaggaccgggactacatcgacttcctggtgacagagttcaacgtgatgctgtag

SEQ ID NO: 186476 - DNA, 1671 bp, Artificial Sequence
  derived and/or modified sequence
atgcacggcagcctggaggccctgctcttcctgccccaggtgaccctgagcctggcccacgcccacctgatctgcagcaatgcccagctggagatgtgtgtgttcccccaccgcttcctgggggacctgaccacagagggcatcaacaagccaggcttctacaagggccctgctggcagccaggtgaccctgagcagcctgggcaaccagaccagggtgctgctggaggagcaggcccggcacctgctgaatgagcaggagcacgccaccatggcctactacctggatgagtaccggggcggctctgtgtctgtggaggccctggtgatggccctcttcaagctgctgaacacccacgccaagttcagcctgctgtctgaggtgcggggcaccatcagcccccaggacctggagagatttgaccacctggtgctgcggcgggagattgaatccatgaaggcccggcagcccccaggccctggggccggggacacctacagcatggtgtcctacagcgacaccggcagcagcacaggcagccacggcaccagcaccaccgtgtcctctgccaggaacaccctggacctggaggagactggagaggccgtgcagggcaacatcaatgccctgcctgatgtgtctgtggatgatgtgcgcagcaccagccagggcctgagcagcttcaagcccctgccccggcccccacccctggcccagggcaatgacctgcccctgggccagcccaggaagctgggccgggaggacctgcagccccccagctccatgcccagctgcagcggcaccgtcttcagcgccccccagaacagaagccccccagctggaacagcccccaccccaggcaccagcagcgcccaggacctgcccagcagccccatctatgcctctgtgtccccagccaaccccagcagcaagaggcccctggatgcccacctggccctggtgaaccagcaccccatcggccccttcccccgggtgcagagccccccccacctgaagagccccagcgctgaggccaccgtggccggcggctgcctgctgccccccagccccagcggccacccagaccagacaggcaccaaccagcactttgtgatggtggaggtgcacaggccagacagcgagccagatgtgaatgaggtgcgggccctgccccagaccaggacagccagcaccctgagccacctgagtgacagcggccagaccctgtctgaagattctggagtggatgctggggaggccgaggccagcgcccctggccggggccggcagagcgtgtccaccaagagccgcagcagcaaggagctgcccagaaatgaaagacccacagatggagccaacaagcccccaggcctgctggagcccaccagcaccctggtgcgggtgaagaagtctgctgccaccctgggcatcgccattgaaggaggagccaacacccggcagcccctgccccgcatcgtgaccatccagaggggcggcagcgcccacaactgtggccagctgaaggtgggccacgtgatcctggaggtgaatggcctgaccctgcggggcaaggagcaccgggaggccgcccgcatcatcgccgaggccttcaagaccaaggaccgggactacatcgacttcctggtgacagagttcaacgtgatgctgtag

SEQ ID NO: 186477 - DNA, 1575 bp, Artificial Sequence
  derived and/or modified sequence
atggccaacagcgccggcttcctgggcgacctgaccaccgagggcatcaataaacctggcttttacaaaggcccagctgggtcccaagtgacactaagttcactgggcaaccaaactagagtcttactggaggagcaggctcgccacttactgaatgaacaggagcatgccacaatggcgtactacttggatgaatatcgaggtgggtcggtaagtgttgaagctctggtgatggcactttttaagctcctgaacactcatgcgaagttttcattactaagtgaggtgcgcggcactattagtccccaagacctggagaggttcgaccacctcgtgctgaggcgcgaaattgagagcatgaaagcgagacaaccgcctgggcctggcgccggagatacttattccatggtgtcttattctgatacgggctccagcacgggatcgcacggcaccagcacaacagtcagctccgcaagaaacaccttagacttggaagagactggcgaggcagtgcaagggaacatcaatgccctgcccgacgtgtctgtggatgatgtgagatccaccagtcagggcctctctagtttcaaaccactcccccgccccccaccactagctcaaggaaacgatctgccactgggtcagcccaggaaactgggacgggaggatttgcagcctcctagctccatgccttcttgtagcgggaccgttttttcagcaccccagaaccggtcacctcctgccggaactgcgccaactccaggcacttctagtgcccaggacttaccatcctctccaatctacgcaagcgtctccccggcaaaccccagcagcaagagacccttggatgcccacctggcactggttaaccagcaccccatcggaccttttccaagggtccagagcccccctcatctcaaaagcccctctgctgaggccacagtggctggtggatgcctactaccaccatcaccgagtgggcaccctgaccagacgggtaccaaccagcactttgtgatggtggaggtgcacaggcctgattccgagcccgacgtgaatgaagtgcgagccctgcctcaaactcgaaccgctagtactctctcccatcttagtgattccgggcagactctttctgaggattctggcgtggacgccggagaggctgaagcatctgcccctggacgcggcaggcaatcagtaagcacaaagagccgcagttcaaaggaacttccccgcaacgagaggcccaccgatggcgccaataaaccaccagggctgctggagcccacctccaccctggtgcgcgtaaagaagagcgccgcgactttgggaattgctattgaagggggcgcaaatactaggcagcctctccccagaattgtaaccatccaaaggggaggatccgcccacaattgcggacagctcaaagtcggccatgtgatcctggaggtaaacggtctgactctccgggggaaggagcacagggaagccgcacggattattgccgaggccttcaagactaaggaccgggattacatcgacttcctggttacagagttcaacgttatgctgtag

SEQ ID NO: 186478 - DNA, 2724 bp, Artificial Sequence
  derived and/or modified sequence
atgaacgcccccctggacggcctgagcgtgagcagcagcagcaccgggtcccttggatctgctgcaggcgccggaggtggcggcggagcaggcctgagacttctgtcagctaacgtgcggcagctgcaccaagctcttactgctctgctgtccgaagccgaaagagagcagttcacccactgtctcaatgcctaccatgcccgtaggaatgtgttcgaccttgtgaggactctgcgcgtgctgctcgactccccagtaaaacgcaggttactgccgatgctgcgactggtgatccctaggagcgatcagcttctgttcgatcaatacacagcagaagggctctacttgccagctactacaccctatcgtcaaccggcctggggtgggccggattccgcaggccccggggaagtgcgccttgtgagtctaaggcgggctaaagcacatgagggcttgggttttagcattcggggcgggtctgagcatggcgtgggcatctatgtgagcctcgtggagcccggtagcctggcagagaaggagggcctgcgcgttggagaccagattctacgggtgaatgacaaaagcctcgcaagggtcacacacgctgaggctgttaaggcactgaaagggtcaaaaaaactcgttttgagcgtctattccgctggacgcatccccggagggtacgtgacaaaccatatctatacatgggttgatcctcagggccgatctatctctccccccagcgggttgcctcaaccccatggaggggcactgcgtcaacaggagggggaccggcggtctaccctgcacctgttgcaagggggtgacgagaagaaggtcaacctagtgctgggcgacggccggtccctgggcctgactattcgcggaggggcagaatatggactgggaatctatattaccggagtagaccctgggagtgaggcagagggctctgggctgaaggttggcgaccagatcctggaggtgaatggacgctcgttcctcaacattttgcacgacgaggcggtccggctcttgaagtcgagtagacatctgatcttgacagtgaaggacgtggggcgccttcctagagcaaggactacggtggatgagacaaaatggatcgcctcctcacggatccgggagacgatggcgaactctgccggtttccttggagatcttaccactgaaggaatcaataaacctggattctacaagggtcctgctgggagccaggtcacactgtctagtttaggaaatcaaacacgtgttttgctggaggagcaggcgcggcacttgcttaacgagcaggagcacgccacaatggcttattacctggacgagtatcggggcggctccgtgtctgtcgaagcactagtcatggcgctatttaagctgctgaacacacatgccaagtttagcctccttagtgaggtaaggggcacgattagcccccaggacctggagagatttgatcacctcgtgctgcgtcgagagatagagagtatgaaggcacgccagcctccaggccctggtgctggcgacacctactcaatggtgtcctacagcgacacaggatcttctacaggatcacatggaacctcaaccactgtgagttctgcccgtaacaccttagatcttgaggaaactggtgaagcggtgcaggggaacatcaatgccctccctgatgtcagcgtggatgatgtgcggtctacttcccaggggctcagcagctttaagccgctgcctaggccaccaccactggcacagggaaatgacctgcctctggggcaacctaggaaactcggccgggaggatcttcagcccccaagttcaatgccctcttgcagcgggactgtcttttctgcacctcagaatcggagccccccagcgggaaccgcgccaacacctggtacttctagcgcacaggacttgcctagttccccaatctacgcatccgtgagccctgccaacccttccagcaagagacctctggacgcacacctggcgctggtgaaccagcatcctatcggtccgtttcctcgcgtgcagagtcccccacaccttaagagcccttccgccgaggctaccgtagccggaggttgtttgcttcccccttctcccagtggccacccggatcaaacagggaccaatcagcactttgtcatggtcgaggtgcacaggcccgattccgagcccgatgtgaatgaagtgagagcattgccccagacccgaactgcttctaccctgagtcacctgtcagattctggacaaaccctgagtgaggacagcggcgtggacgctggagaagccgaagcatctgcccctggtcggggaagacagagcgtctccaccaaaagtcgtagtagcaaagagctcccgcgtaacgagcgtccgactgatggtgccaataaaccgcctggcttgctcgaacccacatctactctggtgcgggtcaaaaagagtgctgcaactctcgggattgcaatcgagggaggggccaacaccagacagccactcccaagaatcgtgacaattcagcgtggcggatccgcgcataattgtggacaactaaaggtggggcatgtaatactggaggtgaacgggctgacacttcgggggaaggagcaccgggaagcggctcgcataatcgcagaggcctttaaaactaaggaccgggattacatcgacttcctggtgaccgaattcaatgtgatgctgtag

SEQ ID NO: 186479 - DNA, 1671 bp, Artificial Sequence
  derived and/or modified sequence
atgcacggcagcctggaggccctgctgttcctgccccaggtgaccctatcccttgcccacgcccaccttatatgctccaacgcccagctagaaatgtgcgtgttcccccatcggtttctgggggatctgaccaccgagggaattaataagcccggcttctataagggaccagccggttctcaggttacactgtcatcactcggaaatcagactcgggttctgctggaggagcaggcacggcaccttctgaacgagcaggaacatgctacgatggcctattacctggacgagtatcgcgggggcagtgtgtcagttgaagctctcgtcatggccctgtttaaattgctcaatacacatgccaagttctcactcctatccgaggtgagagggaccatctcacctcaggacttggaaagatttgaccacctcgtgctccgacgcgagatcgaatcaatgaaagcgaggcaacctccgggaccaggggccggcgatacttatagcatggttagttactccgatactggttccagcactggctctcacggaacatctacaaccgtttcatctgcccggaacaccctggatctggaggagactggcgaagccgtccagggcaacatcaatgccctgcctgatgtgagtgtcgacgatgttcgtagtacttctcaagggctcagcagcttcaagcctcttccccgaccaccacccctggcgcaaggcaatgaccttcctttgggacagccacgcaaactcggacgcgaggatctgcagccccctagtagcatgccttcatgctctgggacggtgttcagtgcccctcaaaatcggtctcccccggctggcaccgctcctacacccggtaccagctccgcccaggacctaccatcatctcccatatacgccagcgtgtctcccgcaaatccaagtagcaaacgtcccctggacgcacatctagcgctcgtgaatcagcaccctattggacccttccccagggtccaatctcccccccacctaaaatccccttctgcagaggctaccgttgcaggaggctgcctccttccaccctctccctcaggacatcctgaccagacgggcaccaatcagcacttcgttatggtcgaggtgcatcggccagatagcgagccagacgtcaatgaagttagggccttaccacagacgagaacagcctctaccctgtcacacctgtctgattccggacagaccctctccgaagactctggtgttgatgctggggaggcggaggcctccgccccagggagaggtcgccagtccgtaagcacaaagtcgagaagctcaaaagagctgccacgtaatgaacgtccaacagatggagccaataaaccacccggtctacttgagccgacatcaaccctcgtaagagtgaagaagtcagccgccaccctgggaatcgcgatagagggcggagcgaacacacgccagccactgccaagaatcgtcacaattcagcggggcggcagtgcccacaactgtggtcaactgaaggtcggacatgtgattttggaggtcaacggtctgacgctccgtgggaaggagcaccgggaagctgctagaattatcgccgaggcttttaaaaccaaggacagggactatattgactttctggtgacggagttcaatgtcatgttgtag

SEQ ID NO: 186480 - DNA, 1575 bp, Artificial Sequence
  derived and/or modified sequence
atggcaaattcagctggatttctgggcgatttgactaccgaggggattaataaacctggcttttacaagggaccggctggatcacaggtcacccttagctcacttggcaaccagacaagggtgctgctggaagagcaggcacggcatcttcttaatgagcaagagcacgcaactatggcatactatctggatgaatataggggcggatccgtctcagtggaggcgctggtcatggctcttttcaaacttctgaatacccatgcaaaattctctctcctctcggaggtgagaggaaccatctcacctcaggatctagagaggtttgatcacctggtcctgcgacgggaaattgagtctatgaaagccaggcaaccccctggtcctggagcaggagatacatattcaatggttagctacagtgatacaggctctagcacaggttcccatgggacgtcaaccacagtctcctcggcgagaaacacactcgatctggaggagactggggaagctgtccagggaaacataaatgcacttcccgatgtctctgttgacgacgtgaggagcaccagccagggactgagttccttcaaaccactccctcggccacctcctctcgcccagggaaatgaccttccattagggcaacccagaaagctgggtcgcgaagatcttcagcctcccagtagcatgccgtcctgttcaggaacggtcttctccgcaccccagaaccggtccccgcctgctgggactgcaccaacccccggaacgtcctccgcccaggacctcccttcttcccccatatacgcatctgtttcaccggctaatccatctagcaagcgcccactcgacgcccacctggcgcttgtaaaccaacaccctattgggcctttcccgagagttcagtctccaccgcatctaaagtcaccttcagcagaggcaacagtggccggtgggtgtctgctgcctcctagtcccagcggccatccagaccagactggaacgaatcaacacttcgtcatggtagaggtgcaccggccagatagcgaaccggacgttaatgaggttcgggctcttcctcagactcgtacagccagtacattatcacacctgtccgactctggccaaactctatcggaggacagcggagtcgatgccggagaagcggaagcttcggctcccggaagagggaggcagtccgtctctactaaaagtcggagtagtaaggagctgcctcgcaatgaaaggccaacagatggagctaataagcctcccggactgctggaaccaacgagtacgctggtacgcgttaagaagtccgcagccaccctcggaattgccattgaaggcggtgctaatactcgtcaaccgctgccgagaatcgtaactattcaaaggggcggatcagcccacaactgcggccaactaaaggtcgggcatgttatcttggaggtgaacgggcttactctgcggggaaaagagcatcgggaagcagccagaatcattgctgaggcctttaagactaaggacagagactacattgattttcttgtgacagagtttaatgttatgctctag

SEQ ID NO: 186481 - DNA, 2724 bp, Artificial Sequence
  derived and/or modified sequence
atgaatgcccctctggacggattgagtgtgagcagttccagtacaggaagtctgggttccgctgcaggggcaggtgggggtggaggagccggactgcgcttactgtccgcgaacgttcgacagctccatcaggctctcaccgctctcctgtcagaagctgagcgcgagcagtttacccactgcctcaacgcctaccatgcaagaaggaatgtgttcgatctggttaggaccctccgtgtactgttagatagccccgtgaaacgtcggttactccccatgctgagactggttatccctagaagtgatcaactgctgtttgatcaatacacggccgaaggcctgtacctgcctgctactacaccttatagacagcccgcttggggtggccctgattcggctgggccaggcgaggtcaggctcgtgtcccttcgaagagcgaaagctcatgaaggactaggcttttctattcgcggtggttccgagcatggggtcggtatctatgttagtcttgtggagcctggatctctggcagaaaaggaggggctgcgagttggcgatcagatactccgcgtcaacgataagtccttagcgcgtgtcacccatgccgaggccgttaaggctttaaaaggtagtaaaaaactagtgctaagtgtgtacagcgccggacgcatcccaggaggttacgtaacgaaccacatatacacctgggtcgatccacaggggagaagtatcagcccaccatcgggcctgccgcagccacacggcggagccctgcgccagcaggagggcgatcgccgttcaacattgcacctgttacaggggggagacgagaagaaggtcaatctggtgctaggtgacgggaggtctctcggcctgaccatccgcggtggagccgaatacggtcttggtatttacatcaccggcgtggacccaggcagtgaagctgagggctcgggcctcaaagtcggcgatcaaattctggaggtgaatggtaggagtttcctaaatatcctgcatgacgaagctgtgagactgctcaagagctcacgacatcttatactcaccgtgaaggatgtgggcaggctacccagggcgaggaccacagtggatgagaccaagtggatcgcaagctccaggatccgggaaacgatggcaaacagcgctggatttctgggcgatctgacaacagagggaatcaataaaccgggtttttataaaggaccagcgggaagccaggtgactctgtcaagcctgggcaatcaaacgagggtactgcttgaagaacaggcacgtcacctgctgaacgagcaagagcacgccactatggcctactaccttgacgaatacaggggaggcagtgtctctgtagaagctctggtcatggctttgttcaagcttctcaacacacatgctaaattctccttgttatcagaggtccggggaacaatatctccgcaggatctcgagaggttcgatcacctggtcctcagacgagagatagagagcatgaaggccaggcagcctcccggaccaggtgctggcgatacctatagcatggtgtcctacagcgataccggttcttcaactggatcgcatgggacttcaacgacggtttcaagtgcaagaaacaccctcgacctggaggagactggggaggccgtgcagggtaatattaacgcacttcccgatgtctctgtggacgatgtccggagtacaagccaggggctgtcttctttcaagcccttgcctaggcctccacccttggcccagggcaacgatttgcctctgggccagcccagaaagctgggacgtgaggatttacagcctccctcaagcatgccttcttgtagcgggaccgtcttctccgcaccacagaatcgctcaccaccagctggcacagcccctacccccggtaccagctccgctcaagatctcccttcctcaccgatttacgcctccgtgtccccagccaacccaagcagtaagcgcccactggacgcacaccttgcgctcgtgaatcaacatcctatcgggccattcccacgtgtgcagtcgcctccacacctcaaatcaccttccgcggaggctacggttgctgggggatgcttgctccccccaagcccctccggccatccagaccagactggcaccaaccagcactttgtaatggtcgaagttcatcgccctgacagtgagcccgatgtcaatgaggttcgcgctctgccacagactaggacagcatccacactgtcgcacctttctgacagcggccagactctcagtgaggatagtggtgtagacgctggtgaggccgaagcttcagccccaggtcgcggtagacagtcagtgagtaccaaatcacggtcctccaaagagctgccacggaatgagaggcccaccgacggcgctaacaaaccgcctggacttctggagccaaccagcactttggttcgagtaaagaaatctgccgctaccctgggaatcgctatcgagggtggtgccaatacccggcagcccctgcccaggatcgtcaccattcaaagggggggatccgcccataattgtggacaattgaaggtggggcatgtgatcttggaggtcaatggactgacacttcggggaaaagaacatcgcgaagctgccagaataattgctgaggcatttaagaccaaggatagagactacatagactttcttgtgacagaatttaatgtaatgctctag

SEQ ID NO: 186482 - DNA, 1671 bp, Artificial Sequence
  derived and/or modified sequence
atgcacggctcgctggaagctctgctctttctgccgcaggtaaccctcagcctggcccatgcacatctgatctgttccaatgcgcaactggagatgtgcgtcttcccgcataggtttctcggcgacctcaccactgaggggatcaacaaacctgggttctacaagggccctgccggatctcaagtgaccctttcttctctgggcaatcagacaagggtgcttctagaggaacaggcccgacacttgctgaatgaacaggagcacgccaccatggcctactatctggacgagtatagaggcggatcagtcagcgtggaagcgttggtcatggccttgtttaaactgctgaacacacatgccaaattctccctactgtctgaagtgaggggaacgatctccccccaggatctggaacgtttcgatcatttggtgctgagaagagagatcgaaagtatgaaagctcgacagcctcccggaccgggagccggagacacgtacagcatggtgagttacagcgacacagggagcagcaccggttcccacggaaccagcacgaccgtttctagtgcccgaaacactctagacttagaagaaaccggagaggctgtgcagggcaatataaatgccttacccgatgtcagcgttgatgacgtcaggagcacctcacagggattgtcctccttcaagcctctgccgaggccaccccctctagcacagggcaacgatctgccccttggacaacccagaaaactcggtcgggaggatcttcagcccccaagtagcatgccgtcatgtagtggaactgttttttcagctccacagaatcgcagtcccccagccggaaccgcccctacaccgggaacttcctccgcccaagacttaccatcgagtcccatttatgcatctgtcagccctgctaatccttctagcaagaggccactggacgcacatctggcgctcgttaatcagcatcccatcgggccttttcccagagtgcagtctccaccgcacttgaagtcaccctccgccgaggccacagtggctggcggttgcctgttgcctcctagtccttccggccatcctgaccagactggtaccaaccagcacttcgttatggtggaagtgcatcgtccggactctgagcccgatgtgaacgaagtcagagctcttccgcagacccgtacagcaagtacattaagccacttaagcgacagtggccagaccttgtcggaagacagtggtgtcgatgctggcgaagcggaggcttctgctcccggacgcggacgccagtcagtttctacaaaaagccgttccagcaaggaattgcccagaaatgaaaggcctaccgatggagcgaataaacctcctggactgttagaacctacatccaccctggttcgcgtaaagaagagtgcagcaactctcggcatcgccatcgagggcggagccaacacccgacagcctctccccaggatcgtgaccatccagagaggaggttctgcccataattgcggacagctgaaagtgggacacgtgatcctcgaggttaacgggctaaccctacggggaaaggagcaccgagaggcagccaggatcattgcagaagcattcaaaaccaaggacagggattatatcgacttcctagtgacggaattcaacgtgatgctctag

SEQ ID NO: 186483 - DNA, 1575 bp, Artificial Sequence
  derived and/or modified sequence
atggccaacagcgccggcttcctgggcgacctgaccaccgagggcatcaacaagcccggcttctacaagggccccgccggcagccaggtgaccctgagcagcctgggcaaccagaccagagtgctgctggaggagcaggccagacacctgctgaacgagcaggagcacgccaccatggcctactacctggacgagtacagaggcggcagcgtgagcgtggaggccctggtgatggccctgttcaagctgctgaacacccacgccaagttcagcctgctgagcgaggtgagaggcaccatcagcccccaggacctggagagattcgaccacctggtgctgagaagagagatcgagagcatgaaggccagacagccccccggccccggcgccggcgacacctacagcatggtgagctacagcgacaccggcagcagcaccggcagccacggcaccagcaccaccgtgagcagcgccagaaacaccctggacctggaggagaccggcgaggccgtgcagggcaacatcaacgccctgcccgacgtgagcgtggacgacgtgagaagcaccagccagggcctgagcagcttcaagcccctgcccagacccccccccctggcccagggcaacgacctgcccctgggccagcccagaaagctgggcagagaggacctgcagccccccagcagcatgcccagctgcagcggcaccgtgttcagcgccccccagaacagaagcccccccgccggcaccgcccccacccccggcaccagcagcgcccaggacctgcccagcagccccatctacgccagcgtgagccccgccaaccccagcagcaagagacccctggacgcccacctggccctggtgaaccagcaccccatcggccccttccccagagtgcagagccccccccacctgaagagccccagcgccgaggccaccgtggccggcggctgcctgctgccccccagccccagcggccaccccgaccagaccggcaccaaccagcacttcgtgatggtggaggtgcacagacccgacagcgagcccgacgtgaacgaggtgagagccctgccccagaccagaaccgccagcaccctgagccacctgagcgacagcggccagaccctgagcgaggacagcggcgtggacgccggcgaggccgaggccagcgcccccggcagaggcagacagagcgtgagcaccaagagcagaagcagcaaggagctgcccagaaacgagagacccaccgacggcgccaacaagccccccggcctgctggagcccaccagcaccctggtgagagtgaagaagagcgccgccaccctgggcatcgccatcgagggcggcgccaacaccagacagcccctgcccagaatcgtgaccatccagagaggcggcagcgcccacaactgcggccagctgaaggtgggccacgtgatcctggaggtgaacggcctgaccctgagaggcaaggagcacagagaggccgccagaatcatcgccgaggccttcaagaccaaggacagagactacatcgacttcctggtgaccgagttcaacgtgatgctgtag

SEQ ID NO: 186484 - DNA, 2724 bp, Artificial Sequence
  derived and/or modified sequence
atgaacgcccccctggacggcctgagcgtgagcagcagcagcaccggcagcctgggcagcgccgccggcgccggcggcggcggcggcgccggcctgagactgctgagcgccaacgtgagacagctgcaccaggccctgaccgccctgctgagcgaggccgagagagagcagttcacccactgcctgaacgcctaccacgccagaagaaacgtgttcgacctggtgagaaccctgagagtgctgctggacagccccgtgaagagaagactgctgcccatgctgagactggtgatccccagaagcgaccagctgctgttcgaccagtacaccgccgagggcctgtacctgcccgccaccaccccctacagacagcccgcctggggcggccccgacagcgccggccccggcgaggtgagactggtgagcctgagaagagccaaggcccacgagggcctgggcttcagcatcagaggcggcagcgagcacggcgtgggcatctacgtgagcctggtggagcccggcagcctggccgagaaggagggcctgagagtgggcgaccagatcctgagagtgaacgacaagagcctggccagagtgacccacgccgaggccgtgaaggccctgaagggcagcaagaagctggtgctgagcgtgtacagcgccggcagaatccccggcggctacgtgaccaaccacatctacacctgggtggacccccagggcagaagcatcagcccccccagcggcctgccccagccccacggcggcgccctgagacagcaggagggcgacagaagaagcaccctgcacctgctgcagggcggcgacgagaagaaggtgaacctggtgctgggcgacggcagaagcctgggcctgaccatcagaggcggcgccgagtacggcctgggcatctacatcaccggcgtggaccccggcagcgaggccgagggcagcggcctgaaggtgggcgaccagatcctggaggtgaacggcagaagcttcctgaacatcctgcacgacgaggccgtgagactgctgaagagcagcagacacctgatcctgaccgtgaaggacgtgggcagactgcccagagccagaaccaccgtggacgagaccaagtggatcgccagcagcagaatcagagagaccatggccaacagcgccggcttcctgggcgacctgaccaccgagggcatcaacaagcccggcttctacaagggccccgccggcagccaggtgaccctgagcagcctgggcaaccagaccagagtgctgctggaggagcaggccagacacctgctgaacgagcaggagcacgccaccatggcctactacctggacgagtacagaggcggcagcgtgagcgtggaggccctggtgatggccctgttcaagctgctgaacacccacgccaagttcagcctgctgagcgaggtgagaggcaccatcagcccccaggacctggagagattcgaccacctggtgctgagaagagagatcgagagcatgaaggccagacagccccccggccccggcgccggcgacacctacagcatggtgagctacagcgacaccggcagcagcaccggcagccacggcaccagcaccaccgtgagcagcgccagaaacaccctggacctggaggagaccggcgaggccgtgcagggcaacatcaacgccctgcccgacgtgagcgtggacgacgtgagaagcaccagccagggcctgagcagcttcaagcccctgcccagacccccccccctggcccagggcaacgacctgcccctgggccagcccagaaagctgggcagagaggacctgcagccccccagcagcatgcccagctgcagcggcaccgtgttcagcgccccccagaacagaagcccccccgccggcaccgcccccacccccggcaccagcagcgcccaggacctgcccagcagccccatctacgccagcgtgagccccgccaaccccagcagcaagagacccctggacgcccacctggccctggtgaaccagcaccccatcggccccttccccagagtgcagagccccccccacctgaagagccccagcgccgaggccaccgtggccggcggctgcctgctgccccccagccccagcggccaccccgaccagaccggcaccaaccagcacttcgtgatggtggaggtgcacagacccgacagcgagcccgacgtgaacgaggtgagagccctgccccagaccagaaccgccagcaccctgagccacctgagcgacagcggccagaccctgagcgaggacagcggcgtggacgccggcgaggccgaggccagcgcccccggcagaggcagacagagcgtgagcaccaagagcagaagcagcaaggagctgcccagaaacgagagacccaccgacggcgccaacaagccccccggcctgctggagcccaccagcaccctggtgagagtgaagaagagcgccgccaccctgggcatcgccatcgagggcggcgccaacaccagacagcccctgcccagaatcgtgaccatccagagaggcggcagcgcccacaactgcggccagctgaaggtgggccacgtgatcctggaggtgaacggcctgaccctgagaggcaaggagcacagagaggccgccagaatcatcgccgaggccttcaagaccaaggacagagactacatcgacttcctggtgaccgagttcaacgtgatgctgtag

SEQ ID NO: 186485 - DNA, 1671 bp, Artificial Sequence
  derived and/or modified sequence
atgcacggcagcctggaggccctgctgttcctgccccaggtgaccctgagcctggcccacgcccacctgatctgcagcaacgcccagctggagatgtgcgtgttcccccacagattcctgggcgacctgaccaccgagggcatcaacaagcccggcttctacaagggccccgccggcagccaggtgaccctgagcagcctgggcaaccagaccagagtgctgctggaggagcaggccagacacctgctgaacgagcaggagcacgccaccatggcctactacctggacgagtacagaggcggcagcgtgagcgtggaggccctggtgatggccctgttcaagctgctgaacacccacgccaagttcagcctgctgagcgaggtgagaggcaccatcagcccccaggacctggagagattcgaccacctggtgctgagaagagagatcgagagcatgaaggccagacagccccccggccccggcgccggcgacacctacagcatggtgagctacagcgacaccggcagcagcaccggcagccacggcaccagcaccaccgtgagcagcgccagaaacaccctggacctggaggagaccggcgaggccgtgcagggcaacatcaacgccctgcccgacgtgagcgtggacgacgtgagaagcaccagccagggcctgagcagcttcaagcccctgcccagacccccccccctggcccagggcaacgacctgcccctgggccagcccagaaagctgggcagagaggacctgcagccccccagcagcatgcccagctgcagcggcaccgtgttcagcgccccccagaacagaagcccccccgccggcaccgcccccacccccggcaccagcagcgcccaggacctgcccagcagccccatctacgccagcgtgagccccgccaaccccagcagcaagagacccctggacgcccacctggccctggtgaaccagcaccccatcggccccttccccagagtgcagagccccccccacctgaagagccccagcgccgaggccaccgtggccggcggctgcctgctgccccccagccccagcggccaccccgaccagaccggcaccaaccagcacttcgtgatggtggaggtgcacagacccgacagcgagcccgacgtgaacgaggtgagagccctgccccagaccagaaccgccagcaccctgagccacctgagcgacagcggccagaccctgagcgaggacagcggcgtggacgccggcgaggccgaggccagcgcccccggcagaggcagacagagcgtgagcaccaagagcagaagcagcaaggagctgcccagaaacgagagacccaccgacggcgccaacaagccccccggcctgctggagcccaccagcaccctggtgagagtgaagaagagcgccgccaccctgggcatcgccatcgagggcggcgccaacaccagacagcccctgcccagaatcgtgaccatccagagaggcggcagcgcccacaactgcggccagctgaaggtgggccacgtgatcctggaggtgaacggcctgaccctgagaggcaaggagcacagagaggccgccagaatcatcgccgaggccttcaagaccaaggacagagactacatcgacttcctggtgaccgagttcaacgtgatgctgtag

SEQ ID NO: 186486 - DNA, 2847 bp, Artificial Sequence
  derived and/or modified sequence
gaaactcctaggcagcagaggcccacgactacttcctcctgagtgccgttcagtggcctgtgtccaggctctgaagggctccaagaagctggtgctgtctgtgtactcagcagggcgcatccctgggggctacgtcaccaaccacatctacacctgggtggacccgcagggccgcagcatctccccaccctcgggcctgccccagccccacggtggtgccctgaggcagcaggagggtgaccggaggagcaccctgcacctcctgcaaggaggggatgagaaaaaggtgaacctggtgctgggggacggccggtccctgggcctcacgatccgtgggggagctgagtacggccttggcatttacatcactggcgtggacccaggctctgaagcagaaggcagcgggctcaaggttggggaccagattctagaagtgaatgggcggagctttctcaacatcctacacgacgaggctgtcaggctgcttaagtcatctcggcacctcatcctgacagtgaaggacgtcgggaggctgccccgtgcccgcaccactgtggacgagaccaagtggatcgccagttcccggatcagggagaccatggcgaactcggcagggtttcttggcgatctcacaacagaaggaataaacaagccaggattttacaagggcccagccggctcccaggtgaccctgagcagcctggggaaccagacacgagtgctgctggaggagcaggctcggcacctgctgaacgagcaggaacacgccaccatggcctactacctggatgagtaccgtggtggcagcgtctctgtggaggccctcgtcatggccctgttcaagctgctcaacacccacgccaagttctcactcctctctgaggtgagaggcaccatttccccgcaagacctagaacgcttcgaccacctggtgctgaggcgtgagattgagtccatgaaggcgcggcagcccccaggccccggggctggggacacctactccatggtctcctacagtgacacgggttcatccacaggcagccacggcacctccaccaccgtcagctcggccaggaacactctggacctggaggaaactggcgaggctgtccagggcaatatcaacgccctcccagatgtgtccgtggatgatgtcagatccacctcccaggggctgtcaagcttcaagccactgcctcgcccaccacctctggcccaaggcaacgacctcccactaggccagccaaggaagctggggagagaggacctccagccaccttcctccatgccttcctgctcgggcactgtcttctcggctccacagaaccgcagcccgccagcgggcaccgcacccaccccagggacctcctctgcacaggacttgccctcttcccccatctatgcctccgtctcccctgccaaccccagctccaagaggccgctggacgcccatctggccctggtcaaccaacaccccatcggccccttcccacgggtccagtcacccccgcacctgaaaagcccctctgcagaggccacagtggctgggggctgccttctgcccccatcaccctctggccacccagaccagacaggcacaaaccagcactttgtcatggtggaggtccaccgccccgacagcgagccagacgtcaatgaagtgagggcgctgccccagacgcgcacagcctctacgctctcccacctctcggacagcgggcagactctaagcgaggacagtggtgtggatgctggcgaggcagaggccagcgccccaggccgaggaaggcagtcggtgtccaccaagagcaggagtagcaaggagctgcctcggaacgagaggcccacagatggggccaacaaaccgcctggacttctggagcccacgtccactctggtccgtgtgaagaaaagtgcggccaccctgggcatcgccatcgagggtggcgccaacacccgccagcccctgcctaggattgtcactattcagagaggcggctcagctcacaactgtgggcagctcaaggtgggccacgtgattctggaagtgaatgggctgacgcttcggggcaaggagcaccgggaggccgcccgcattatcgccgaggccttcaagactaaggaccgtgactacattgactttctggtcactgagttcaatgtgatgctctagaggccaaggcctgagggcctcccaccactgcccagcccctggtcccagtccctttccaccgttggcttcatcaagctccttgcggggttggggctgcatggccagggtggcaggaagacatcccccctccatcccagcccactggaccagaactgggagaggaagagagcaggacaaggcagacagaaggtcaggtcaggaactggtgctgtactgggtacacagtaggcgcccaggacaagtgggttgcaagacaggaagaaaggaaaaggaagggcagagtgctggtttctccaggttgggttgggggcactgctgtcccccctccagctaggacccagcccatccccagatgcctgagcctttgtccaaagtgaggtcactcgagaattcatggacacggcccccagtcagggggcatcttgcaagacctttagtgccacaaataagcatcgagcacctccccattcacacccccattcctcctggctccttatcccccatggtgtttattatttatttccctccccatgcccctggggaccccaaggccccagcttccctctgcacccccagcctatcccagaggccttgcaggtgaccagcagtgtcattgtatttatatacagagcttatgactttaatttttcaataaagaaatctgaacaaggtta

SEQ ID NO: 186487 - DNA, 3566 bp, Artificial Sequence
  derived and/or modified sequence
gtctccgcgaccccctaggatccagccactgtacccgtgctccccaaacccaggctccagccgtcgtctccgcgctcccggggatccagctgtcgcgccagtacccgcgaggacagcggcaccgcccacaccccgcgcgctcagagcccggccgggcctcggcgtggagatgaacgcgccgctggacggcctgtcggtgagctcgtcctccaccggctcgctgggctcggcggccggggcgggcggcggcgggggcgcggggctgcggttactgtctgccaacgtgcgccagctgcaccaagcgctgaccgcgctgctgagcgaggcggagcgggagcagttcacccactgcctgaacgcttaccacgcgcgccgcaacgtcttcgacctggtgcgcaccctgcgcgtgctgctggacagtccggtcaagcggcgcctgctgcccatgcttcgtctggtcatcccgcgctccgaccagctgctcttcgaccaatacacggccgagggcctctacctgcccgccaccaccccctacaggcagcccgcctggggcggccccgacagcgcggggccaggggaggtgcgcctggtgagtttgcggcgtgccaaggcccacgagggcttgggcttcagcatccgtgggggctcggagcacggcgtgggcatctacgtgtctctggtggaaccaggctctctagctgagaaggaaggactgcgggtcggggaccagattctgcgcgtcaacgacaaatccctggcccgggtgacccacgcggaggccgtcaaggctctgaagggctccaagaagctggtgctgtctgtgtactcagcagggcgcatccctgggggctacgtcaccaaccacatctacacctgggtggacccgcagggccgcagcatctccccaccctcgggcctgccccagccccacggtggtgccctgaggcagcaggagggtgaccggaggagcaccctgcacctcctgcaaggaggggatgagaaaaaggtgaacctggtgctgggggacggccggtccctgggcctcacgatccgtgggggagctgagtacggccttggcatttacatcactggcgtggacccaggctctgaagcagaaggcagcgggctcaaggttggggaccagattctagaagtgaatgggcggagctttctcaacatcctacacgacgaggctgtcaggctgcttaagtcatctcggcacctcatcctgacagtgaaggacgtcgggaggctgccccgtgcccgcaccactgtggacgagaccaagtggatcgccagttcccggatcagggagaccatggcgaactcggcagggtttcttggcgatctcacaacagaaggaataaacaagccaggattttacaagggcccagccggctcccaggtgaccctgagcagcctggggaaccagacacgagtgctgctggaggagcaggctcggcacctgctgaacgagcaggaacacgccaccatggcctactacctggatgagtaccgtggtggcagcgtctctgtggaggccctcgtcatggccctgttcaagctgctcaacacccacgccaagttctcactcctctctgaggtgagaggcaccatttccccgcaagacctagaacgcttcgaccacctggtgctgaggcgtgagattgagtccatgaaggcgcggcagcccccaggccccggggctggggacacctactccatggtctcctacagtgacacgggttcatccacaggcagccacggcacctccaccaccgtcagctcggccaggaacactctggacctggaggaaactggcgaggctgtccagggcaatatcaacgccctcccagatgtgtccgtggatgatgtcagatccacctcccaggggctgtcaagcttcaagccactgcctcgcccaccacctctggcccaaggcaacgacctcccactaggccagccaaggaagctggggagagaggacctccagccaccttcctccatgccttcctgctcgggcactgtcttctcggctccacagaaccgcagcccgccagcgggcaccgcacccaccccagggacctcctctgcacaggacttgccctcttcccccatctatgcctccgtctcccctgccaaccccagctccaagaggccgctggacgcccatctggccctggtcaaccaacaccccatcggccccttcccacgggtccagtcacccccgcacctgaaaagcccctctgcagaggccacagtggctgggggctgccttctgcccccatcaccctctggccacccagaccagacaggcacaaaccagcactttgtcatggtggaggtccaccgccccgacagcgagccagacgtcaatgaagtgagggcgctgccccagacgcgcacagcctctacgctctcccacctctcggacagcgggcagactctaagcgaggacagtggtgtggatgctggcgaggcagaggccagcgccccaggccgaggaaggcagtcggtgtccaccaagagcaggagtagcaaggagctgcctcggaacgagaggcccacagatggggccaacaaaccgcctggacttctggagcccacgtccactctggtccgtgtgaagaaaagtgcggccaccctgggcatcgccatcgagggtggcgccaacacccgccagcccctgcctaggattgtcactattcagagaggcggctcagctcacaactgtgggcagctcaaggtgggccacgtgattctggaagtgaatgggctgacgcttcggggcaaggagcaccgggaggccgcccgcattatcgccgaggccttcaagactaaggaccgtgactacattgactttctggtcactgagttcaatgtgatgctctagaggccaaggcctgagggcctcccaccactgcccagcccctggtcccagtccctttccaccgttggcttcatcaagctccttgcggggttggggctgcatggccagggtggcaggaagacatcccccctccatcccagcccactggaccagaactgggagaggaagagagcaggacaaggcagacagaaggtcaggtcaggaactggtgctgtactgggtacacagtaggcgcccaggacaagtgggttgcaagacaggaagaaaggaaaaggaagggcagagtgctggtttctccaggttgggttgggggcactgctgtcccccctccagctaggacccagcccatccccagatgcctgagcctttgtccaaagtgaggtcactcgagaattcatggacacggcccccagtcagggggcatcttgcaagacctttagtgccacaaataagcatcgagcacctccccattcacacccccattcctcctggctccttatcccccatggtgtttattatttatttccctccccatgcccctggggaccccaaggccccagcttccctctgcacccccagcctatcccagaggccttgcaggtgaccagcagtgtcattgtatttatatacagagcttatgactttaatttttcaataaagaaatctgaacaaggtt

SEQ ID NO: 186488 - DNA, 3278 bp, Artificial Sequence
  derived and/or modified sequence
catgacctgggcacatccctctcctctcttggcctcagtttccccatggaaagctgaaatacaccatccaactgtctcattctttatttgtccccaaattacttaactcattctatagaccttagttgcttcatccaaaaagtggggaccataaccctgccctcatcccagatctgtgcagatgaaagagagggagggagagggaaagagagagatgctttggggtgtatttggccagaggccaccaggctggatcccatgaagaaatctgggtgagagggtcttaaagtcataaactgagatccagttgccaggtggctgcatagttgccaacagtgtaatgtgtcaccttttgatcttcatcagaaatctcaggctggtggccacctggccaaatacactgcagagcatgtctgtctgtctgtctgtctgtgtctctctgtgtgtgtgtgtgtgtgtgtgtgtgtgtgtgtgtgtgtgtgtgtctcccccttcccttcctttcacctgcatagtattaaacattttcaaagttacttgccaacatctagaaagataccaggttttctataaaaaaaaaaactggatttctggatgcttcttaaaaatcaggaagtctggcagcctgagcccacatcggctggagctgagccgcacctgcgagttgcatctgggatctccagttcaccggcccctaagctcctgagggttggcctgaccctgaggttgcctgtcaatcaccatttcttccctccactccttgtgttacctgcctggtcctgcggggttggcaacaactcaggagcccacctcgggtggttttggaggtgccgtgcacactgctgattgggaggctggacgctgccagtctgtccggagtttcctttacccctgagtagcccccagactgaactggcagcgagtggaggccacgatgcatggttctcttgaagctttgctcttcctgccccaagtcaccctgtcccttgcccacgcccatttgatctgctcaaatgcacaactggagatgtgtgtctttccccacaggtttcttggcgatctcacaacagaaggaataaacaagccaggattttacaagggcccagccggctcccaggtgaccctgagcagcctggggaaccagacacgagtgctgctggaggagcaggctcggcacctgctgaacgagcaggaacacgccaccatggcctactacctggatgagtaccgtggtggcagcgtctctgtggaggccctcgtcatggccctgttcaagctgctcaacacccacgccaagttctcactcctctctgaggtgagaggcaccatttccccgcaagacctagaacgcttcgaccacctggtgctgaggcgtgagattgagtccatgaaggcgcggcagcccccaggccccggggctggggacacctactccatggtctcctacagtgacacgggttcatccacaggcagccacggcacctccaccaccgtcagctcggccaggaacactctggacctggaggaaactggcgaggctgtccagggcaatatcaacgccctcccagatgtgtccgtggatgatgtcagatccacctcccaggggctgtcaagcttcaagccactgcctcgcccaccacctctggcccaaggcaacgacctcccactaggccagccaaggaagctggggagagaggacctccagccaccttcctccatgccttcctgctcgggcactgtcttctcggctccacagaaccgcagcccgccagcgggcaccgcacccaccccagggacctcctctgcacaggacttgccctcttcccccatctatgcctccgtctcccctgccaaccccagctccaagaggccgctggacgcccatctggccctggtcaaccaacaccccatcggccccttcccacgggtccagtcacccccgcacctgaaaagcccctctgcagaggccacagtggctgggggctgccttctgcccccatcaccctctggccacccagaccagacaggcacaaaccagcactttgtcatggtggaggtccaccgccccgacagcgagccagacgtcaatgaagtgagggcgctgccccagacgcgcacagcctctacgctctcccacctctcggacagcgggcagactctaagcgaggacagtggtgtggatgctggcgaggcagaggccagcgccccaggccgaggaaggcagtcggtgtccaccaagagcaggagtagcaaggagctgcctcggaacgagaggcccacagatggggccaacaaaccgcctggacttctggagcccacgtccactctggtccgtgtgaagaaaagtgcggccaccctgggcatcgccatcgagggtggcgccaacacccgccagcccctgcctaggattgtcactattcagagaggcggctcagctcacaactgtgggcagctcaaggtgggccacgtgattctggaagtgaatgggctgacgcttcggggcaaggagcaccgggaggccgcccgcattatcgccgaggccttcaagactaaggaccgtgactacattgactttctggtcactgagttcaatgtgatgctctagaggccaaggcctgagggcctcccaccactgcccagcccctggtcccagtccctttccaccgttggcttcatcaagctccttgcggggttggggctgcatggccagggtggcaggaagacatcccccctccatcccagcccactggaccagaactgggagaggaagagagcaggacaaggcagacagaaggtcaggtcaggaactggtgctgtactgggtacacagtaggcgcccaggacaagtgggttgcaagacaggaagaaaggaaaaggaagggcagagtgctggtttctccaggttgggttgggggcactgctgtcccccctccagctaggacccagcccatccccagatgcctgagcctttgtccaaagtgaggtcactcgagaattcatggacacggcccccagtcagggggcatcttgcaagacctttagtgccacaaataagcatcgagcacctccccattcacacccccattcctcctggctccttatcccccatggtgtttattatttatttccctccccatgcccctggggaccccaaggccccagcttccctctgcacccccagcctatcccagaggccttgcaggtgaccagcagtgtcattgtatttatatacagagcttatgactttaatttttcaataaagaaatctgaacaaggtt

SEQ ID NO: 186489 - protein, 345 aa, Artificial Sequence
  derived and/or modified sequence
MQHVSSSQSSQRHVQWPGACPGAGEEQPACSQPSLPLTLPSPSHQLQQLMDGSGLTQIAQGAQVQLQHPGTPITVRERRPSQPHTQSGGTIHHLGPQSPAAAGGAGLQPLASPSHITTANLPPQPRPLGFERTPGVLLPGAGGAAGFGMTSPPPPTSPSRTAVPPGLSSLPLTSVGNTGMKKVPKKLEEIPPASPEMAQMRKQCLDYHHQEMQALKEVFKEYLIELFFLQHFQGNMMDFLAFKERLYGPLQAYLRQNDLDIEEEEEEHFEVINDEVKVVARKHGQPGTPVAIATQLPPRTSAAFPAQQQPLQPLAPTTVLSVSADWNALLQRPNKYIWGLQYLEM

SEQ ID NO: 186490 - protein, 488 aa, Artificial Sequence
  derived and/or modified sequence
MQHVSSSQSSQRHVQWPGACPGAGEEQPACSQPSLPLTLPSPSHQLQQLMVRGGPAGGQNMNVDLQGVGPGLQGSPQVTLAPLPLPSPTSPGFQFSAQPRRFEHGSPSYIQVTSPLSQQVQTQSPTQPSPGPGQALQNVRAGAPGPGLGLCSSSPTGDFVDASVLVRQISLSPSSGGHFVFQDGSGLTQIAQGAQVQLQHPGTPITVRERRPSQPHTQSGGTIHHLGPQSPAAAGGAGLQPLASPSHITTANLPPQISSIIQGQLVQQQQVLQGPPLPRPLGFERTPGVLLPGAGGAAGFGMTSPPPPTSPSRTAVPPGLSSLPLTSVGNTGMKKVPKKLEEIPPASPEMAQMRKQCLDYHHQEMQALKEVFKEYLIELFFLQHFQGNMMDFLAFKERLYGPLQAYLRQNDLDIEEEEEEHFEVINDEVKVVARKHGQPGTPVAIATQLPPRTSAAFPAQQQPLQQIHMGTPVPGDVNSIKMEASKRQ

SEQ ID NO: 186491 - protein, 419 aa, Artificial Sequence [sequence omitted]

SEQ ID NO: 186492 - protein, 356 aa, Artificial Sequence
  derived and/or modified sequence
MQHVSSSQSSQRHVQWPGACPGAGEEQPACSQPSLPLTLPSPSHQLQQLMDGSGLTQIAQGAQVQLQHPGTPITVRERRPSQPHTQSGGTIHHLGPQSPAAAGGAGLQPLASPSHITTANLPPQISSIIQGQLVQQQQVLQGPPLPRPLGFERTPGVLLPGAGGAAGFGMTSPPPPTSPSRTAVPPGLSSLPLTSVGNTGMKKVPKKLEEIPPASPEMAQMRKQCLDYHHQEMQALKEVFKEYLIELFFLQHFQGNMMDFLAFKERLYGPLQAYLRQNDLDIEEEEEEHFEVINDEVKVVARKHGQPGTPVAIATQLPPRTSAAFPAQQQPLQVLSDGSTVQLPRLSSLGFEDSMC

SEQ ID NO: 186493 - protein, 217 aa, Artificial Sequence
  derived and/or modified sequence
MQHVSSSQSSQRHVQWPGACPGAGEEQPACSQPSLPLTLPSPSHQLQQLMDGSGLTQIAQGAQVQLQHPGTPITVRERRPSQPHTQSGGTIHHLGPQSPAAAGGAGLQPLASPSHITTANLPPQISSIIQGQLVQQQQVLQGPPLPRPLGFERTPGVLLPGAGGAAGFGMTSPPPPTSPSRTAVPPGLSSLPLTSVGNTGMKKVPKKLEEIPPASPE

SEQ ID NO: 186494 - protein, 223 aa, Artificial Sequence
  derived and/or modified sequence
MQHVSSSQSSQRHVQWPGACPGAGEEQPACSQPSLPLTLPSPSHQLQQLMVQTQSPTQPSPGPGQALQNVRAGAPGPGLGLCSSSPTGDFVDASVLVRQISLSPSSGGHFVFQDGSGLTQIAQGAQVQLQHPGTPITVRERRPSQPHTQSGGTIHHLGPQSPAAAGGAGLQPLASPSHITTANLPPQISSIIQGQLVQQQQVLQGPPLPRPLGFERTPGVLLP

SEQ ID NO: 186495 - protein, 156 aa, Artificial Sequence
  derived and/or modified sequence
MQHVSSSQSSQRHVQWPGACPGAGEEQPACSQPSLPLTLPSPSHQLQQLMVQTQSPTQPSPGPGQALQNVRAGAPGPGLGLCSSSPTGDFVDASVLVRQISLSPSSGGHFVFQDGSGLTQIAQGAQVQLQHPGTPITVRERRPSQPHTQSGGTIHH

SEQ ID NO: 186496 - protein, 185 aa, Artificial Sequence
  derived and/or modified sequence
VTGSCYLKMAVITKGRLWTERSREKAAGTGPGQETPSLDSLFWESLKATASWSTKPADVMKGRSPTACGKDTGFWWTGMDKCTRAPSMTTRGTALGRCSFRTVTSTTATGSGTGVRDTGCCAAPTAPPTSSDPPIYSRRNSRRHRLLPRHHELRVGEAPPGDLFSLSTAGVFSANRVSCLAASIP

SEQ ID NO: 186497 - protein, 3042 aa, Artificial Sequence
  derived and/or modified sequence
MHHGTGPQNVQHQLQRSRACPGSEGEEQPAHPNPPPSPAAPFAPSASPSAPQSPSYQIQQLMNRSPATGQNVNITLQSVGPVVGGNQQITLAPLPLPSPTSPGFQFSAQPRRFEHGSPSYIQVTSPLSQQVQTQSPTQPSPGPGQALQNVRAGAPGPGLGLCSSSPTGGFVDASVLVRQISLSPSSGGHFVFQDGSGLTQIAQGAQVQLQHPGTPITVRERRPSQPHTQSGGTIHHLGPQSPAAAGGAGLQPLASPSHITTANLPPQISSIIQGQLVQQQQVLQGPPLPRPLGFERTPGVLLPGAGGAAGFGMTSPPPPTSPSRTAVPPGLSSLPLTSVGNTGMKKVPKKLEEIPPASPEMAQMRKQCLDYHYQEMQALKEVFKEYLIELFFLQHFQGNMMDFLAFKKKHYAPLQAYLRQNDLDIEEEEEEEEEEEEKSEVINDEQQALAGSLVAGAGSTVETDLFKRQQAMPSTGMAEQSKRPRLEVGHQGVVFQHPGADAGVPLQQLMPTAQGGMPPTPQAAQLAGQRQSQQQYDPSTGPPVQNAASLHTPLPQLPGRLPPAGVPTAALSSALQFAQQPQVVEAQTQLQIPVKTQQPNVPIPAPPSSQLPIPPSQPAQLALHVPTPGKVQVQASQLSSLPQMVASTRLPVDPAPPCPRPLPTSSTSSLAPVSGSGPGPSPARSSPVNRPSSATNKALSPVTSRTPGVVASAPTKPQSPAQNATSSQDSSQDTLTEQITLENQVHQRIAELRKAGLWSQRRLPKLQEAPRPKSHWDYLLEEMQWMATDFAQERRWKVAAAKKLVRTVVRHHEEKQLREERGKKEEQSRLRRIAASTAREIECFWSNIEQVVEIKLRVELEEKRKKALNLQKVSRRGKELRPKGFDALQESSLDSGMSGRKRKASISLTDDEVDDEEETIEEEEANEGVVDHQTELSNLAKEAELPLLDLMKLYEGAFLPSSQWPRPKPDGEDTSGEEDADDCPGDRESRKDLVLIDSLFIMDQFKAAERMNIGKPNAKDIADVTAVAEAILPKGSARVTTSVKFNAPSLLYGALRDYQKIGLDWLAKLYRKNLNGILADEAGLGKTVQIIAFFAHLACNEGNWGPHLVVVRSCNILKWELELKRWCPGLKILSYIGSHRELKAKRQEWAEPNSFHVCITSYTQFFRGLTAFTRVRWKCLVIDEMQRVKGMTERHWEAVFTLQSQQRLLLIDSPLHNTFLELWTMVHFLVPGISRPYLSSPLRAPSEESQDYYHKVVIRLHRVTQPFILRRTKRDVEKQLTKKYEHVLKCRLSNRQKALYEDVILQPGTQEALKSGHFVNVLSILVRLQRICNHPGLVEPRHPGSSYVAGPLEYPSASLILKALERDFWKEADLSMFDLIGLENKITRHEAELLSKKKIPRKLMEEISTSAAPAARPAAAKLKASRLFQPVQYGQKPEGRTVAFPSTHPPRTAAPTTASAAPQGPLRGRPPIATFSANPEAKGGEVVKIAQLASITGPQSRVAQPETPVTLQFQGSKFTLSHSQLRQLTAGQPLQLQGSVLQIVSAPGQPYLRAPGPVVMQTVSQAGAVHGALGSKPPAGGPSPAPLTPQVGVPGRVAVNALAVGEPGTASKPASPIGGPTQEEKTRLLKERLDQIYLVNERRCSQAPVYGRDLLRICALPSHGRVQWRGSLDGRRGKEAGPAHSYTSSSESPSELMLTLCRCGESLQDVIDRVAFVIPPVVAAPPSLRVPRPPPLYSHRMRILRQGLREHAAPYFQQLRQTTAPRLLQFPELRLVQFDSGKLEALAILLQKLKSEGRRVLILSQMILMLDILEMFLNFHYLTYVRIDENASSEQRQELMRSFNRDRRIFCAILSTHSRTTGINLVEADTVVFYDNDLNPVMDAKAQEWCDRIGRCKDIHIYRLVSGNSIEEKLLKNGTKDLIREVAAQGNDYSMAFLTQRTIQELFEVYSPMDDAGFPVKAEEFVVLSQEPSVTETIAPKIARPFIEALKSIEYLEEDAQKSAQEGVLGPHTDALSSDSENMPCDEEPSQLEELADFMEQLTPIEKYALNYLELFHTSIEQEKERNSEDAVMTAVRAWEFWNLKTLQEREARLRLEQEEAELLTYTREDAYSMEYVYEDVDGQTEVMPLWTPPTPPQDDSDIYLDSVMCLMYEATPIPEAKLPPVYVRKERKRHKTDPSAAGRKKKQRHGEAVVPPRSLFDRATPGLLKIRREGKEQKKNILLKQQVPFAKPLPTFAKPTAEPGQDNPEWLISEDWALLQAVKQLLELPLNLTIVSPAHTPNWDLVSDVVNSCSRIYRSSKQCRNRYENVIIPREEGKSKNNRPLRTSQIYAQDENATHTQLYTSHFDLMKMTAGKRSPPIKPLLGMNPFQKNPKHASVLAESGINYDKPLPPIQVASLRAERIAKEKKALADQQKAQQPAVAQPPPPQPQPPPPPQQPPPPLPQPQAAGSQPPAGPPAVQPQPQPQPQTQPQPVQAPAKAQPAITTGGSAAVLAGTIKTSVTGTSMPTGAVSGNVIVNTIAGVPAATFQSINKRLASPVAPGALTTPGGSAPAQVVHTQPPPRAVGSPATATPDLVSMATTQGVRAVTSVTASAVVTTNLTPVQTPARSLVPQVSQATGVQLPGKTITPAHFQLLRQQQQQQQQQQQQQQQQQQQQQQQQQQQQQTTTTSQVQVPQIQGQAQSPAQIKAVGKLTPEHLIKMQKQKLQMPPQPPPPQAQSAPPQPTAQVQVQTSQPPQQQSPQLTTVTAPRPGALLTGTTVANLQVARLTRVPTSQLQAQGQMQTQAPQPAQVALAKPPVVSVPAAVVSSPGVTTLPMNVAGISVAIGQPQKAAGQTVVAQPVHMQQLLKLKQQAVQQQKAIQPQAAQGPAAVQQKITAQQITTPGAQQKVAYAAQPALKTQFLTTPISQAQKLAGAQQVQTQIQVAKLPQVVQQQTPVASIQQVASASQQASPQTVALTQATAAGQQVQMIPAVTATAQVVQQKLIQQQVVTTASAPLQTPGAPNPAQVPASSDSPSQQPKLQMRVPAVRLKTPTKPPCQ

SEQ ID NO: 186498 - protein, 3086 aa, Artificial Sequence
  derived and/or modified sequence
MHHGTGPQNVQHQLQRSRACPGSEGEEQPAHPNPPPSPAAPFAPSASPSAPQSPSYQIQQLMNRSPATGQNVNITLQSVGPVVGGNQQITLAPLPLPSPTSPGFQFSAQPRRFEHGSPSYIQVTSPLSQQVQTQSPTQPSPGPGQALQNVRAGAPGPGLGLCSSSPTGGFVDASVLVRQISLSPSSGGHFVFQDGSGLTQIAQGAQVQLQHPGTPITVRERRPSQPHTQSGGTIHHLGPQSPAAAGGAGLQPLASPSHITTANLPPQISSIIQGQLVQQQQVLQGPPLPRPLGFERTPGVLLPGAGGAAGFGMTSPPPPTSPSRTAVPPGLSSLPLTSVGNTGMKKVPKKLEEIPPASPEMAQMRKQCLDYHYQEMQALKEVFKEYLIELFFLQHFQGNMMDFLAFKKKHYAPLQAYLRQNDLDIEEEEEEEEEEEEKSEVINDEQALAGSLVAGAGSTVETDLFKRQQAMPSTGMAGGMPPTPQAAQLAGQRQSQQQYDPSTGPPVQNAASLHTPLPQLPGRLPPAGVPTAALSSALQFAQQPQVVEAQTQLQIPVKTQQPNVPIPAPPSSQLPIPPSQPAQLALHVPTPGKVQVQASQLSSLPQMVASTRLPVDPAPPCPRPLPTSSTSSLAPVSGSGPGPSPARSSPVNRPSSATNKALSPVTSRTPGVVASAPTKPQSPAQNATSSQDSSQDTLTEQITLENQVHQRIAELRKAGLWSQRRLPKLQEAPRPKSHWDYLLEEMQWMATDFAQERRWKVAAAKKLVRTVVRHHEEKQLREERGKKEEQSRLRRIAASTAREIECFWSNIEQVVEIKLRVELEEKRKKALNLQKVSRRGKELRPKGFDALQESSLDSGMSGRKRKASISLTDDEVDDEEETIEEEEANEGVVDHQTELSNLAKEAELPLLDLMKLYEGAFLPSSQWPRPKPDGEDTSGEEDADDCPGDRESRKDLVLIDSLFIMDQFKAAERMNIGKPNAKDIADVTAVAEAILPKGSARVTTSVKFNAPSLLYGALRDYQKIGLDWLAKLYRKNLNGILADEAGLGKTVQIIAFFAHLACNEGNWGPHLVVVRSCNILKWELELKRWCPGLKILSYIGSHRELKAKRQEWAEPNSFHVCITSYTQFFRGLTAFTRVRWKCLVIDEMQRVKGMTERHWEAVFTLQSQQRLLLIDSPLHNTFLELWTMVHFLVPGISRPYLSSPLRAPSEESQDYYHKVVIRLHRVTQPFILRRTKRDVEKQLTKKYEHVLKCRLSNRQKALYEDVILQPGTQEALKSGHFVNVLSILVRLQRICNHPGLVEPRHPGSSYVAGPLEYPSASLILKALERDFWKEADLSMFDLIGLENKITRHEAELLSKKKIPRKLMEEISTSAAPAARPAAAKLKASRLFQPVQYGQKPEGRTVAFPSTHPPRTAAPTTASAAPQGPLRGRPPIATFSANPEAKAAAAPFQTSQASASAPRHQPASASSTAASPAHPAKLRAQTTAQASTPGQPPPQPQAPSHAAGQSALPQRLVLPSQAQARLPSGEVVKIAQLASITGPQSRVAQPETPVTLQFQGSKFTLSHSQLRQLTAGQPLQLQGSVLQIVSAPGQPYLRAPGPVVMQTVSQAGAVHGALGSKPPAGGPSPAPLTPQVGVPGRVAVNALAVGEPGTASKPASPIGGPTQEEKTRLLKERLDQIYLVNERRCSQAPVYGRDLLRICALPSHGRVQWRGSLDGRRGKEAGPAHSYTSSSESPSELMLTLCRCGESLQDVIDRVAFVIPPVVAAPPSLRVPRPPPLYSHRMRILRQGLREHAAPYFQQLRQTTAPRLLQFPELRLVQFDSGKLEALAILLQKLKSEGRRVLILSQMILMLDILEMFLNFHYLTYVRIDENASSEQRQELMRSFNRDRRIFCAILSTHSRTTGINLVEADTVVFYDNDLNPVMDAKAQEWCDRIGRCKDIHIYRLVSGNSIEEKLLKNGTKDLIREVAAQGNDYSMAFLTQRTIQELFEVYSPMDDAGFPVKAEEFVVLSQEPSVTETIAPKIARPFIEALKSIEYLEEDAQKSAQEGVLGPHTDALSSDSENMPCDEEPSQLEELADFMEQLTPIEKYALNYLELFHTSIEQEKERNSEDAVMTAVRAWEFWNLKTLQEREARLRLEQEEAELLTYTREDAYSMEYVYEDVDGQTEVMPLWTPPTPPQDDSDIYLDSVMCLMYEATPIPEAKLPPVYVRKERKRHKTDPSAAGRKKKQRHGEAVVPPRSLFDRATPGLLKIRREGKEQKKNILLKQQVPFAKPLPTFAKPTAEPGQDNPEWLISEDWALLQAVKQLLELPLNLTIVSPAHTPNWDLVSDVVNSCSRIYRSSKQCRNRYENVIIPREEGKSKNNRPLRTSQIYAQDENATHTQLYTSHFDLMKMTAGKRSPPIKPLLGMNPFQKNPKHASVLAESGINYDKPLPPIQVASLRAERIAKEKKALADQQKAQQPAVAQPPPPQPQPPPPPQQPPPPLPQPQAAGSQPPAGPPAVQPQPQPQPQTQPQPVQAPAKAQPAITTGGSAAVLAGTIKTSVTGTSMPTGAVSGNVIVNTIAGVPAATFQSINKRLASPVAPGALTTPGGSAPAQVVHTQPPPRAVGSPATATPDLVSMATTQGVRAVTSVTASAVVTTNLTPVQTPARSLVPQVSQATGVQLPGKTITPAHFQLLRQQQQQQQQQQQQQQQQQQQQQQQQQQQQQTTTTSQVQVPQIQGQAQSPAQIKAVGKLTPEHLIKMQKQKLQMPPQPPPPQAQSAPPQPTAQVQVQTSQPPQQQSPQLTTVTAPRPGALLTGTTVANLQVARLTRVPTSQLQAQGQMQTQAPQPAQVALAKPPVVSVPAAVVSSPGVTTLPMNVAGISVAIGQPQKAAGQTVVAQPVHMQQLLKLKQQAVQQQKAIQPQAAQGPAAVQQKITAQQITTPGAQQKVAYAAQPALKTQFLTTPISQAQKLAGAQQVQTQIQVAKLPQVVQQQTPVASIQQVASASQQASPQTVALTQATAAGQQVQMIPAVTATAQVVQQKLIQQQVVTTASAPLQTPGAPNPAQVPASSDSPSQQPKLQMRVPAVRLKTPTKPPCQ

SEQ ID NO: 186499 - protein, 3159 aa, Artificial Sequence
  derived and/or modified sequence
MHHGTGPQNVQHQLQRSRACPGSEGEEQPAHPNPPPSPAAPFAPSASPSAPQSPSYQIQQLMNRSPATGQNVNITLQSVGPVVGGNQQITLAPLPLPSPTSPGFQFSAQPRRFEHGSPSYIQVTSPLSQQVQTQSPTQPSPGPGQALQNVRAGAPGPGLGLCSSSPTGGFVDASVLVRQISLSPSSGGHFVFQDGSGLTQIAQGAQVQLQHPGTPITVRERRPSQPHTQSGGTIHHLGPQSPAAAGGAGLQPLASPSHITTANLPPQISSIIQGQLVQQQQVLQGPPLPRPLGFERTPGVLLPGAGGAAGFGMTSPPPPTSPSRTAVPPGLSSLPLTSVGNTGMKKVPKKLEEIPPASPEMAQMRKQCLDYHYQEMQALKEVFKEYLIELFFLQHFQGNMMDFLAFKKKHYAPLQAYLRQNDLDIEEEEEEEEEEEEKSEVINDEVKVVTGKDGQTGTPVAIATQLPPKVSAAFSSQQQPFQQALAGSLVAGAGSTVETDLFKRQQAMPSTGMAEQSKRPRLEVGHQGVVFQHPGADAGVPLQQLMPTAQGGMPPTPQAAQLAGQRQSQQQYDPSTGPPVQNAASLHTPLPQLPGRLPPAGVPTAALSSALQFAQQPQVVEAQTQLQIPVKTQQPNVPIPAPPSSQLPIPPSQPAQLALHVPTPGKVQVQASQLSSLPQMVASTRLPVDPAPPCPRPLPTSSTSSLAPVSGSGPGPSPARSSPVNRPSSATNKALSPVTSRTPGVVASAPTKPQSPAQNATSSQDSSQDTLTEQITLENQVHQRIAELRKAGLWSQRRLPKLQEAPRPKSHWDYLLEEMQWMATDFAQERRWKVAAAKKLVRTVVRHHEEKQLREERGKKEEQSRLRRIAASTAREIECFWSNIEQVVEIKLRVELEEKRKKALNLQKVSRRGKELRPKGFDALQESSLDSGMSGRKRKASISLTDDEVDDEEETIEEEEANEGVVDHQTELSNLAKEAELPLLDLMKLYEGAFLPSSQWPRPKPDGEDTSGEEDADDCPGDRESRKDLVLIDSLFIMDQFKAAERMNIGKPNAKDIADVTAVAEAILPKGSARVTTSVKFNAPSLLYGALRDYQKIGLDWLAKLYRKNLNGILADEAGLGKTVQIIAFFAHLACNEGNWGPHLVVVRSCNILKWELELKRWCPGLKILSYIGSHRELKAKRQEWAEPNSFHVCITSYTQFFRGLTAFTRVRWKCLVIDEMQRVKGMTERHWEAVFTLQSQQRLLLIDSPLHNTFLELWTMVHFLVPGISRPYLSSPLRAPSEESQDYYHKVVIRLHRVTQPFILRRTKRDVEKQLTKKYEHVLKCRLSNRQKALYEDVILQPGTQEALKSGHFVNVLSILVRLQRICNHPGLVEPRHPGSSYVAGPLEYPSASLILKALERDFWKEADLSMFDLIGLENKITRHEAELLSKKKIPRKLMEEISTSAAPAARPAAAKLKASRLFQPVQYGQKPEGRTVAFPSTHPPRTAAPTTASAAPQGPLRGRPPIATFSANPEAKAAAAPFQTSQASASAPRHQPASASSTAASPAHPAKLRAQTTAQASTPGQPPPQPQAPSHAAGQSALPQRLVLPSQAQARLPSGEVVKIAQLASITGPQSRVAQPETPVTLQFQGSKFTLSHSQLRQLTAGQPLQLQGSVLQIVSAPGQPYLRAPGPVVMQTVSQAGAVHGALGSKPPAGGPSPAPLTPQVGVPGRVAVNALAVGEPGTASKPASPIGGPTQEEKTRLLKERLDQIYLVNERRCSQAPVYGRDLLRICALPSHGRVQWRGSLDGRRGKEAGPAHSYTSSSESPSELMLTLCRCGESLQDVIDRVAFVIPPVVAAPPSLRVPRPPPLYSHRMRILRQGLREHAAPYFQQLRQTTAPRLLQFPELRLVQFDSGKLEALAILLQKLKSEGRRVLILSQMILMLDILEMFLNFHYLTYVRIDENASSEQRQELMRSFNRDRRIFCAILSTHSRTTGINLVEADTVVFYDNDLNPVMDAKAQEWCDRIGRCKDIHIYRLVSGNSIEEKLLKNGTKDLIREVAAQGNDYSMAFLTQRTIQELFEVYSPMDDAGFPVKAEEFVVLSQEPSVTETIAPKIARPFIEALKSIEYLEEDAQKSAQEGVLGPHTDALSSDSENMPCDEEPSQLEELADFMEQLTPIEKYALNYLELFHTSIEQEKERNSEDAVMTAVRAWEFWNLKTLQEREARLRLEQEEAELLTYTREDAYSMEYVYEDVDGQTEVMPLWTPPTPPQDDSDIYLDSVMCLMYEATPIPEAKLPPVYVRKERKRHKTDPSAAGRKKKQRHGEAVVPPRSLFDRATPGLLKIRREGKEQKKNILLKQQVPFAKPLPTFAKPTAEPGQDNPEWLISEDWALLQAVKQLLELPLNLTIVSPAHTPNWDLVSDVVNSCSRIYRSSKQCRNRYENVIIPREEGKSKNNRPLRTSQIYAQDENATHTQLYTSHFDLMKMTAGKRSPPIKPLLGMNPFQKNPKHASVLAESGINYDKPLPPIQVASLRAERIAKEKKALADQQKAQQPAVAQPPPPQPQPPPPPQQPPPPLPQPQAAGSQPPAGPPAVQPQPQPQPQTQPQPVQAPAKAQPAITTGGSAAVLAGTIKTSVTGTSMPTGAVSGNVIVNTIAGVPAATFQSINKRLASPVAPGALTTPGGSAPAQVVHTQPPPRAVGSPATATPDLVSMATTQGVRAVTSVTASAVVTTNLTPVQTPARSLVPQVSQATGVQLPGKTITPAHFQLLRQQQQQQQQQQQQQQQQQQQQQQQQQQQQQTTTTSQVQVPQIQGQAQSPAQIKAVGKLTPEHLIKMQKQKLQMPPQPPPPQAQSAPPQPTAQVQVQTSQPPQQQSPQLTTVTAPRPGALLTGTTVANLQVARLTRVPTSQLQAQGQMQTQAPQPAQVALAKPPVVSVPAAVVSSPGVTTLPMNVAGISVAIGQPQKAAGQTVVAQPVHMQQLLKLKQQAVQQQKAIQPQAAQGPAAVQQKITAQQITTPGAQQKVAYAAQPALKTQFLTTPISQAQKLAGAQQVQTQIQVAKLPQVVQQQTPVASIQQVASASQQASPQTVALTQATAAGQQVQMIPAVTATAQVVQQKLIQQQVVTTASAPLQTPGAPNPAQVPASSDSPSQQPKLQMRVPAVRLKTPTKPPCQ

SEQ ID NO: 186500 - protein, 3123 aa, Artificial Sequence
  derived and/or modified sequence
MHHGTGPQNVQHQLQRSRACPGSEGEEQPAHPNPPPSPAAPFAPSASPSAPQSPSYQIQQLMNRSPATGQNVNITLQSVGPVVGGNQQITLAPLPLPSPTSPGFQFSAQPRRFEHGSPSYIQVTSPLSQQVQTQSPTQPSPGPGQALQNVRAGAPGPGLGLCSSSPTGGFVDASVLVRQISLSPSSGGHFVFQDGSGLTQIAQGAQVQLQHPGTPITVRERRPSQPHTQSGGTIHHLGPQSPAAAGGAGLQPLASPSHITTANLPPQISSIIQGQLVQQQQVLQGPPLPRPLGFERTPGVLLPGAGGAAGFGMTSPPPPTSPSRTAVPPGLSSLPLTSVGNTGMKKVPKKLEEIPPASPEMAQMRKQCLDYHYQEMQALKEVFKEYLIELFFLQHFQGNMMDFLAFKKKHYAPLQAYLRQNDLDIEEEEEEEEEEEEKSEVINDEQQALAGSLVAGAGSTVETDLFKRQQAMPSTGMAEQSKRPRLEVGHQGVVFQHPGADAGVPLQQLMPTAQGGMPPTPQAAQLAGQRQSQQQYDPSTGPPVQNAASLHTPLPQLPGRLPPAGVPTAALSSALQFAQQPQVVEAQTQLQIPVKTQQPNVPIPAPPSSQLPIPPSQPAQLALHVPTPGKVQVQASQLSSLPQMVASTRLPVDPAPPCPRPLPTSSTSSLAPVSGSGPGPSPARSSPVNRPSSATNKALSPVTSRTPGVVASAPTKPQSPAQNATSSQDSSQDTLTEQITLENQVHQRIAELRKAGLWSQRRLPKLQEAPRPKSHWDYLLEEMQWMATDFAQERRWKVAAAKKLVRTVVRHHEEKQLREERGKKEEQSRLRRIAASTAREIECFWSNIEQVVEIKLRVELEEKRKKALNLQKVSRRGKELRPKGFDALQESSLDSGMSGRKRKASISLTDDEVDDEEETIEEEEANEGVVDHQTELSNLAKEAELPLLDLMKLYEGAFLPSSQWPRPKPDGEDTSGEEDADDCPGDRESRKDLVLIDSLFIMDQFKAAERMNIGKPNAKDIADVTAVAEAILPKGSARVTTSVKFNAPSLLYGALRDYQKIGLDWLAKLYRKNLNGILADEAGLGKTVQIIAFFAHLACNEGNWGPHLVVVRSCNILKWELELKRWCPGLKILSYIGSHRELKAKRQEWAEPNSFHVCITSYTQFFRGLTAFTRVRWKCLVIDEMQRVKGMTERHWEAVFTLQSQQRLLLIDSPLHNTFLELWTMVHFLVPGISRPYLSSPLRAPSEESQDYYHKVVIRLHRVTQPFILRRTKRDVEKQLTKKYEHVLKCRLSNRQKALYEDVILQPGTQEALKSGHFVNVLSILVRLQRICNHPGLVEPRHPGSSYVAGPLEYPSASLILKALERDFWKEADLSMFDLIGLENKITRHEAELLSKKKIPRKLMEEISTSAAPAARPAAAKLKASRLFQPVQYGQKPEGRTVAFPSTHPPRTAAPTTASAAPQGPLRGRPPIATFSANPEAKAAAAPFQTSQASASAPRHQPASASSTAASPAHPAKLRAQTTAQASTPGQPPPQPQAPSHAAGQSALPQRLVLPSQAQARLPSGEVVKIAQLASITGPQSRVAQPETPVTLQFQGSKFTLSHSQLRQLTAGQPLQLQGSVLQIVSAPGQPYLRAPGPVVMQTVSQAGAVHGALGSKPPAGGPSPAPLTPQVGVPGRVAVNALAVGEPGTASKPASPIGGPTQEEKTRLLKERLDQIYLVNERRCSQAPVYGRDLLRICALPSHGRVQWRGSLDGRRGKEAGPAHSYTSSSESPSELMLTLCRCGESLQDVIDRVAFVIPPVVAAPPSLRVPRPPPLYSHRMRILRQGLREHAAPYFQQLRQTTAPRLLQFPELRLVQFDSGKLEALAILLQKLKSEGRRVLILSQMILMLDILEMFLNFHYLTYVRIDENASSEQRQELMRSFNRDRRIFCAILSTHSRTTGINLVEADTVVFYDNDLNPVMDAKAQEWCDRIGRCKDIHIYRLVSGNSIEEKLLKNGTKDLIREVAAQGNDYSMAFLTQRTIQELFEVYSPMDDAGFPVKAEEFVVLSQEPSVTETIAPKIARPFIEALKSIEYLEEDAQKSAQEGVLGPHTDALSSDSENMPCDEEPSQLEELADFMEQLTPIEKYALNYLELFHTSIEQEKERNSEDAVMTAVRAWEFWNLKTLQEREARLRLEQEEAELLTYTREDAYSMEYVYEDVDGQTEVMPLWTPPTPPQDDSDIYLDSVMCLMYEATPIPEAKLPPVYVRKERKRHKTDPSAAGRKKKQRHGEAVVPPRSLFDRATPGLLKIRREGKEQKKNILLKQQVPFAKPLPTFAKPTAEPGQDNPEWLISEDWALLQAVKQLLELPLNLTIVSPAHTPNWDLVSDVVNSCSRIYRSSKQCRNRYENVIIPREEGKSKNNRPLRTSQIYAQDENATHTQLYTSHFDLMKMTAGKRSPPIKPLLGMNPFQKNPKHASVLAESGINYDKPLPPIQVASLRAERIAKEKKALADQQKAQQPAVAQPPPPQPQPPPPPQQPPPPLPQPQAAGSQPPAGPPAVQPQPQPQPQTQPQPVQAPAKAQPAITTGGSAAVLAGTIKTSVTGTSMPTGAVSGNVIVNTIAGVPAATFQSINKRLASPVAPGALTTPGGSAPAQVVHTQPPPRAVGSPATATPDLVSMATTQGVRAVTSVTASAVVTTNLTPVQTPARSLVPQVSQATGVQLPGKTITPAHFQLLRQQQQQQQQQQQQQQQQQQQQQQQQQQQQQTTTTSQVQVPQIQGQAQSPAQIKAVGKLTPEHLIKMQKQKLQMPPQPPPPQAQSAPPQPTAQVQVQTSQPPQQQSPQLTTVTAPRPGALLTGTTVANLQVARLTRVPTSQLQAQGQMQTQAPQPAQVALAKPPVVSVPAAVVSSPGVTTLPMNVAGISVAIGQPQKAAGQTVVAQPVHMQQLLKLKQQAVQQQKAIQPQAAQGPAAVQQKITAQQITTPGAQQKVAYAAQPALKTQFLTTPISQAQKLAGAQQVQTQIQVAKLPQVVQQQTPVASIQQVASASQQASPQTVALTQATAAGQQVQMIPAVTATAQVVQQKLIQQQVVTTASAPLQTPGAPNPAQVPASSDSPSQQPKLQMRVPAVRLKTPTKPPCQ

SEQ ID NO: 186501 - protein, 3122 aa, Artificial Sequence
  derived and/or modified sequence
MHHGTGPQNVQHQLQRSRACPGSEGEEQPAHPNPPPSPAAPFAPSASPSAPQSPSYQIQQLMNRSPATGQNVNITLQSVGPVVGGNQQITLAPLPLPSPTSPGFQFSAQPRRFEHGSPSYIQVTSPLSQQVQTQSPTQPSPGPGQALQNVRAGAPGPGLGLCSSSPTGGFVDASVLVRQISLSPSSGGHFVFQDGSGLTQIAQGAQVQLQHPGTPITVRERRPSQPHTQSGGTIHHLGPQSPAAAGGAGLQPLASPSHITTANLPPQISSIIQGQLVQQQQVLQGPPLPRPLGFERTPGVLLPGAGGAAGFGMTSPPPPTSPSRTAVPPGLSSLPLTSVGNTGMKKVPKKLEEIPPASPEMAQMRKQCLDYHYQEMQALKEVFKEYLIELFFLQHFQGNMMDFLAFKKKHYAPLQAYLRQNDLDIEEEEEEEEEEEEKSEVINDEQALAGSLVAGAGSTVETDLFKRQQAMPSTGMAEQSKRPRLEVGHQGVVFQHPGADAGVPLQQLMPTAQGGMPPTPQAAQLAGQRQSQQQYDPSTGPPVQNAASLHTPLPQLPGRLPPAGVPTAALSSALQFAQQPQVVEAQTQLQIPVKTQQPNVPIPAPPSSQLPIPPSQPAQLALHVPTPGKVQVQASQLSSLPQMVASTRLPVDPAPPCPRPLPTSSTSSLAPVSGSGPGPSPARSSPVNRPSSATNKALSPVTSRTPGVVASAPTKPQSPAQNATSSQDSSQDTLTEQITLENQVHQRIAELRKAGLWSQRRLPKLQEAPRPKSHWDYLLEEMQWMATDFAQERRWKVAAAKKLVRTVVRHHEEKQLREERGKKEEQSRLRRIAASTAREIECFWSNIEQVVEIKLRVELEEKRKKALNLQKVSRRGKELRPKGFDALQESSLDSGMSGRKRKASISLTDDEVDDEEETIEEEEANEGVVDHQTELSNLAKEAELPLLDLMKLYEGAFLPSSQWPRPKPDGEDTSGEEDADDCPGDRESRKDLVLIDSLFIMDQFKAAERMNIGKPNAKDIADVTAVAEAILPKGSARVTTSVKFNAPSLLYGALRDYQKIGLDWLAKLYRKNLNGILADEAGLGKTVQIIAFFAHLACNEGNWGPHLVVVRSCNILKWELELKRWCPGLKILSYIGSHRELKAKRQEWAEPNSFHVCITSYTQFFRGLTAFTRVRWKCLVIDEMQRVKGMTERHWEAVFTLQSQQRLLLIDSPLHNTFLELWTMVHFLVPGISRPYLSSPLRAPSEESQDYYHKVVIRLHRVTQPFILRRTKRDVEKQLTKKYEHVLKCRLSNRQKALYEDVILQPGTQEALKSGHFVNVLSILVRLQRICNHPGLVEPRHPGSSYVAGPLEYPSASLILKALERDFWKEADLSMFDLIGLENKITRHEAELLSKKKIPRKLMEEISTSAAPAARPAAAKLKASRLFQPVQYGQKPEGRTVAFPSTHPPRTAAPTTASAAPQGPLRGRPPIATFSANPEAKAAAAPFQTSQASASAPRHQPASASSTAASPAHPAKLRAQTTAQASTPGQPPPQPQAPSHAAGQSALPQRLVLPSQAQARLPSGEVVKIAQLASITGPQSRVAQPETPVTLQFQGSKFTLSHSQLRQLTAGQPLQLQGSVLQIVSAPGQPYLRAPGPVVMQTVSQAGAVHGALGSKPPAGGPSPAPLTPQVGVPGRVAVNALAVGEPGTASKPASPIGGPTQEEKTRLLKERLDQIYLVNERRCSQAPVYGRDLLRICALPSHGRVQWRGSLDGRRGKEAGPAHSYTSSSESPSELMLTLCRCGESLQDVIDRVAFVIPPVVAAPPSLRVPRPPPLYSHRMRILRQGLREHAAPYFQQLRQTTAPRLLQFPELRLVQFDSGKLEALAILLQKLKSEGRRVLILSQMILMLDILEMFLNFHYLTYVRIDENASSEQRQELMRSFNRDRRIFCAILSTHSRTTGINLVEADTVVFYDNDLNPVMDAKAQEWCDRIGRCKDIHIYRLVSGNSIEEKLLKNGTKDLIREVAAQGNDYSMAFLTQRTIQELFEVYSPMDDAGFPVKAEEFVVLSQEPSVTETIAPKIARPFIEALKSIEYLEEDAQKSAQEGVLGPHTDALSSDSENMPCDEEPSQLEELADFMEQLTPIEKYALNYLELFHTSIEQEKERNSEDAVMTAVRAWEFWNLKTLQEREARLRLEQEEAELLTYTREDAYSMEYVYEDVDGQTEVMPLWTPPTPPQDDSDIYLDSVMCLMYEATPIPEAKLPPVYVRKERKRHKTDPSAAGRKKKQRHGEAVVPPRSLFDRATPGLLKIRREGKEQKKNILLKQQVPFAKPLPTFAKPTAEPGQDNPEWLISEDWALLQAVKQLLELPLNLTIVSPAHTPNWDLVSDVVNSCSRIYRSSKQCRNRYENVIIPREEGKSKNNRPLRTSQIYAQDENATHTQLYTSHFDLMKMTAGKRSPPIKPLLGMNPFQKNPKHASVLAESGINYDKPLPPIQVASLRAERIAKEKKALADQQKAQQPAVAQPPPPQPQPPPPPQQPPPPLPQPQAAGSQPPAGPPAVQPQPQPQPQTQPQPVQAPAKAQPAITTGGSAAVLAGTIKTSVTGTSMPTGAVSGNVIVNTIAGVPAATFQSINKRLASPVAPGALTTPGGSAPAQVVHTQPPPRAVGSPATATPDLVSMATTQGVRAVTSVTASAVVTTNLTPVQTPARSLVPQVSQATGVQLPGKTITPAHFQLLRQQQQQQQQQQQQQQQQQQQQQQQQQQQQQTTTTSQVQVPQIQGQAQSPAQIKAVGKLTPEHLIKMQKQKLQMPPQPPPPQAQSAPPQPTAQVQVQTSQPPQQQSPQLTTVTAPRPGALLTGTTVANLQVARLTRVPTSQLQAQGQMQTQAPQPAQVALAKPPVVSVPAAVVSSPGVTTLPMNVAGISVAIGQPQKAAGQTVVAQPVHMQQLLKLKQQAVQQQKAIQPQAAQGPAAVQQKITAQQITTPGAQQKVAYAAQPALKTQFLTTPISQAQKLAGAQQVQTQIQVAKLPQVVQQQTPVASIQQVASASQQASPQTVALTQATAAGQQVQMIPAVTATAQVVQQKLIQQQVVTTASAPLQTPGAPNPAQVPASSDSPSQQPKLQMRVPAVRLKTPTKPPCQ

SEQ ID NO: 186502 - protein, 824 aa, Artificial Sequence
  derived and/or modified sequence
MHHGTGPQNVQHQLQRSRACPGSEGEEQPAHPNPPPSPAAPFAPSASPSAPQSPSYQIQQLMNRSPATGQNVNITLQSVGPVVGGNQQITLAPLPLPSPTSPGFQFSAQPRRFEHGSPSYIQVTSPLSQQVQTQSPTQPSPGPGQALQNVRAGAPGPGLGLCSSSPTGGFVDASVLVRQISLSPSSGGHFVFQDGSGLTQIAQGAQVQLQHPGTPITVRERRPSQPHTQSGGTIHHLGPQSPAAAGGAGLQPLASPSHITTANLPPQISSIIQGQLVQQQQVLQGPPLPRPLGFERTPGVLLPGAGGAAGFGMTSPPPPTSPSRTAVPPGLSSLPLTSVGNTGMKKVPKKLEEIPPASPEMAQMRKQCLDYHYQEMQALKEVFKEYLIELFFLQHFQGNMMDFLAFKKKHYAPLQAYLRQNDLDIEEEEEEEEEEEEKSEVINDEQALAGSLVAGAGSTVETDLFKRQQAMPSTGMAGGMPPTPQAAQLAGQRQSQQQYDPSTGPPVQNAASLHTPLPQLPGRLPPAGVPTAALSSALQFAQQPQVVEAQTQLQIPVKTQQPNVPIPAPPSSQLPIPPSQPAQLALHVPTPGKVQVQASQLSSLPQMVASTRLPVDPAPPCPRPLPTSSTSSLAPVSGSGPGPSPARSSPVNRPSSATNKALSPVTSRTPGVVASAPTKPQSPAQNATSSQDSSQDTLTEQITLENQVHQRIAELRKAGLWSQRRLPKLQEAPRPKSHWDYLLEEMQWMATDFAQERRWKVAAAKKLVRTVVRHHEEKQLREERGKKEEQSRLRRIAASTAREIECFWSNIEQVVEIKLRVELE

SEQ ID NO: 186503 - DNA, 1038 bp, Artificial Sequence
  derived and/or modified sequence
atgcagcacgtgagcagcagccagagcagccagagacacgtgcagtggcccggcgcctgccccggcgccggcgaggagcagcccgcctgcagccagcccagcctgcccctgaccctgcccagccccagccaccagctgcagcagctgatggacggcagcggcctgacccagatcgcccagggcgcccaggtgcagctgcagcaccccggcacccccatcaccgtgagagagagaagacccagccagccccacacccagagcggcggcaccatccaccacctgggcccccagagccccgccgccgccggcggcgccggcctgcagcccctggccagccccagccacatcaccaccgccaacctgcccccccagcccagacccctgggcttcgagagaacccccggcgtgctgctgcccggcgccggcggcgccgccggcttcggcatgaccagcccccccccccccaccagccccagcagaaccgccgtgccccccggcctgagcagcctgcccctgaccagcgtgggcaacaccggcatgaagaaggtgcccaagaagctggaggagatcccccccgccagccccgagatggcccagatgagaaagcagtgcctggactaccaccaccaggagatgcaggccctgaaggaggtgttcaaggagtacctgatcgagctgttcttcctgcagcacttccagggcaacatgatggacttcctggccttcaaggagagactgtacggccccctgcaggcctacctgagacagaacgacctggacatcgaggaggaggaggaggagcacttcgaggtgatcaacgacgaggtgaaggtggtggccagaaagcacggccagcccggcacccccgtggccatcgccacccagctgccccccagaaccagcgccgccttccccgcccagcagcagcccctgcagcccctggcccccaccaccgtgctgagcgtgagcgccgactggaacgccctgctgcagagacccaacaagtacatctggggcctgcagtacctggagatgtag

SEQ ID NO: 186504 - DNA, 1467 bp, Artificial Sequence
  derived and/or modified sequence
atgcagcacgtgagcagcagccagagcagccagagacacgtgcagtggcccggcgcctgccccggcgccggcgaggagcagcccgcctgcagccagcccagcctgcccctgaccctgcccagccccagccaccagctgcagcagctgatggtgagaggcggccccgccggcggccagaacatgaacgtggacctgcagggcgtgggccccggcctgcagggcagcccccaggtgaccctggcccccctgcccctgcccagccccaccagccccggcttccagttcagcgcccagcccagaagattcgagcacggcagccccagctacatccaggtgaccagccccctgagccagcaggtgcagacccagagccccacccagcccagccccggccccggccaggccctgcagaacgtgagagccggcgcccccggccccggcctgggcctgtgcagcagcagccccaccggcgacttcgtggacgccagcgtgctggtgagacagatcagcctgagccccagcagcggcggccacttcgtgttccaggacggcagcggcctgacccagatcgcccagggcgcccaggtgcagctgcagcaccccggcacccccatcaccgtgagagagagaagacccagccagccccacacccagagcggcggcaccatccaccacctgggcccccagagccccgccgccgccggcggcgccggcctgcagcccctggccagccccagccacatcaccaccgccaacctgcccccccagatcagcagcatcatccagggccagctggtgcagcagcagcaggtgctgcagggcccccccctgcccagacccctgggcttcgagagaacccccggcgtgctgctgcccggcgccggcggcgccgccggcttcggcatgaccagcccccccccccccaccagccccagcagaaccgccgtgccccccggcctgagcagcctgcccctgaccagcgtgggcaacaccggcatgaagaaggtgcccaagaagctggaggagatcccccccgccagccccgagatggcccagatgagaaagcagtgcctggactaccaccaccaggagatgcaggccctgaaggaggtgttcaaggagtacctgatcgagctgttcttcctgcagcacttccagggcaacatgatggacttcctggccttcaaggagagactgtacggccccctgcaggcctacctgagacagaacgacctggacatcgaggaggaggaggaggagcacttcgaggtgatcaacgacgaggtgaaggtggtggccagaaagcacggccagcccggcacccccgtggccatcgccacccagctgccccccagaaccagcgccgccttccccgcccagcagcagcccctgcagcagatccacatgggcacccccgtgcccggcgacgtgaacagcatcaagatggaggccagcaagagacagtag

SEQ ID NO: 186505 - DNA, 1260 bp, Artificial Sequence
  derived and/or modified sequence
atgcagcacgtgagcagcagccagagcagccagagacacgtgcagtggcccggcgcctgccccggcgccggcgaggagcagcccgcctgcagccagcccagcctgcccctgaccctgcccagccccagccaccagctgcagcagctgatggtgcagacccagagccccacccagcccagccccggccccggccaggccctgcagaacgtgagagccggcgcccccggccccggcctgggcctgtgcagcagcagccccaccggcgacttcgtggacgccagcgtgctggtgagacagatcagcctgagccccagcagcggcggccacttcgtgttccaggacggcagcggcctgacccagatcgcccagggcgcccaggtgcagctgcagcaccccggcacccccatcaccgtgagagagagaagacccagccagccccacacccagagcggcggcaccatccaccacctgggcccccagagccccgccgccgccggcggcgccggcctgcagcccctggccagccccagccacatcaccaccgccaacctgcccccccagatcagcagcatcatccagggccagctggtgcagcagcagcaggtgctgcagggcccccccctgcccagacccctgggcttcgagagaacccccggcgtgctgctgcccggcgccggcggcgccgccggcttcggcatgaccagcccccccccccccaccagccccagcagaaccgccgtgccccccggcctgagcagcctgcccctgaccagcgtgggcaacaccggcatgaagaaggtgcccaagaagctggaggagatcccccccgccagccccgagatggcccagatgagaaagcagtgcctggactaccaccaccaggagatgcaggccctgaaggaggtgttcaaggagtacctgatcgagctgttcttcctgcagcacttccagggcaacatgatggacttcctggccttcaaggagagactgtacggccccctgcaggcctacctgagacagaacgacctggacatcgaggaggaggaggaggagcacttcgaggtgatcaacgacgaggtgaaggtggtggccagaaagcacggccagcccggcacccccgtggccatcgccacccagctgccccccagaaccagcgccgccttccccgcccagcagcagcccctgcaggtgctgagcgacggcagcaccgtgcagctgcccagactgagcagcctgggcttcgaggacagcatgtgctag

SEQ ID NO: 186506 - DNA, 1071 bp, Artificial Sequence
  derived and/or modified sequence
atgcagcacgtgagcagcagccagagcagccagagacacgtgcagtggcccggcgcctgccccggcgccggcgaggagcagcccgcctgcagccagcccagcctgcccctgaccctgcccagccccagccaccagctgcagcagctgatggacggcagcggcctgacccagatcgcccagggcgcccaggtgcagctgcagcaccccggcacccccatcaccgtgagagagagaagacccagccagccccacacccagagcggcggcaccatccaccacctgggcccccagagccccgccgccgccggcggcgccggcctgcagcccctggccagccccagccacatcaccaccgccaacctgcccccccagatcagcagcatcatccagggccagctggtgcagcagcagcaggtgctgcagggcccccccctgcccagacccctgggcttcgagagaacccccggcgtgctgctgcccggcgccggcggcgccgccggcttcggcatgaccagcccccccccccccaccagccccagcagaaccgccgtgccccccggcctgagcagcctgcccctgaccagcgtgggcaacaccggcatgaagaaggtgcccaagaagctggaggagatcccccccgccagccccgagatggcccagatgagaaagcagtgcctggactaccaccaccaggagatgcaggccctgaaggaggtgttcaaggagtacctgatcgagctgttcttcctgcagcacttccagggcaacatgatggacttcctggccttcaaggagagactgtacggccccctgcaggcctacctgagacagaacgacctggacatcgaggaggaggaggaggagcacttcgaggtgatcaacgacgaggtgaaggtggtggccagaaagcacggccagcccggcacccccgtggccatcgccacccagctgccccccagaaccagcgccgccttccccgcccagcagcagcccctgcaggtgctgagcgacggcagcaccgtgcagctgcccagactgagcagcctgggcttcgaggacagcatgtgctag

SEQ ID NO: 186507 - DNA, 654 bp, Artificial Sequence
  derived and/or modified sequence
atgcagcacgtgagcagcagccagagcagccagagacacgtgcagtggcccggcgcctgccccggcgccggcgaggagcagcccgcctgcagccagcccagcctgcccctgaccctgcccagccccagccaccagctgcagcagctgatggacggcagcggcctgacccagatcgcccagggcgcccaggtgcagctgcagcaccccggcacccccatcaccgtgagagagagaagacccagccagccccacacccagagcggcggcaccatccaccacctgggcccccagagccccgccgccgccggcggcgccggcctgcagcccctggccagccccagccacatcaccaccgccaacctgcccccccagatcagcagcatcatccagggccagctggtgcagcagcagcaggtgctgcagggcccccccctgcccagacccctgggcttcgagagaacccccggcgtgctgctgcccggcgccggcggcgccgccggcttcggcatgaccagcccccccccccccaccagccccagcagaaccgccgtgccccccggcctgagcagcctgcccctgaccagcgtgggcaacaccggcatgaagaaggtgcccaagaagctggaggagatcccccccgccagccccgagtag

SEQ ID NO: 186508 - DNA, 672 bp, Artificial Sequence
  derived and/or modified sequence
atgcagcacgtgagcagcagccagagcagccagagacacgtgcagtggcccggcgcctgccccggcgccggcgaggagcagcccgcctgcagccagcccagcctgcccctgaccctgcccagccccagccaccagctgcagcagctgatggtgcagacccagagccccacccagcccagccccggccccggccaggccctgcagaacgtgagagccggcgcccccggccccggcctgggcctgtgcagcagcagccccaccggcgacttcgtggacgccagcgtgctggtgagacagatcagcctgagccccagcagcggcggccacttcgtgttccaggacggcagcggcctgacccagatcgcccagggcgcccaggtgcagctgcagcaccccggcacccccatcaccgtgagagagagaagacccagccagccccacacccagagcggcggcaccatccaccacctgggcccccagagccccgccgccgccggcggcgccggcctgcagcccctggccagccccagccacatcaccaccgccaacctgcccccccagatcagcagcatcatccagggccagctggtgcagcagcagcaggtgctgcagggcccccccctgcccagacccctgggcttcgagagaacccccggcgtgctgctgccctag

SEQ ID NO: 186509 - DNA, 471 bp, Artificial Sequence
  derived and/or modified sequence
atgcagcacgtgagcagcagccagagcagccagagacacgtgcagtggcccggcgcctgccccggcgccggcgaggagcagcccgcctgcagccagcccagcctgcccctgaccctgcccagccccagccaccagctgcagcagctgatggtgcagacccagagccccacccagcccagccccggccccggccaggccctgcagaacgtgagagccggcgcccccggccccggcctgggcctgtgcagcagcagccccaccggcgacttcgtggacgccagcgtgctggtgagacagatcagcctgagccccagcagcggcggccacttcgtgttccaggacggcagcggcctgacccagatcgcccagggcgcccaggtgcagctgcagcaccccggcacccccatcaccgtgagagagagaagacccagccagccccacacccagagcggcggcaccatccaccactag

SEQ ID NO: 186510 - DNA, 1038 bp, Artificial Sequence
  derived and/or modified sequence
atgcagcacgtgagcagcagccagagcagccagagacatgttcagtggcccggggcctgccctggcgccggggaggaacagcctgcctgttctcaaccatccttaccgctgacgctgcctagcccctcccatcagctgcagcagttaatggatggtagcgggctgactcagatcgcccagggcgctcaggttcagctgcaacatcctggcacacctattaccgtacgcgagcgacggccgtctcaaccccacacgcagtccgggggcaccatccaccaccttgggccccagtcgcccgccgcagccgggggtgctggattgcagccgctggccagcccatctcatatcaccaccgctaacctgcctcctcagcccaggccattgggttttgaacgaactcctggggttctgctccccggtgcaggcggggcagccggattcggaatgacttcaccccctcccccgacctcaccctcccgcaccgctgtgccgcctggcctttctagcctgcctctgacaagtgtggggaataccgggatgaagaaggttccaaagaaattggaggagatcccacctgccagcccagaaatggcccaaatgcggaaacagtgcttggactatcaccaccaggagatgcaagccttgaaggaagtgtttaaagaatatctcattgaactgttctttttgcagcatttccagggtaacatgatggatttcctggccttcaaggagcgcctgtatggaccgctccaggcttatctgcgccagaatgaccttgatatcgaagaagaggaagaagaacacttcgaggtgattaatgacgaagtcaaagtcgtggcacggaagcatggccagcccggaactccggtagctatagcgacacagctaccaccacgcacctctgccgcattccccgcccagcagcagcctttgcaaccactggcacctacaactgttttgtccgtttctgcagactggaatgctctcctgcagcgtcctaacaagtacatttggggactgcagtatctggagatgtag

SEQ ID NO: 186511 - DNA, 1467 bp, Artificial Sequence
  derived and/or modified sequence
atgcagcacgtgtccagcagtcaatcctctcagaggcatgtgcagtggccaggggcctgtcctggcgccggagaggagcagcctgcttgttctcagcccagcctgcctcttacgttaccctcacccagtcatcaattacagcaactcatggtacggggcggtcccgcgggagggcagaacatgaacgtcgacctgcagggagtgggacccggcttgcagggttccccacaggtgacactcgcgcccctgcccctgccgtctcctacatcgcccggattccagttctcggcgcagcctagacggtttgaacatggatccccaagctacatccaggtgacctctcctctgagccagcaggtgcagacgcaatcgccgacacaaccctcaccgggacccggacaagcactccagaacgtgcgggcaggtgccccaggccctggacttgggttatgctccagttctcctacaggggacttcgtcgacgcctcagttcttgtgaggcagatttcactttccccaagctcaggaggccacttcgttttccaggatggctctggactcacccaaatcgcgcagggcgcccaggttcagcttcagcatccgggtacaccgatcactgtccgggaacggcgacctagccagccacacactcagtccgggggcactatccaccatctgggaccccaatcccccgctgcagcaggaggggcgggcctacagcccttggcctctccaagtcatattaccacggccaatctgcccccccaaatctcctcaatcatccagggtcagctggtccaacagcagcaagtgctgcaaggacctcccttgccacgaccattagggttcgagcgcacacccggcgtgctattgccaggagccgggggtgctgccggatttggaatgacttctcccccaccaccaacctcgccatcccgaacagcagtgcctccagggctctcctcactcccactcacctctgtgggcaatacaggcatgaaaaaagtgcctaagaagctcgaagagataccacctgccagccctgagatggcccagatgcgaaaacagtgccttgactatcaccaccaagaaatgcaagccctaaaggaggtcttcaaagagtacctgattgagctattctttctgcagcactttcaggggaacatgatggattttttagcattcaaagagaggctttacggcccattgcaggcttatcttaggcagaatgacctcgacatcgaggaagaggaggaggagcacttcgaggtgataaatgacgaagttaaggtggtggctaggaagcacggccagcctggtacgcctgtcgccattgcaactcagttgcctccccgaacgtccgctgcattccctgcccagcaacagccccttcagcagatacacatgggtacgcctgtgccgggggacgtgaacagcatcaagatggaagcctccaagcggcagtag

SEQ ID NO: 186512 - DNA, 1260 bp, Artificial Sequence
  derived and/or modified sequence
atgcagcacgtgtcttcaagccagtcgtctcagagacatgtccaatggccgggtgcctgccctggtgccggtgaagagcagcccgcatgcagtcaacccagcttgcccctgaccttaccctccccttctcaccagctacagcagctcatggtgcagactcagagccccacccaaccgagtccaggtccagggcaagctctgcagaacgttcgtgccggggcgcctggccccggactcggcctttgttcctcatccccaactggcgacttcgtcgacgcgagtgtgctggttcgccagatctccctgtccccttcctcaggggggcactttgtctttcaagatggcagcggtcttactcagatagcccagggtgcacaggtgcaactacagcacccaggaacacctatcaccgtgcgagagcggaggccttctcagccccacacccagagcggcggcacaatccaccatcttgggccccagtctccagccgctgcaggaggcgcagggttgcagcccctggcttctccatcacacatcactactgctaatttaccaccccaaatctcttccattatccagggacaacttgtgcagcagcaacaggtgctgcagggcccccctctgccaaggcctctcggtttcgaacgcacgcccggcgtccttcttcccggagccggcggtgccgctggttttggcatgaccagccctccaccacccacatctccaagccgcaccgccgtacctcccggactatcttccctccccctgacctccgtaggtaacacggggatgaaaaaggtgcccaagaaactggaagaaattcctcccgcatcccccgaaatggcgcaaatgcggaagcagtgtctggactaccaccatcaggagatgcaggctctcaaagaagtttttaaagaatacttgattgaattgttcttcttgcagcacttccaggggaatatgatggatttcctggcattcaaggaaaggttatacggtcccttacaagcgtacctgcgccagaatgatctcgatatcgaggaggaggaagaggagcactttgaggtgattaacgatgaagtgaaagttgtagctaggaagcacggacagccaggcacccccgtggctatcgcaacccagttaccacctcggaccagtgcagcatttccggcgcagcaacagcccctgcaagtgctgagcgacggctctacagttcagctgccgagactatctagtctgggattcgaagatagcatgtgctag

SEQ ID NO: 186513 - DNA, 1071 bp, Artificial Sequence
  derived and/or modified sequence
atgcagcacgtctcatcctcacagagcagtcagagacacgtgcagtggccgggcgcttgcccaggagcaggagaggaacagccagcatgctcccaacctagtctgccgttgacccttccatctccctctcatcagctgcagcagctgatggacggatcaggcctgacacagatagcacagggagcacaggtacagctgcagcatccaggaaccccgatcacagtcagagagaggcgccctagccagccacatacacaaagtggtggcactatccaccacctgggtccgcagagtcccgccgcagccggaggggcagggctgcagccgctggcctctccctcccatataaccacagccaacttgccgccccagatctccagcatcattcagggtcaactcgtgcaacagcaacaagtgctgcagggccctccattgccccgacctctcgggtttgaacgaaccccaggggttctacttcccggagccggaggcgccgcagggtttggtatgaccagcccccctccaccaacgagcccatcccgcacagccgtgcctcctgggctctcttcactgccgctgactagcgtggggaatactggtatgaagaaggtccccaaaaaactggaggagatccctccagcgtcaccagagatggctcagatgcgcaaacaatgtctggattatcaccaccaggaaatgcaggcactgaaggaagtcttcaaagagtatttaatcgagctgttctttcttcagcacttccaaggcaatatgatggactttctggcctttaaggagcgcctgtatggcccactgcaggcctacttaaggcaaaatgaccttgatatcgaagaggaggaggaggagcacttcgaggttattaatgatgaggttaaagtggtcgcgcgcaagcatggccagccgggtactcccgtggcgatcgccacccagctgcccccccgcactagcgccgcatttcccgcacaacagcagcctctacaggtgctgagcgacggcagcacagtacagctgccgcggctgtcatctttaggcttcgaggacagtatgtgctag

SEQ ID NO: 186514 - DNA, 654 bp, Artificial Sequence
  derived and/or modified sequence
atgcaacatgtctcatcatcacagtcgagccagcgacacgtccagtggcctggagcctgtccaggtgctggagaggagcagccagcgtgtagccaaccctcactccccttgacgctgccttctccctcccaccagctgcagcaactcatggatggttctggtctgacgcagatcgctcagggcgcccaggtccagttgcagcacccagggacgcccattactgttcgggaaagaaggccatcccagccacacacccaaagtggcggtactatccatcatcttgggcctcaatcgcctgcagcagccggaggcgccgggttgcagccattggctagccccagccacattaccacagcgaacctgcccccgcagatctcttcgataatccagggtcagctggtgcagcaacagcaggtgttgcaaggaccaccgctgccccgccccctcggctttgaacggacccctggagtcttacttcctggtgcggggggggcggcaggttttggaatgaccagcccaccacctccaacaagcccctcccgcacagccgtgcctcccggcctttcttcattgccgctgacaagcgttggcaatactggaatgaagaaagtgccaaagaagctggaggagatacccccagcctctcccgaatag

SEQ ID NO: 186515 - DNA, 1071 bp, Artificial Sequence
  derived and/or modified sequence
atgcaacatgtctcttctagccagtcctctcagcgccacgtgcagtggcccggcgcgtgtcccggtgccggtgaggagcaacctgcctgcagccaaccaagcctgccactgacactcccctcacccagtcatcagcttcagcaactaatggatggcagcggcctcacacagatcgcccagggcgctcaggtccagctgcagcacccaggtacacctatcaccgtgcgtgaacggcgcccctctcagccgcatacacaatcaggggggaccattcatcatctgggcccccagtcaccagcagcggccggcggagctggcctgcagcccttggcttcgccgtcacacattactaccgctaatctcccccctcagatttcttcaataatccagggccagcttgtccagcagcaacaagtgctccaggggcctccgctgcctcggccacttggctttgagcgtacccccggcgttctcctccccggcgccgggggcgctgcgggatttggaatgacgagcccacccccacctacttccccgagcaggacggctgtgccgcccggtctgtcaagcctgcctctcacctctgttggcaatacgggtatgaagaaagtgcctaagaagctcgaggaaatacccccagcctcacccgagatggcgcagatgaggaagcaatgcttggattaccaccaccaagagatgcaagcccttaaagaggtgttcaaagaatacctaatagaactctttttcctgcagcactttcagggcaatatgatggattttttggccttcaaggaacgactgtacgggcccttgcaagcatacctgaggcagaatgaccttgacatcgaggaagaggaggaggaacacttcgaagtcattaatgacgaggtgaaagtggtggctcggaaacatggccagcccggcaccccagtcgctatcgctactcaactgccccccaggaccagtgctgcctttcccgcccagcagcagcctctccaggtgttgagcgacggatccacagtgcagctgcctagactttcatcactcggcttcgaagactccatgtgctag

SEQ ID NO: 186516 - DNA, 672 bp, Artificial Sequence
  derived and/or modified sequence
atgcagcacgtatcctcctctcagtcttctcagaggcacgttcagtggccaggagcctgtcccggtgcgggtgaggagcagccagcctgtagtcaacctagcctgcctctgacgctgccctcccccagccaccagctacagcaactgatggtgcagacccagagcccaactcagccaagtccaggtcccgggcaggcactgcagaacgtgagggcaggggcccctgggcccgggctggggctctgctctagctccccaactggtgacttcgtcgatgcttctgtccttgtcagacagatctctctctcaccatctagcggcggtcatttcgtgtttcaggacggcagtggtctgacccagattgcacagggtgcccaggtccaactacagcaccctgggaccccaattaccgtgcgtgagagacgaccaagtcagcctcatacacagagcggtggaactattcatcacctggggccacagagccctgctgctgccggcggagccggccttcagccgctggcctccccctctcacatcacaaccgcgaatcttccaccccagatttcgtccataattcagggccaattagtccagcagcagcaagtattacaaggtccccctttgcctcggcccctgggatttgagagaactcccggcgttctcctaccctag

SEQ ID NO: 186517 - DNA, 471 bp, Artificial Sequence
  derived and/or modified sequence
atgcagcatgtgtcttcttcccagtcatcacagaggcatgttcagtggcctggagcctgcccgggcgcgggtgaagagcagccagcatgctctcagccgtcactgcccctgaccctgccctccccttcacaccagctgcagcagctcatggtgcagactcagagtcccactcagccgagccctggtccaggccaggcactgcaaaacgtgagggctggcgctccagggcccggcttaggcctgtgttcgtcatctcccacaggagacttcgttgacgcctctgtcttggtcaggcagatctccctgagcccttcgtccggcggccacttcgtgtttcaggatgggtctggcttaacccagatagcccaaggcgctcaggtacagctgcagcatcctggaacacctatcacagtcagagaacgccgcccaagccaaccccacactcagagcggggggaccattcaccactag

SEQ ID NO: 186518 - DNA, 2486 bp, Artificial Sequence
  derived and/or modified sequence
tttaagctaatttttttcttatttctaaagcaaaacaaaacccaaactcattgtaatcctctttggaattgcattacatgtatatgttcagttgtgaaggcatgacattttatgatagtaaatcttattctggaacatggtatgttgcttcattttattcgtgtttttttgagacggagttttgcttttattgcccaggctggagtgtagtggcgcaatcttggatcaccacaacctccgtctcccaggttcaagcgattctcccgcctcagcctcctgagtagcaattacagggagcatttcctgaagacgtagtcatgcagcacgtcagcagctcccagagcagccagcgccatgtccagtggcctggggcctgccccggcgcgggcgaggagcagccagcgtgctcccagccgtccctgcccctcacactgccatcccccagccaccaactacagcagctgatggatgggtcagggctcacccagatcgcccagggagcccaggttcagctccagcacccgggtacgcccatcacagtccgagagcggagaccctcccagccccacacacagtcagggggcaccatccaccacctgggaccccagagccctgcagccgcgggtggggccggcctgcagcccctggccagcccaagccacatcaccacggctaacttgccaccgcagccccggcccctgggcttcgagaggacgcccggcgtgctgctccccggggctgggggcgcagcggggtttgggatgacgtccccacccccgcccaccagcccttccaggactgccgtgcccccaggcctttccagcctcccactcacgtctgtggggaacacgggaatgaagaaggttcccaagaagttagaggagattcccccagcctctccggagatggcacagatgaggaagcagtgcctggactatcatcaccaggagatgcaggctctgaaggaggtcttcaaggagtatttgattgaactgtttttcttgcaacactttcaagggaacatgatggatttcttagctttcaaggagagactgtatggaccattacaagcatatcttaggcagaatgatttggacattgaagaagaggaagaggagcactttgaagtcattaatgatgaggtaaaggttgtggccagaaagcacgggcagcctgggactcctgttgccatagcaacccagctaccgccgaggacttctgcggcttttccagcccagcagcagccgctccagcccctggcacccaccactgtactgtctgtctctgcggattggaatgcacttctccagcgacctaacaaatacatatggggactccagtacctggagatgtgaattccataaaaatggaagcatctaagaggcagtgaacactggcgcccacaggagaaccaggtgcatcagcgcattgcggagctgaggaaagcaggtctgtggtcccagaggcgtctgctgaagctgcaggaggcccacgacccaagtcccactgggactatctgctggaggagatgcagtggatggccacagactttgcccaggagaggtggaaggtggcctctgtgaagaagatggtcagagctgtggcccggcagctgcaggacaggacgcgcagggaggccggggccaggagggaggagccgagcaggctgaggcagacgtcacctgtactaccagagaaatcgagcgtccctggtctagtactgcgcaggtaaagattccagcatcttggaagcaagtgctccactggaaaataaaagccacgtggagcacttgattagactccagaaacagaaactgcagctgctcccaccacccccaccaccacaggccctgcccggggcacagccaaccacacaagtgcaagtgcagccgtcacccgcctaccacagcagagcccccagctcaccacagtcacggccccgagacccagagccctgttgatgggcaccaccatggccaacctccaggtagcccggcttactcgagtttccacctcccacctgcaaggcccaagactgacgtcagcgctgacgtaccagatggcccaggttgctgtggccacgccccctgtggtgtctgtcctggcagttgtggtgctgtcagccagggtcacagtgcttccatcaacgcaacgggatcagtgttgtgataaggcagctgcaaaaagcggcaggtaggcagccaccttcgcctcaccaaactcgaaacaactcacttgagtgagttgcatcaaacctttctaaatttctcattctagaagttgctgagttgttctgccatgtgttaacttttttttcttatcagtaaaatcttttatttggtttatatttcaaatgtaatttaaaaagtctataagacaggaaattcgataatatgaaagcagggagaaactaagtcgcaccatttagctaagctcagggacaacgttcatttataataaatcaaacatttgatttttttcatgcc

SEQ ID NO: 186519 - DNA, 3487 bp, Artificial Sequence
  derived and/or modified sequence
agggagcatttcctgaagacgtagtcatgcagcacgtcagcagctcccagagcagccagcgccatgtccagtggcctggggcctgccccggcgcgggcgaggagcagccagcgtgctcccagccgtccctgcccctcacactgccatcccccagccaccaactacagcagctgatggtgagagggggccctgcgggtgggcagaacatgaatgttgacctgcagggcgtgggccctgggctccagggaagcccacaggtcacgctggccccactgccgctccccagccccacctctccaggcttccagttcagcgctcagcctcggcggtttgagcatgggtctccatcatacattcaggtcacgtcccccttgtcccagcaggtccagacccagagtcccacgcagcccagtccggggccggggcaggccttgcagaatgtgcgtgcaggtgcccctggccctgggctgggcctctgcagcagcagccctacaggggacttcgtggatgccagcgtgctggtgaggcagatcagcttgagcccctccagtggtggacactttgtgtttcaggatgggtcagggctcacccagatcgcccagggagcccaggttcagctccagcacccgggtacgcccatcacagtccgagagcggagaccctcccagccccacacacagtcagggggcaccatccaccacctgggaccccagagccctgcagccgcgggtggggccggcctgcagcccctggccagcccaagccacatcaccacggctaacttgccaccgcagatcagcagcatcatccagggccagctggttcagcagcagcaggtgctgcaggggccgccgctgccccggcccctgggcttcgagaggacgcccggcgtgctgctccccggggctgggggcgcagcggggtttgggatgacgtccccacccccgcccaccagcccttccaggactgccgtgcccccaggcctttccagcctcccactcacgtctgtggggaacacgggaatgaagaaggttcccaagaagttagaggagattcccccagcctctccggagatggcacagatgaggaagcagtgcctggactatcatcaccaggagatgcaggctctgaaggaggtcttcaaggagtatttgattgaactgtttttcttgcaacactttcaagggaacatgatggatttcttagctttcaaggagagactgtatggaccattacaagcatatcttaggcagaatgatttggacattgaagaagaggaagaggagcactttgaagtcattaatgatgaggtaaaggttgtggccagaaagcacgggcagcctgggactcctgttgccatagcaacccagctaccgccgaggacttctgcggcttttccagcccagcagcagccgctccagcaaatacatatggggactccagtacctggagatgtgaattccataaaaatggaagcatctaagaggcagtgaacactggcgcccacaggagaaccaggtgcatcagcgcattgcggagctgaggaaagcaggtctgtggtcccagaggcgtctgctgaagctgcaggaggcccacgacccaagtcccactgggactatctgctggaggagatgcagtggatggccacagactttgcccaggagaggtggaaggtggcctctgtgaagaagatggtcagagctgtggcccggcagctgcaggacaggacgcgcagggaggccggggccaggagggaggagccgagcaggctgaggcagacgtcacctgtactaccagagaaatcgagcgtccctggtctagtactgcgcaggtaaagattccagcatcttggaagcaagtgctccactggaaaataaaagccacgtggtgagtgttttctttgtgatatcagaacttcatgttccgggtgaggggcttcagggtgcccgtgtccttgccggggggctccggtctccagtctcctcagcatttccctctggtctccctccagagaggacagatctactcacgatctttgggaccacccagaaagggtcaatttcaaaatcgaattttctcaggatgacttcaaatcaaaacagaaacgtgtggtcttgcctttggtttttccgcccaaactgccttttggctttgccgtgtggggaccgggcacctcgactgtcctctgtgtcctgtgatggggcaggttacgccatgtctgatcagtaggacagcgtcccttgggttcataccctttatctgcagttctaaaactctgaaagctcagacagcagaaaggttttgcccactcagtgttgctcactcattttgcagcaaacctgacccacaccgaggccaggccagccccgcggtcctggtgggtgagtgtgtctgggtgctattgctgtggaaacgtcggcgtgtttggtcatggctgccagatgccgtccctaacactttcccatgcttatttgacttatgtcattaccttacttctctgaaacagtctgaattccaaaccctgtgtggccctaaggattttggataagggactatgtacctataatataaataagccatattatttacaatcatgagtttctgaatgttcactttttttatttttggagacagagtcttgttctgtcacccaggctttagagtaccacagtgtgatctcggctcaccgcagcctccgcctcctgggttcaagcgattctcctgccttagcctcctcggtagctgggactacgggcatgagccaccagatccaactaattttttgtatttttagtagagacggggtttcaccatgttggccaggctggtcttgagctcctgatctcaggtgatctgcccgtctcaccctcccaaagggctgggattacaggtgtgagccactgtgcccagccagaatattcacttctaaatgtgggtgtgtattcaggtgacttgggattaaaaaaaaaagaaaaaacccttatgggattttatatttagaagttctgttgttgaaatatgaacctgtatctgttgttgcagtggcagaaggctgcagcacaatgaatgattattgtgaaagctggtaattttgtgcccacaaataattgtcaagaactttctaataataaaatacagaaatagattaatagttgctacaaacataaagagagactccatggtagaacactttaggaagcacattttatcttttttgaaccaacatgtatttccaaacatgtaagtaataatatcaagcgtggtgggaagattggattggaggctgattctgatctgtgtgttgggatgaactgtggcattcacagcattgagcaaaatcatcttcaaggacagcgtttaattctgttgttgacaagtcttttaagaaaaagtactagtttgggaatttttcacagatacaaataagcttgacccctaaatttaaaatattatttaaaaaataaaatgtcagatttattcatctgtc

SEQ ID NO: 186520 - DNA, 1726 bp, Artificial Sequence
  derived and/or modified sequence
gtagtggcctcgccgcccggtccgctgtcgcagcgctcatccgcgccgggagcccttggctgcgtcgcccggcagccgcggctggagtgtagtggcgcaatcttggatcaccacaacctccgtctcccaggttcaagcgattctcccgcctcagcctcctgagtagcaattacaggccgagtctcactctgtcgcccaggatggagtgcagtggcgcaatgtcggcttactgcaacctctgcctcccaggttcaagcgattctcctgcctcagcctccagagtacctgggattacagggagcatttcctgaagacgtagtcatgcagcacgtcagcagctcccagagcagccagcgccatgtccagtggcctggggcctgccccggcgcgggcgaggagcagccagcgtgctcccagccgtccctgcccctcacactgccatcccccagccaccaactacagcagctgatggtccagacccagagtcccacgcagcccagtccggggccggggcaggccttgcagaatgtgcgtgcaggtgcccctggccctgggctgggcctctgcagcagcagccctacaggggacttcgtggatgccagcgtgctggtgaggcagatcagcttgagcccctccagtggtggacactttgtgtttcaggatgggtcagggctcacccagatcgcccagggagcccaggttcagctccagcacccgggtacgcccatcacagtccgagagcggagaccctcccagccccacacacagtcagggggcaccatccaccacctgggaccccagagccctgcagccgcgggtggggccggcctgcagcccctggccagcccaagccacatcaccacggctaacttgccaccgcagatcagcagcatcatccagggccagctggttcagcagcagcaggtgctgcaggggccgccgctgccccggcccctgggcttcgagaggacgcccggcgtgctgctccccggggctgggggcgcagcggggtttgggatgacgtccccacccccgcccaccagcccttccaggactgccgtgcccccaggcctttccagcctcccactcacgtctgtggggaacacgggaatgaagaaggttcccaagaagttagaggagattcccccagcctctccggagatggcacagatgaggaagcagtgcctggactatcatcaccaggagatgcaggctctgaaggaggtcttcaaggagtatttgattgaactgtttttcttgcaacactttcaagggaacatgatggatttcttagctttcaaggagagactgtatggaccattacaagcatatcttaggcagaatgatttggacattgaagaagaggaagaggagcactttgaagtcattaatgatgaggtaaaggttgtggccagaaagcacgggcagcctgggactcctgttgccatagcaacccagctaccgccgaggacttctgcggcttttccagcccagcagcagccgctccaggtactttctgatggctccacagtgcagctccccagactttcctcactcggatttgaggactcgatgtgctgaggcaggacccagaggggtcccaagagcctgtcctcttttgttcaaaatacatcttgaaacgtctttgtgaaggctcttagttttaatgcatggatgctgttatttttccctactgttactgaaattaaaaagtgtttgtctctga

SEQ ID NO: 186521 - DNA, 2172 bp, Artificial Sequence
  derived and/or modified sequence
acatccgccggttaccctcgaggctccccggccgcgcgctcccctctctccgtcccatcacccggtgaccccggctgagcgaacgcccacccctccctcagggaccccctccccgtgacacgatcccccgtgaacgcccacctccctcagtgaacactcccccgtgacatgaccccccgcaaacgcccacccatccctcggtgaccctgcgcccgtgagcgcccacccctccccctgcgacccctccccccgccacctggcaactgccgttttcccgccttccctcctccgccccctctcccgcatcaccccgttttctggtgaccgctcccccccatcccgtgacacaaacccccgacctcccagcccttccccggtgacacgatccctgtgaccgtctggcccggtaaccgcccctcccctcatgacccttcacccagtcccctggtgcccacccccgtcactgccgcccgcctggttccagcctcgcgagaccgctgtctacggcgctgacgccgcctctgcctcttgaccccttggccccgctgtcctgatccctgaggtcggggcctggtctgcactccaggaaagacgagtgcgcttagtgtgcgctgcacgtgagcagtgaagttgattccacgcgctgcgctgctcggcagctgtcccagaactgaccacggacccctccgcgggtcctgctcctgacaagggccttccggcactgggagttttgtgttagtggaaaggaagaatctaataataccaccacctttacagtaaagacgctgcgaattgacgccttttataataaagacacttatcttgcccaagagctgggctggagtgtagtggcgcaatcttggatcaccacaacctccgtctcccaggttcaagcgattctcccgcctcagcctcctgagtagcaattacagggagcatttcctgaagacgtagtcatgcagcacgtcagcagctcccagagcagccagcgccatgtccagtggcctggggcctgccccggcgcgggcgaggagcagccagcgtgctcccagccgtccctgcccctcacactgccatcccccagccaccaactacagcagctgatggatgggtcagggctcacccagatcgcccagggagcccaggttcagctccagcacccgggtacgcccatcacagtccgagagcggagaccctcccagccccacacacagtcagggggcaccatccaccacctgggaccccagagccctgcagccgcgggtggggccggcctgcagcccctggccagcccaagccacatcaccacggctaacttgccaccgcagatcagcagcatcatccagggccagctggttcagcagcagcaggtgctgcaggggccgccgctgccccggcccctgggcttcgagaggacgcccggcgtgctgctccccggggctgggggcgcagcggggtttgggatgacgtccccacccccgcccaccagcccttccaggactgccgtgcccccaggcctttccagcctcccactcacgtctgtggggaacacgggaatgaagaaggttcccaagaagttagaggagattcccccagcctctccggagatggcacagatgaggaagcagtgcctggactatcatcaccaggagatgcaggctctgaaggaggtcttcaaggagtatttgattgaactgtttttcttgcaacactttcaagggaacatgatggatttcttagctttcaaggagagactgtatggaccattacaagcatatcttaggcagaatgatttggacattgaagaagaggaagaggagcactttgaagtcattaatgatgaggtaaaggttgtggccagaaagcacgggcagcctgggactcctgttgccatagcaacccagctaccgccgaggacttctgcggcttttccagcccagcagcagccgctccaggtactttctgatggctccacagtgcagctccccagactttcctcactcggatttgaggactcgatgtgctgaggcaggacccagaggggtcccaagagcctgtcctcttttgttcaaaatacatcttgaaacgtctttgtgaaggctcttagttttaatgcatggatgctgttatttttccctactgttactgaaattaaaaagtgtttgtctctga

SEQ ID NO: 186522 - DNA, 945 bp, Artificial Sequence
  derived and/or modified sequence
cctggtctgcactccaggaaagacgagtgcgcttagtgtgcgctgcacgtgagcagtgaagttgattccacgcgctgcgctgctcggcagctgtcccagaactgaccacggacccctccgcgggtcctgctcctgacaagggccttccggcactgggagttttgtgttagtggaaaggaagaatctaataataccaccacctttacagtaaagacgctgcgaattgacgccttttataataaagacacttatcttgcccaagagctggggagcatttcctgaagacgtagtcatgcagcacgtcagcagctcccagagcagccagcgccatgtccagtggcctggggcctgccccggcgcgggcgaggagcagccagcgtgctcccagccgtccctgcccctcacactgccatcccccagccaccaactacagcagctgatggatgggtcagggctcacccagatcgcccagggagcccaggttcagctccagcacccgggtacgcccatcacagtccgagagcggagaccctcccagccccacacacagtcagggggcaccatccaccacctgggaccccagagccctgcagccgcgggtggggccggcctgcagcccctggccagcccaagccacatcaccacggctaacttgccaccgcagatcagcagcatcatccagggccagctggttcagcagcagcaggtgctgcaggggccgccgctgccccggcccctgggcttcgagaggacgcccggcgtgctgctccccggggctgggggcgcagcggggtttgggatgacgtccccacccccgcccaccagcccttccaggactgccgtgcccccaggcctttccagcctcccactcacgtctgtggggaacacgggaatgaagaaggttcccaagaagttagaggagattcccccagcctctccggagat

SEQ ID NO: 186523 - DNA, 1756 bp, Artificial Sequence
  derived and/or modified sequence
gccgcccggtccgctgtcgcagcgctcatccgcgccgggagcccttggctgcgtcgcccggcagccgcgcctcgcgagaccgctgtctacggcgctgacgccgcctctgcctcttgaccccttggccccgctgtcctgatccctgaggtcggggcctggtctgcactccaggaaagacgagtgcgcttagtgtgcgctgcacgtgagcagtgaagttgattccacgcgctgcgctgctcggcagctgtcccagaactgaccacggacccctccgcgggtcctgctcctgacaagggccttccggcactgggagttttgtgttagtggaaaggaagaatctaataataccaccacctttacagtaaagacgctgcgaattgacgccttttataataaagacacttatcttgcccaagagctgggctggagtgtagtggcgcaatcttggatcaccacaacctccgtctcccaggttcaagcgattctcccgcctcagcctcctgagtagcaattacagggagcatttcctgaagacgtagtcatgcagcacgtcagcagctcccagagcagccagcgccatgtccagtggcctggggcctgccccggcgcgggcgaggagcagccagcgtgctcccagccgtccctgcccctcacactgccatcccccagccaccaactacagcagctgatggatgggtcagggctcacccagatcgcccagggagcccaggttcagctccagcacccgggtacgcccatcacagtccgagagcggagaccctcccagccccacacacagtcagggggcaccatccaccacctgggaccccagagccctgcagccgcgggtggggccggcctgcagcccctggccagcccaagccacatcaccacggctaacttgccaccgcagatcagcagcatcatccagggccagctggttcagcagcagcaggtgctgcaggggccgccgctgccccggcccctgggcttcgagaggacgcccggcgtgctgctccccggggctgggggcgcagcggggtttgggatgacgtccccacccccgcccaccagcccttccaggactgccgtgcccccaggcctttccagcctcccactcacgtctgtggggaacacgggaatgaagaaggttcccaagaagttagaggagattcccccagcctctccggagatggcacagatgaggaagcagtgcctggactatcatcaccaggagatgcaggctctgaaggaggtcttcaaggagtatttgattgaactgtttttcttgcaacactttcaagggaacatgatggatttcttagctttcaaggagagactgtatggaccattacaagcatatcttaggcagaatgatttggacattgaagaagaggaagaggagcactttgaagtcattaatgatgaggtaaaggttgtggccagaaagcacgggcagcctgggactcctgttgccatagcaacccagctaccgccgaggacttctgcggcttttccagcccagcagcagccgctccaggtactttctgatggctccacagtgcagctccccagactttcctcactcggatttgaggactcgatgtgctgaggcaggacccagaggggtcccaagagcctgtcctcttttgttcaaaatacatcttgaaacgtctttgtgaaggctcttagttttaatgcatggatgctgttatttttccctactgttactgaaattaaaaagtgtttgtctctg

SEQ ID NO: 186524 - DNA, 781 bp, Artificial Sequence
  derived and/or modified sequence
gtcggttgtagtggcctcgccgcccggtccgctgtcgcagcgctcatccgcgccgggagcccttggctgcgtcgcccggcagccgcgggagcatttcctgaagacgtagtcatgcagcacgtcagcagctcccagagcagccagcgccatgtccagtggcctggggcctgccccggcgcgggcgaggagcagccagcgtgctcccagccgtccctgcccctcacactgccatcccccagccaccaactacagcagctgatggtccagacccagagtcccacgcagcccagtccggggccggggcaggccttgcagaatgtgcgtgcaggtgcccctggccctgggctgggcctctgcagcagcagccctacaggggacttcgtggatgccagcgtgctggtgaggcagatcagcttgagcccctccagtggtggacactttgtgtttcaggatgggtcagggctcacccagatcgcccagggagcccaggttcagctccagcacccgggtacgcccatcacagtccgagagcggagaccctcccagccccacacacagtcagggggcaccatccaccacctgggaccccagagccctgcagccgcgggtggggccggcctgcagcccctggccagcccaagccacatcaccacggctaacttgccaccgcagatcagcagcatcatccagggccagctggttcagcagcagcaggtgctgcaggggccgccgctgccccggcccctgggcttcgagaggacgcccggcgtgctgctccccg

SEQ ID NO: 186525 - DNA, 583 bp, Artificial Sequence
  derived and/or modified sequence
gaagaatctaataataccaccacctttacagtaaagacgctgcgaattgacgccttttataataaagacacttatcttgcccaagagctggggagcatttcctgaagacgtagtcatgcagcacgtcagcagctcccagagcagccagcgccatgtccagtggcctggggcctgccccggcgcgggcgaggagcagccagcgtgctcccagccgtccctgcccctcacactgccatcccccagccaccaactacagcagctgatggtccagacccagagtcccacgcagcccagtccggggccggggcaggccttgcagaatgtgcgtgcaggtgcccctggccctgggctgggcctctgcagcagcagccctacaggggacttcgtggatgccagcgtgctggtgaggcagatcagcttgagcccctccagtggtggacactttgtgtttcaggatgggtcagggctcacccagatcgcccagggagcccaggttcagctccagcacccgggtacgcccatcacagtccgagagcggagaccctcccagccccacacacagtcagggggcaccatccaccac

SEQ ID NO: 186526 - DNA, 465 bp, Artificial Sequence
  derived and/or modified sequence
atgctgcccggatacgctctacaccctgtggctgctgcccgacccagacttcatctccgaagagcccttccccacgcagctgacgatgtgcggccaagggcccgtcccccgggtgcgcgatcacacgaccgggcaaggcaccgccggcggccgcgcctgctgcacctccgacccccaactcccctcagcgctctcccccactcaggtacctggtcaggccctcccggcccctggccacctcagcgaaggacagctagtagagaggcccatctgggtacgcccgatctgaacccagaaagcccttccgacaccttgacctatagtgtcccaccttatcctgacctgaagtctcaaacgccccctcgcgggttcgacaaatcgtggctgaggctgccgacgtctccacgaaccccgtccagggtgccaactcggttaccaagatcttcctccccaccccatccttag

SEQ ID NO: 186527 - DNA, 1038 bp, Artificial Sequence
  derived and/or modified sequence
atgcagcacgtgagcagcagccagagcagccagagacatgtgcagtggccaggggcctgccctggagctggggaggagcagcctgcctgcagccagcccagcctgcccctgaccctgcccagccccagccaccagctgcagcagctgatggatggcagcggcctgacccagatcgcccagggcgcccaggtgcagctgcagcaccctggcacccccatcaccgtgcgggagcggcggcccagccagccccacacccagagcggcggcaccatccaccacctgggcccccagagccctgctgctgctgggggcgccggcctgcagcccctggccagccccagccacatcaccacagccaacctgcccccccagccccggcccctgggctttgagaggaccccaggagtgctgctgcctggagctggaggagctgctggcttcggcatgaccagccccccaccacccaccagccccagcaggacagctgtgcccccaggcctgagcagcctgcccctgacctctgtgggcaacacaggcatgaagaaggtgcccaagaagctggaggagatccccccagccagccctgagatggcccagatgaggaagcagtgcctggactaccaccaccaggagatgcaggccctgaaggaggtgttcaaggagtacctgattgagctgttcttcctgcagcacttccagggcaacatgatggacttcctggccttcaaggagcggctgtatggccccctgcaggcctacctgcggcagaatgacctggacatcgaggaggaggaggaggagcactttgaagtcatcaatgatgaggtgaaggtggtggccaggaagcacggccagcccggcacccctgtggccatcgccacccagctgccccccaggaccagcgctgccttccctgcccagcagcagcccctgcagcccctggcccccaccaccgtgctgtctgtgtctgctgactggaatgccctgctgcagaggcccaacaagtacatctggggcctgcagtacctggagatgtag

SEQ ID NO: 186528 - DNA, 1467 bp, Artificial Sequence
  derived and/or modified sequence
atgcagcacgtgagcagcagccagagcagccagagacatgtgcagtggccaggggcctgccctggagctggggaggagcagcctgcctgcagccagcccagcctgcccctgaccctgcccagccccagccaccagctgcagcagctgatggtgcggggcggccctgctgggggccagaacatgaatgtggacctgcagggcgtgggccctggcctgcagggcagcccccaggtgaccctggcccccctgcccctgcccagccccaccagccctggcttccagttcagcgcccagcccaggagatttgagcacggcagccccagctacatccaggtgaccagccccctgagccagcaggtgcagacccagagccccacccagcccagccctggccctggccaggccctgcagaatgtgcgggccggggcccctggccctggcctgggcctgtgcagcagcagccccaccggggactttgtggatgcctctgtgctggtgcggcagatcagcctgagccccagcagcggcggccactttgtgttccaggacggcagcggcctgacccagatcgcccagggcgcccaggtgcagctgcagcaccctggcacccccatcaccgtgcgggagcggcggcccagccagccccacacccagagcggcggcaccatccaccacctgggcccccagagccctgctgctgctgggggcgccggcctgcagcccctggccagccccagccacatcaccacagccaacctgcccccccagatcagcagcatcatccagggccagctggtgcagcagcagcaggtgctgcagggcccccccctgccccggcccctgggctttgagaggaccccaggagtgctgctgcccggggccggcggggccgccggcttcggcatgaccagccccccaccacccaccagccccagcaggacagctgtgcccccaggcctgagcagcctgcccctgacctctgtgggcaacacaggcatgaagaaggtgcccaagaagctggaggagatccccccagccagccctgagatggcccagatgaggaagcagtgcctggactaccaccaccaggagatgcaggccctgaaggaggtgttcaaggagtacctgattgagctgttcttcctgcagcacttccagggcaacatgatggacttcctggccttcaaggagcggctgtatggccccctgcaggcctacctgcggcagaatgacctggacatcgaggaggaggaggaggagcactttgaggtgatcaatgatgaggtgaaggtggtggccaggaagcacggccagcccggcacccctgtggccatcgccacccagctgccccccaggaccagcgctgccttccctgcccagcagcagcccctgcagcagatccacatgggcacccctgtgcctggagatgtgaacagcatcaagatggaggccagcaagaggcagtag

SEQ ID NO: 186529 - DNA, 1260 bp, Artificial Sequence
  derived and/or modified sequence
atgcagcacgtgagcagcagccagagcagccagagacatgtgcagtggccaggggcctgccctggagctggggaggagcagcctgcctgcagccagcccagcctgcccctgaccctgcccagccccagccaccagctgcagcagctgatggtgcagacccagagccccacccagcccagccctggccctggccaggccctgcagaatgtgcgggccggggcccctggccctggcctgggcctgtgcagcagcagccccactggagactttgtggatgcctctgtgctggtgcggcagatcagcctgagccccagcagcggcggccactttgtgttccaggacggcagcggcctgacccagatcgcccagggcgcccaggtgcagctgcagcaccctggcacccccatcaccgtgcgggagcggcggcccagccagccccacacccagagcggcggcaccatccaccacctgggcccccagagccctgctgctgctggaggagctggcctgcagcccctggccagccccagccacatcaccacagccaacctgcccccccagatcagcagcatcatccagggccagctggtgcagcagcagcaggtgctgcagggcccccccctgccccggcccctgggctttgagaggaccccaggagtgctgctgcctggagctggaggagctgctggcttcggcatgaccagccccccaccacccaccagccccagcaggacagctgtgcccccaggcctgagcagcctgcccctgacctctgtgggcaacacaggcatgaagaaggtgcccaagaagctggaggagatccccccagccagccctgagatggcccagatgaggaagcagtgcctggactaccaccaccaggagatgcaggccctgaaggaggtgttcaaggagtacctgattgagctgttcttcctgcagcacttccagggcaacatgatggacttcctggccttcaaggagcggctgtatggccccctgcaggcctacctgcggcagaatgacctggacatcgaggaggaggaggaggagcactttgaagtcatcaatgatgaggtgaaggtggtggccaggaagcacggccagcccggcacccctgtggccatcgccacccagctgccccccaggaccagcgctgccttccctgcccagcagcagcccctgcaggtgctgagtgatggcagcacagtgcagctgccccggctgagcagcctgggctttgaagattccatgtgctag

SEQ ID NO: 186530 - DNA, 1071 bp, Artificial Sequence
  derived and/or modified sequence
atgcagcacgtgagcagcagccagagcagccagagacatgtgcagtggccaggggcctgccctggagctggggaggagcagcctgcctgcagccagcccagcctgcccctgaccctgcccagccccagccaccagctgcagcagctgatggatggcagcggcctgacccagatcgcccagggcgcccaggtgcagctgcagcaccctggcacccccatcaccgtgcgggagcggcggcccagccagccccacacccagagcggcggcaccatccaccacctgggcccccagagccctgctgctgctgggggcgccggcctgcagcccctggccagccccagccacatcaccacagccaacctgcccccccagatcagcagcatcatccagggccagctggtgcagcagcagcaggtgctgcagggcccccccctgccccggcccctgggctttgagaggaccccaggagtgctgctgcccggggccggcggggccgccggcttcggcatgaccagccccccaccacccaccagccccagcaggacagctgtgcccccaggcctgagcagcctgcccctgacctctgtgggcaacacaggcatgaagaaggtgcccaagaagctggaggagatccccccagccagccctgagatggcccagatgaggaagcagtgcctggactaccaccaccaggagatgcaggccctgaaggaggtgttcaaggagtacctgattgagctgttcttcctgcagcacttccagggcaacatgatggacttcctggccttcaaggagcggctgtatggccccctgcaggcctacctgcggcagaatgacctggacatcgaggaggaggaggaggagcactttgaggtgatcaatgatgaggtgaaggtggtggccaggaagcacggccagcccggcacccctgtggccatcgccacccagctgccccccaggaccagcgctgccttccctgcccagcagcagcccctgcaggtgctgagtgatggcagcacagtgcagctgccccggctgagcagcctgggctttgaggacagcatgtgctag

SEQ ID NO: 186531 - DNA, 654 bp, Artificial Sequence
  derived and/or modified sequence
atgcagcacgtgagcagcagccagagcagccagagacatgtgcagtggccaggggcctgccctggagctggggaggagcagcctgcctgcagccagcccagcctgcccctgaccctgcccagccccagccaccagctgcagcagctgatggatggcagcggcctgacccagatcgcccagggcgcccaggtgcagctgcagcaccctggcacccccatcaccgtgcgggagcggcggcccagccagccccacacccagagcggcggcaccatccaccacctgggcccccagagccctgctgctgctgggggcgccggcctgcagcccctggccagccccagccacatcaccacagccaacctgcccccccagatcagcagcatcatccagggccagctggtgcagcagcagcaggtgctgcagggcccccccctgccccggcccctgggctttgagaggaccccaggagtgctgctgcccggggccggcggggccgccggcttcggcatgaccagccccccaccacccaccagccccagcaggacagctgtgcccccaggcctgagcagcctgcccctgacctctgtgggcaacacaggcatgaagaaggtgcccaagaagctggaggagatccccccagccagccctgagtag

SEQ ID NO: 186532 - DNA, 672 bp, Artificial Sequence
  derived and/or modified sequence
atgcagcacgtgagcagcagccagagcagccagagacatgtgcagtggccaggggcctgccctggagctggggaggagcagcctgcctgcagccagcccagcctgcccctgaccctgcccagccccagccaccagctgcagcagctgatggtgcagacccagagccccacccagcccagccctggccctggccaggccctgcagaatgtgcgggccggggcccctggccctggcctgggcctgtgcagcagcagccccactggagactttgtggatgcctctgtgctggtgcggcagatcagcctgagccccagcagcggcggccactttgtgttccaggacggcagcggcctgacccagatcgcccagggcgcccaggtgcagctgcagcaccctggcacccccatcaccgtgcgggagcggcggcccagccagccccacacccagagcggcggcaccatccaccacctgggcccccagagccctgctgctgctggaggagctggcctgcagcccctggccagccccagccacatcaccacagccaacctgcccccccagatcagcagcatcatccagggccagctggtgcagcagcagcaggtgctgcagggcccccccctgccccggcccctgggctttgagaggaccccaggagtgctgctgccctag

SEQ ID NO: 186533 - DNA, 471 bp, Artificial Sequence
  derived and/or modified sequence
atgcagcacgtgagcagcagccagagcagccagagacatgtgcagtggccaggggcctgccctggagctggggaggagcagcctgcctgcagccagcccagcctgcccctgaccctgcccagccccagccaccagctgcagcagctgatggtgcagacccagagccccacccagcccagccctggccctggccaggccctgcagaatgtgcgggccggggcccctggccctggcctgggcctgtgcagcagcagccccactggagactttgtggatgcctctgtgctggtgcggcagatcagcctgagccccagcagcggcggccactttgtgttccaggacggcagcggcctgacccagatcgcccagggcgcccaggtgcagctgcagcaccctggcacccccatcaccgtgcgggagcggcggcccagccagccccacacccagagcggcggcaccatccaccactag

SEQ ID NO: 186534 - DNA, 1038 bp, Artificial Sequence
  derived and/or modified sequence
atgcagcacgtgagcagcagccagagcagccagcggcacgtgcagtggccaggagcatgcccaggtgccggggaggagcagccggcatgttcccagccaagcctgcccctgacactacctagtccatcccaccaactgcaacaactgatggacggctctggtcttacacaaatcgctcagggagctcaagtgcagcttcaacatcctgggacccccatcacagtgagggagcgccgtccgagccagccccatacccagtcaggaggtacgatccaccacctcgggccccaatcaccagcagctgcagggggcgcaggactgcagcctctcgcctcccctagccacatcacgacagcaaacctgccacctcaaccccgacctctgggctttgagcggacacctggcgttctcctgcccggggccggtggcgcagcaggttttggcatgacctccccccccccccccacatccccttcccggaccgccgtcccccccggcctgtcctctctgccactaacgtcagtaggcaacaccggaatgaagaaggtgcctaagaaattagaggagataccaccggcgtcacccgagatggctcagatgagaaagcaatgtttagattaccatcaccaggagatgcaggccctcaaagaggtgtttaaagagtatcttattgagttatttttcttacagcattttcaaggcaacatgatggattttcttgccttcaaggagcgactctacggtccccttcaggcttatctgcgccaaaacgacctggacatcgaggaggaagaagaggagcacttcgaagtgattaacgacgaggtcaaagtggtggcccgaaagcatgggcagccgggcaccccggtggccatcgctacccagcttccacctaggacttcagccgccttcccggctcaacagcaacctcttcagccgttagctcctactacggtgctatcagttagcgctgactggaatgcgctactgcaaagacccaataagtatatatggggcctccaatatttagaaatgtag

SEQ ID NO: 186535 - DNA, 1467 bp, Artificial Sequence
  derived and/or modified sequence
atgcagcacgtgagcagcagccagagcagccagcggcacgtgcagtggcctggcgcgtgcccaggggctggggaggaacagccagcatgttcacagccttccttaccattaaccctcccttcaccctcccatcaactgcaacagctgatggtaaggggcggacccgcaggcggtcagaatatgaatgtcgacctgcaaggggtcggccctggtcttcagggatcaccccaggttacactggccccccttcccctaccgtctccgactagtccagggttccagttctcggcccaacctcggagattcgaacacgggtcaccatcctacatccaagtgacgtcccctcttagccagcaggttcagacacaatcaccaacccagcctagccccggccccggtcaagcactccagaatgtgcgggccggggcaccggggcccggcttggggctctgttctagctcaccaactggggacttcgtggatgcatcagtgctagtccggcagatcagcctttctccttcctctgggggacactttgtgttccaggatggaagcggcctgacacagattgcacagggagctcaggtccagctccagcatccgggaacaccaattaccgtgcgggagcgccgtccatcgcaaccccatacacagtcaggaggcaccatacatcatttaggccctcagtctcctgctgcggcaggcggtgccgggctgcaaccccttgcaagccccagccacataactaccgccaatttgccaccccagatctcatcaattattcaaggccagctggttcaacaacagcaagtgctgcagggcccccccctgccgcggcctctgggatttgaacgaactcccggggtgctgttgcctggcgccggaggggctgctggatttggcatgacctcacctccaccacccacgagccccagtcgcacagccgtcccaccaggactatcctccctgcctctcacttccgttggaaacacgggcatgaaaaaggtgcccaaaaaacttgaagaaattcctcccgccagtcctgagatggcccagatgcggaagcaatgcctggattaccaccatcaggagatgcaggcgctgaaggaggtttttaaggaatatttaatagagctcttctttctccagcacttccagggaaacatgatggacttcctggccttcaaagagcgcctctacggacctctgcaagcctacttgcgacagaatgatctggacattgaggaggaagaagaagaacattttgaagtcattaacgatgaggtgaaggtagtggcgcggaagcacggccagcccggaaccccagtcgctatcgcaacccagcttcccccccggacctcagcagcctttcccgcgcagcagcagccattgcaacagatccatatgggaactcccgtccccggggacgtgaacagtatcaagatggaagcttccaagcgccagtag

SEQ ID NO: 186536 - DNA, 1260 bp, Artificial Sequence
  derived and/or modified sequence
atgcagcacgtgagcagcagccagagcagccagcggcacgtgcagtggcccggcgcctgtcccggcgccggggaagaacagcctgcctgttcccagcctagtctgccgctcaccctgcctagcccctctcaccaattgcaacagctgatggtccagacccaatcacctacccagccttcacctggccccggacaagcactccagaacgttcgtgcaggggctcccggcccgggattgggcttatgtagttctagtcccacaggcgattttgttgacgccagtgtactcgtccgccagatcagcctctctccctccagcggcggtcactttgtgtttcaagatggcagcgggttgacccaaattgctcagggggcccaggtgcaattgcagcaccctggcacacccattacagtgcgggaaagaaggccttcccaacctcatacacaatccggtggaaccattcaccatctcgggccacagtcacccgctgccgccggcggagcgggtctgcagccattggcaagcccatctcacatcactaccgccaatctacccccacagatttcaagcatcatacagggacagctagttcaacagcaacaagttttgcaaggaccccccctgcctagaccactgggattcgagcggacaccaggcgtgcttctccccggcgccgggggtgccgccggatttgggatgaccagcccaccacccccaaccagtccttcacgcactgccgtgccccctggactctccagtctcccactgacaagcgtcggcaatactggaatgaagaaagtgcctaagaaacttgaagagattcctccggcatcccccgaaatggcacagatgagaaaacagtgtctggactatcaccaccaagagatgcaagcactgaaagaagttttcaaagaatatctcatcgaattgttcttcctgcagcactttcagggtaacatgatggactttctcgcctttaaagaaagactgtacggaccactgcaagcatacctccggcagaacgacctggacattgaggaggaagaagaggaacacttcgaagtcattaacgatgaggtcaaagtggttgcgcggaaacatggccagcccggcacacctgtggcgatcgccacccaattgccccccagaacaagcgcggccttccctgcccaacaacagcctcttcaggtactctcggacggcagcacggtacagcttcctcgcttgagctcactgggcttcgaggacagcatgtgctag

SEQ ID NO: 186537 - DNA, 1071 bp, Artificial Sequence
  derived and/or modified sequence
atgcagcacgtgagcagcagccagagcagccagcggcacgtgcagtggccaggggcgtgccctggtgccggagaagaacagcccgcatgctcacagccttccttacccctgaccctgcccagcccaagccatcagcttcaacagctcatggatggttctgggctcacccaaatagcccagggcgcccaggtgcagctgcagcaccctgggacacccatcacggtgcgtgaacggcgtccctctcaaccgcacacccagtctggcggcacaatccaccacctcggaccccagtctccagctgccgccgggggagccgggcttcagccattggctagtccatctcatattacaaccgccaacttgccaccccagatcagcagtatcatccagggacagctcgtgcaacagcaacaggtgctgcagggcccccctctgcctcggcctctgggctttgagaggactcctggcgtactgctgcctggggccggtggagctgctggctttggaatgactagccctcctccccctacttccccaagcagaacagctgtccctcctggcctttcgtccctccctctgacttcagtgggaaacactggcatgaagaaagtgccaaaaaaactagaagagattccaccagcttcaccagagatggctcaaatgaggaagcagtgtcttgattaccatcaccaggagatgcaagcgctgaaggaggtgttcaaagaatacctgatcgaactcttctttctccaacattttcagggcaatatgatggacttcctggctttcaaagaaagactgtatggcccactgcaggcatatttgagacagaacgacctcgatatcgaagaggaggaggaagagcattttgaagttatcaatgatgaggtcaaggttgtggctagaaaacatggacaacctgggacccctgtggcgatcgcaacccagttgccaccccgcacctctgctgctttccctgcccagcagcaacctttgcaggtgctgtctgatggatcaacagtgcaattgcctagactctcttcactgggcttcgaggattctatgtgctag

SEQ ID NO: 186538 - DNA, 654 bp, Artificial Sequence
  derived and/or modified sequence
atgcagcacgtgagcagcagccagagcagccagcggcacgtgcagtggccgggagcttgtcccggggccggagaggaacagcctgcatgtagccaacctagtctccccctgacccttcctagcccatctcaccagctccagcagcttatggacggatcagggcttacccagatcgcccagggtgcccaggttcagcttcagcaccccgggactcctatcacagtcagagaacggcgcccatcgcaaccacatactcagtccggtggtacgattcaccaccttggccctcagtctccggcagctgcggggggggcagggttacagcctctggcctctccgagccacattaccactgcgaacctgccgccccagatcagctccatcatccagggccaactcgtccagcagcagcaggttctgcaaggccctccacttcctcgcccacttgggtttgagaggacgcctggggttctccttcctggtgccggaggtgccgcaggattcgggatgactagtcccccccctccaactagcccaagtagaacagccgtccctccaggcctctcaagcttacctctgacatccgtgggtaacacagggatgaagaaagtgcccaagaagctggaagaaattccccctgcaagtcccgaatag

SEQ ID NO: 186539 - DNA, 1071 bp, Artificial Sequence
  derived and/or modified sequence
atgcagcacgtgagcagcagccagagcagccagcggcacgtgcagtggcctggagcttgtcctggagcgggtgaagagcagcctgcctgtagccaaccatcattgcccttgacgttaccaagccctagccatcagttgcagcaactcatggacggatctggcttgacccagatcgcccagggggcgcaggtgcagttacaacatccaggaacccctattactgtgcgtgagagaaggccctcgcagccccatacccagtcaggaggaacaatccatcatctcggacctcaatcacctgccgctgctggcggcgccgggctccagcctctggcctcaccgtcccacatcaccacagctaatcttccaccacaaatcagctctatcatccaaggccagctggtgcaacagcagcaagtgctgcagggaccaccactaccccgccccctcggttttgagcgaacccctggcgtgctgctgcccggagctggaggagcggccggctttggaatgacgtcaccgccgccccctacatctccaagcaggaccgccgtccctcctgggctctcatcgctccccttaacctctgttggaaacaccggcatgaagaaagtgcctaagaagttggaagagatacccccagcctctccagaaatggcccagatgaggaagcagtgcctggactaccatcatcaggaaatgcaggctttaaaagaagtgtttaaagagtacctcatcgaacttttttttctgcagcactttcagggcaatatgatggacttcctggcatttaaagagcggctctacggcccgctccaagcatatttgcgacaaaacgacctggatatcgaggaggaggaggaggaacacttcgaggtcatcaatgacgaggttaaggtcgtggctcgcaagcacgggcaacctggtactcccgtcgccattgccacgcaactccccccccggacatccgcggcgtttcctgcccaacagcagcctttgcaagtgttaagcgacggtagcactgtgcaacttcccagactgtccagcctcggctttgaggacagtatgtgctag

SEQ ID NO: 186540 - DNA, 672 bp, Artificial Sequence
  derived and/or modified sequence
atgcagcacgtgagcagcagccagagcagccagcggcacgtgcagtggccgggtgcctgccccggtgccggtgaagagcagcctgcctgctcacagccatccctgcctttgaccctgcctagcccctcccaccagttacagcagctgatggtgcagacgcaatcaccgacccagccaagccctggtccagggcaggccttgcagaatgtgcgcgcaggcgcacctggacccggcctcggcttgtgtagttcctccccaacgggcgattttgttgacgcttcggtgctggtgcggcaaatcagtctgagccccagttccgggggccactttgtctttcaagacggctccggtctaacacaaattgcccagggggcgcaggtgcagctccagcatcccggtacccctatcaccgttcgcgagcgacggccttcccagcctcatacacaatctggaggaaccattcaccatctcggcccacaatctccagctgctgccggtggagccggactccagcctcttgcttcaccgagtcacattacaacagccaatctgccgccacaaatctccagcatcattcaggggcagctggtgcagcaacagcaggtcttacaaggaccccctctcccaagacctttaggcttcgagagaacccccggggtgctgctgccctag

SEQ ID NO: 186541 - DNA, 471 bp, Artificial Sequence
  derived and/or modified sequence
atgcagcacgtgagcagcagccagagcagccagcggcacgtgcagtggccaggcgcctgtcccggagctggcgaagagcagcctgcctgttctcagccctctctgcctctgacattacccagccccagccatcagctccaacagttaatggtacagacacagagcccgacacagccctcccctggcccaggacaggcccttcaaaatgtgagagccggcgcacccggaccgggcctgggactatgcagctcttcaccgaccggcgacttcgttgacgccagcgtcctggtgcgtcagatttctctttcgccaagttctggtgggcactttgtgtttcaggatggctccggtctaacgcagatcgcacaaggtgcacaagtccaactgcaacatcctggcaccccgatcacggtgcgggaaagaagaccctcacagccccacactcaaagcggcggaaccatccaccactag

SEQ ID NO: 186542 - DNA, 1038 bp, Artificial Sequence
  derived and/or modified sequence
atgcagcatgtgagctcttcacagagtagtcaaagacacgtgcaatggcctggagcttgccccggtgcgggtgaagagcagcccgcatgttctcagcctagtctgcccctcactctgccaagccctagtcatcagctgcaacagctgatggacggcagcggactcacacaaatcgcccagggtgcccaggtccagctacagcatccaggaacgccaattaccgttcgggagcgtagacctagtcaaccacacactcagagtggtgggacaattcatcacttagggcctcagtcgccagccgcagcaggaggggctggattgcagccacttgcaagcccttctcacataacaacagcgaacttacctccccagcccagacccctgggattcgagaggacaccaggagtactgctgccaggagcaggcggtgcggcaggattcggtatgacctctccgcctccgcctaccagtccatcgagaaccgccgtaccccctggcctctcgtctctgcctttgacgtcagtcggaaatactggaatgaaaaaggtgccaaagaaattggaagagatcccacctgcctcccccgagatggcccagatgcgcaagcagtgccttgattaccaccaccaagaaatgcaggctcttaaagaggtgttcaaggagtacctgatagaactattcttcttacagcattttcaaggaaacatgatggattttctggccttcaaggagagactgtatggcccactgcaggcctacctccgccaaaacgatcttgacattgaggaagaagaggaagagcacttcgaggtaatcaacgatgaagtcaaggtggtggctaggaaacatggccaacctggaaccccggtagccatcgccacccaactcccacccagaacctcagcagcctttccagcccagcaacagcccctgcaacctctcgcgccaacaacagtccttagtgtctccgcagactggaatgccctcctccagagaccaaacaagtacatatgggggctgcaataccttgaaatgtag

SEQ ID NO: 186543 - DNA, 1467 bp, Artificial Sequence
  derived and/or modified sequence
atgcagcatgtgagtagctctcaatcttcgcaaagacatgtacagtggcccggtgcatgccctggtgccggagaggaacagccagcctgcagccaaccatctctgcctttaacccttcccagtccgagccaccaattacagcagctgatggttagaggcggtcctgctggtggccaaaatatgaatgtcgacctccagggcgtcggacccggtttacagggaagcccacaggtgactttagcccctctccccctaccctcccccacgagccccggatttcagttctccgctcaacccaggcggttcgagcacgggagcccttcatacatccaggtgacgtcacctctgtcacagcaggttcaaacccagtccccaacccaaccttcacccggacctggccaggccttacagaacgtgcgcgctggcgcaccagggccaggcttgggactgtgtagttcttctcccacaggcgacttcgtggacgcttccgtgcttgtccgccaaatcagtttaagcccctccagcggagggcatttcgtattccaggatggatctgggctaacccagatcgcccagggggcacaagttcaacttcaacaccctgggacgcctattacagtcagggaacgaagaccatcccaaccacacactcaatctgggggtacaattcatcacctgggaccacagtctccagccgctgccggaggcgctgggttacagcctttggcctccccatcacatattaccaccgccaacctgcccccacaaattagctccattatacagggtcagcttgtgcaacaacagcaggtcctccaaggccctcctttgcccaggcctctggggttcgaaaggactcctggggttcttctgccgggagcaggcggtgcagccggtttcggaatgacttctccccctcccccaacttcccccagtcggactgctgtcccgcctggcctctcttcactgcccttgacgagcgtgggtaacaccggcatgaagaaggtacccaaaaagctagaggaaatacctcccgcaagcccagagatggcccagatgaggaagcagtgtttagattaccatcaccaggagatgcaggctctgaaagaggtgttcaaggaatatctgatcgagctgttctttctgcaacatttccagggcaacatgatggactttctggcctttaaggagaggctgtacggacctctgcaagcatacctgcggcagaatgacctggatatagaggaggaggaggaggagcattttgaggtcatcaacgatgaagtgaaagtggtagccaggaagcatggccagcctggaaccccagtggctattgctacacagctgccaccgagaacctccgcagccttccccgctcagcaacagcctctgcagcagattcacatgggcactcctgtcccaggtgatgttaattccatcaaaatggaggcgtccaagaggcagtag

SEQ ID NO: 186544 - DNA, 1260 bp, Artificial Sequence
  derived and/or modified sequence
atgcagcacgtttcctcctctcagtcatcgcagaggcacgtgcagtggcctggagcttgcccaggcgcaggcgaggaacagccagcttgttcacaaccctccctcccattgactttgccctctccatctcatcagctgcaacagcttatggtacaaacccagtcccctactcaaccatctccgggacctggccaagcgctgcagaatgtgcgcgcaggggctcccggtcccggacttggtctgtgcagctcatcaccgacgggagattttgtggacgctagtgtgctggtgagacagatatcattatcaccttcatccggcggacactttgtcttccaggatggaagcgggctgactcagatagcccagggggcacaagttcagctgcagcaccctggaacacctatcacagtgcgggaacggcgaccctcccaaccgcacacccagagcggcggaacaatccaccacctcggacctcagagtcctgccgcagctggcggtgcagggctccagcccctggcaagcccctctcacatcaccacggccaatctgcctccccagatcagctctattattcagggacagcttgtgcagcaacagcaggtcctccagggccctccactaccaagaccactggggtttgagcgtactcctggagtgcttctccctggtgcaggcggtgccgctgggtttggtatgacgtctccccctcccccaacctctcctagtcgaaccgccgttccccctgggctgtcctcactgcccctcacatctgtcggcaacaccggtatgaagaaggtccctaagaaattagaggaaattcctccagcatctccagaaatggcacagatgaggaaacagtgtctggattaccaccatcaagagatgcaggccctcaaagaagttttcaaggagtacctcatcgaactatttttcttacagcactttcaaggcaatatgatggatttcctagctttcaaagagcgattatacggtcccctccaggcatacttgcggcagaatgatctcgacatcgaggaggaggaagaggagcacttcgaagtcatcaatgatgaggtcaaagttgttgcccgaaaacatgggcagcctgggacaccggtggctatcgcaacacagctgccgccaagaacttccgccgctttccccgctcagcagcagcctctgcaggttttatctgatggaagtaccgttcagctcccacgcttgtctagcttggggttcgaggattcaatgtgttag

SEQ ID NO: 186545 - DNA, 1071 bp, Artificial Sequence
  derived and/or modified sequence
atgcaacatgtcagcagtagtcagtcatcccagcgacatgtgcagtggccgggagcttgcccaggcgcaggggaggaacaacctgcatgctctcagccaagcctgccactcacactgccttctccgtcccatcagctgcagcagttgatggacggctcgggactcactcagatcgcccaaggtgcccaggtccaactgcagcaccccggaaccccgattaccgttagggaaagacgtccttctcagccgcatacacagtcaggaggcaccattcaccacctgggacctcagagcccagctgcagctggaggcgcagggcttcaacccttagcttctccctcccacatcaccaccgctaatctgccccctcagattagctccatcatacagggccagctggtacagcaacagcaggtgctccagggacctccccttccgagacccctcggatttgaaaggacccctggcgtcctgctccccggagcgggaggagctgcaggttttggaatgacctctcctccacctccaacatcaccaagtcgaaccgcagttccccctgggctctctagtctcccgctgacatcagtcggcaatacagggatgaagaaagttcccaagaagctggaagagatcccccctgctagtccagagatggcgcagatgcggaagcagtgccttgattaccaccaccaagagatgcaggccttgaaggaggtttttaaggaatacttgatcgagttattctttttgcaacatttccagggcaatatgatggatttcctggcttttaaggaacgtttgtatggacccttacaggcatatctgaggcaaaatgatctcgacatcgaagaggaagaggaagagcattttgaggtgatcaacgacgaagtgaaagttgtggcacggaagcacgggcagcctggaacacctgttgcaattgcaacccagctcccccctcggactagcgcagcttttcccgctcagcagcaacccctgcaggtgctgtccgatggtagtactgtgcagctgccacggctctctagccttggtttcgaggactccatgtgttag

SEQ ID NO: 186546 - DNA, 654 bp, Artificial Sequence
  derived and/or modified sequence
atgcagcacgtcagtagttcgcagagcagtcaacgacatgtgcaatggcctggggcttgtccaggagccggtgaagagcagccggcatgttcacagccctccctgccactgaccttgccgagcccctcacaccagctgcaacagctgatggatggctcaggactcactcagattgcacagggggcacaggttcagcttcagcacccgggaactcctatcacagttcgagaacggagacccagccagcctcacacacaatccggaggaacaattcatcacttggggcctcagagtccggcagctgccggtggtgccggtctccaacccctggcctccccctcacacatcacaacagcaaaccttcccccacagatcagctctatcattcagggacaactggtccagcagcagcaggttctccagggacctcccctgcccagacctttgggctttgagaggaccccaggcgtgcttctgcccggagctggaggcgcagctgggtttggtatgaccagcccacctccacctacgtctccttctaggactgccgtcccgccaggcttaagctcacttcctctgacttctgtgggcaacaccggcatgaagaaggttccaaagaagctggaggagattcccccagccagtcccgagtag

SEQ ID NO: 186547 - DNA, 1071 bp, Artificial Sequence
  derived and/or modified sequence
atgcagcatgtgagctcatcccagtcttcccagaggcatgtgcagtggccaggcgcatgtcctggagcgggtgaagagcagcctgcatgttcccagccgtctctgcctctgacactgccatcaccatcccatcaactccagcaactgatggacggttctgggttaacgcagatcgcccagggggctcaggtgcagctgcaacatcctggaacccctatcaccgttcgcgagcggagaccttctcagccccatactcaaagcggcggtactatccaccacttgggaccccagagccccgcagccgctggcggagccggtctgcagcctctggcttccccctctcacattacaacggcgaacttaccccctcaaatctcttctatcatccagggccaactagtgcagcagcagcaggttctccagggaccccctctgccccgtccattaggcttcgagcggactccgggagttttacttcccggagccggtggggcagccggttttggtatgacctctccgcctccgccaacctcacccagtcgcacagccgttccacccggactgagcagcctgcccttaacaagcgtggggaacaccggcatgaaaaaagtcccaaaaaagttagaagaaattcctccagcctcccccgagatggcgcagatgcggaagcagtgcctcgactatcaccatcaggaaatgcaggctctgaaagaggtgttcaaggagtatcttattgagctctttttcctccagcacttccagggaaatatgatggacttcctggcgttcaaggagaggttgtatgggccactgcaggcttatttacgccagaacgatcttgacatcgaggaggaggaggaggagcacttcgaagtgattaacgacgaggtgaaggtggtcgccagaaagcatgggcagcccggtactcccgtggccatcgccacccagcttcccccacgtacttcagcagcatttccagcccagcaacagccactgcaggtcctgtcggacggatccactgtacaactgcccagactgagctcactaggattcgaagacagcatgtgctag

SEQ ID NO: 186548 - DNA, 672 bp, Artificial Sequence
  derived and/or modified sequence
atgcagcacgtgtcgagctctcagtcgtcccagcgacacgtccagtggcctggcgcatgtcccggagccggagaggagcagcctgcttgctctcagccctccctccccttaacactgccatcaccctctcaccaattgcagcagcttatggtgcaaactcagtcgccaacccagccctcccccggaccgggacaggcccttcagaacgttcgggctggagcaccaggccctgggctgggcctctgttcaagcagccccaccggcgattttgtagatgcgtctgttcttgtgcgccagatatccctgagtccaagcagcggagggcattttgtgtttcaagacggcagtggtttaacacagatcgctcagggcgctcaggtccagctgcagcaccccggaaccccaataactgtcagggaacgacggcctagccaaccccacacccagagcggcggaacaattcatcatttaggaccgcaatctcccgctgcagccggtggagctggtctccagcctctggcctctccaagtcacatcacaaccgcaaatctgcccccacaaatctcaagcattatacaaggccagctggtgcagcagcagcaggtcctacagggcccacctctgcccagaccacttggcttcgaacgcacgccaggggtgttgctgccgtag

SEQ ID NO: 186549 - DNA, 471 bp, Artificial Sequence
  derived and/or modified sequence
atgcagcacgtctctagctcccaatctagtcagcggcacgtgcagtggcctggggcatgcccaggcgctggagaggagcaacctgcttgttctcagcctagcttacccctcacccttccctctccatcacaccaactgcagcaactaatggttcagacacagtcacccacacagcctagccccggtcccggacaggccctccagaacgtgagggccggtgcacccggaccaggcttaggactgtgctcatccagcccaaccggcgatttcgttgacgccagcgtgttagtcaggcagatctcactctctccgagctctggaggccacttcgttttccaggacggcagcggcctcactcagattgcccagggagcacaggtccaactgcagcaccccggaacccccataactgtcagagaacgaagaccgagtcagcctcacacgcagtctggcggaaccatccaccattag

SEQ ID NO: 186550 - DNA, 9129 bp, Artificial Sequence
  derived and/or modified sequence
atgcaccacgggacgggcccccagaacgtgcagcaccaactgcagcgttctcgtgcctgccccggctctgagggtgaggagcaacctgcacacccaaatcccccacctagcccagctgcccccttcgcaccctccgcctctcctagcgccccacagtcccccagttatcaaatacagcagttaatgaatcgttcgcctgctaccggacagaacgtcaacattaccctccaatccgtgggcccagtcgtcggcggcaaccaacagattaccctcgcccccctccccctcccatctccaacgagccccggcttccaattttccgcacaaccgcggcgcttcgaacatggttctccatcctatattcaggttactagccctctttctcagcaggtgcagacccaatctcccactcaaccatctccaggacccggacaggctctgcagaacgtaagggcgggagctccagggccaggcttgggcctctgctcgagctcccccactggggggttcgttgacgcatccgtcctggtgagacagattagcctgtcaccctcctctggtggccatttcgtatttcaggacggctccgggcttacacagatcgcccaaggcgcgcaggtacagctacagcatccgggaactcccattaccgtgagagaacgacggcctagtcaaccccacacgcagagtgggggcactatccaccatttaggcccccagagtcccgcggccgcggggggagccggcttgcagccactggcttcgccctctcatattactacagctaatcttcccccccagatctccagcattatacagggacagctcgtccagcaacagcaggtgctccagggcccaccccttcctcggcctctgggattcgagcgcacgcctggagttcttttgccaggggctggcggcgcagccgggtttgggatgacttcccctcctcctcccacttcccctagcaggaccgcagtgccacccggactttcctcactgccactgacctctgtcggcaacactgggatgaagaaagtgcctaaaaaactcgaagaaattcctccagcctcccccgaaatggctcagatgcgtaagcagtgtctagattatcactatcaagagatgcaggcacttaaagaggtgtttaaggagtatctcattgagttgttctttttacagcacttccaggggaacatgatggattttctcgcattcaaaaaaaagcactacgccccattgcaggcatatctgcgtcaaaatgaccttgacatcgaggaagaggaagaggaggaagaggaagaggaagaaaaatccgaggtgatcaatgacgagcaacaggcccttgctggctcacttgttgcgggcgcggggtctacagtcgagacagatttgtttaagcggcagcaggctatgccctctacaggcatggcagagcagagcaagcgcccacggctggaagtgggccaccagggcgtcgtgttccagcacccgggcgccgacgctggcgtgccgctccagcagctcatgcctactgcacaggggggcatgccacctacgcctcaggccgcccagctcgccggacagaggcaatcacagcagcagtacgatccctcaaccgggccccccgtgcagaatgctgccagtctccatacccctcttccacaactacctgggcgcctccccccagccggcgtccctacagccgctctgtcttctgccctgcagttcgctcagcagccacaggtcgtagaggctcagacacaattacagatccccgtcaaaacccagcagccgaacgtgccgattccagcccctcctagttctcagctccctatccccccttcgcaacccgcacagctggcattacacgtccctacccccgggaaggtccaggtgcaggctagccagctttcctcccttcctcaaatggtggctagtacacggctgccagtggatcctgctcctccgtgtcctcgaccgctgcctacctcatccaccagctccctcgcccccgtgagcggctccgggcccggtccatcacccgcacgttcttcccctgtgaaccgcccgtcctccgcgacaaataaagccctgtccccggttaccagtcggactcctggagtcgtagcctcagctcccactaaacctcaatcccccgcacagaatgctacttccagccaagattcttcgcaggatactttgaccgaacaaataacacttgaaaatcaagtccaccaaaggattgcagagctaagaaaagctggactgtggagccagcgcaggctgcctaagttacaggaagccccaagacccaaatcgcactgggattacctgttagaggaaatgcagtggatggcgacagacttcgcccaagaacgccggtggaaagttgccgctgctaagaaactcgtcaggacagtagttagacatcatgaagagaagcaactgagagaagagaggggcaagaaggaggagcagtcgagattgcgccggattgccgcctcaactgctcgcgaaattgaatgcttttggtccaatatcgagcaggtggtggagatcaagctacgagttgaattggaggaaaaaagaaagaaggctctgaatttgcagaaagtcagtagacggggcaaagagctgcgccccaagggctttgatgcattacaagagtcctctctggattctgggatgtcaggtcggaaaaggaaggcctccataagcctgacagacgacgaagtggatgacgaggaagaaacaattgaggaagaagaggctaacgagggtgtagtcgaccaccaaaccgaactgtccaatttagcaaaggaagcagagctccctctgttggacttaatgaagctgtacgagggggcgtttctgcctagttctcagtggcctcgccccaagcctgatggggaggatacctcgggcgaagaggatgcggatgattgtccaggagacagagagtccagaaaggacctggtcctcatcgattccctgtttattatggaccaatttaaagcagcagagcgaatgaacatcggaaagccaaatgccaaggatatcgcagatgtgactgccgttgcagaggctatcctgcctaaagggtctgccagagtgacaacaagcgtgaaattcaacgccccctctctgttatacggagcgttgagggactaccagaaaatcgggttggattggttagccaaactataccggaagaatctcaacggcattttggctgacgaggccggactgggcaaaaccgtccagattattgccttcttcgcacacttggcctgtaatgagggcaactggggtccgcatttggtcgtggtacggtcttgcaacattttaaagtgggaacttgaactgaaacgttggtgcccaggattgaagattctcagttacatcgggtcacaccgagagctgaaggctaagcggcaggaatgggccgagccaaacagcttccatgtctgtattacctcctacacccagtttttccgcgggctcactgcgtttacccgggtgcgctggaagtgtctggttatagatgaaatgcaaagagtcaaaggaatgacagaacgacactgggaagcagtgttcactctgcagagccagcagcgactcctcttgattgactctcccctgcataacactttcctcgaactttggacaatggtgcacttcctagtccctggaatcagtcggccctacctgagctcacccctgagggctcccagtgaagaaagccaagattactaccataaggtggttattcgactgcatcgggtgacgcaaccatttatcttacggcgaaccaagcgggacgtcgagaaacaactgaccaagaaatatgagcacgtgttaaagtgccggctatccaacagacagaaggccctgtatgaagatgtgattctgcagccgggaactcaagaggcattgaagtcaggccactttgtgaatgtacttagtatcctggtgagactgcagaggatatgcaatcaccccggcctcgtcgaaccacgtcatccagggtccagctacgttgctggtcctcttgagtatccctccgcatcccttattctgaaagctttagagcgcgacttttggaaagaggccgacctgtcaatgttcgaccttatagggttggagaacaagataacacgccatgaggctgagcttctctccaaaaaaaagatccctcgaaaactgatggaagagattagtacatctgcagcccccgctgcacggccagcagcagccaagctgaaagcgagtcgattattccaacccgtccaatacggccagaagcccgaagggaggactgtcgcattcccctctacccatccgccgcgcaccgctgctccgaccactgcctccgcagcacctcaaggacctttgaggggacgaccgccgattgcgaccttctctgccaatccagaggctaagggaggcgaggtcgtgaaaattgcccagctcgcctctattacgggcccccagtctcgggttgcccaaccggagaccccagtgacattacagttccaaggttctaagttcaccctctcccactcgcagttgagacaactaacggcggggcagcctctgcagctccagggatcagtcctgcaaatcgtgtcagcccccggacaaccgtacttgcgcgcccctggccctgtggtgatgcagaccgtgtcacaggctggggccgtgcacggcgcattgggctccaaaccccccgcgggcggaccctcacctgcccccctcactcctcaggtcggggtgcccggccgcgtggccgtgaatgcactcgcagtgggggaaccagggaccgctagtaagccagcaagcccaataggcggacctacacaagaggagaagactcgcttacttaaagagagacttgaccagatttatctggtgaacgaaaggcggtgtagccaagcaccggtctacgggcgtgatctgcttcgcatttgcgccctgccatcgcatgggagagtgcagtggcggggctctctagacggcagaagaggaaaggaggcagggcccgcccactcttatacctcttccagtgagagcccgtccgagctgatgctaaccttgtgccgatgcggagaatcgctgcaggacgtaatcgatcgggtagcctttgtaattccacccgttgtggcagctcctccatcactgcgggtacctagacccccccctttgtacagccataggatgcggatcctaaggcagggcttaagagaacacgcagcaccctattttcagcaactgcggcagactacagcacccaggctactacagtttccagaactgaggctcgtgcagttcgatagcggaaagttggaagcactggcaattctcctgcagaagctaaaaagtgagggccggcgagtcctgatactatcccagatgattctgatgctcgacattctggagatgtttctcaactttcattatctgacatacgtacggatcgacgaaaacgcaagttcagagcagagacaagagctgatgcgcagttttaaccgcgataggagaatcttctgtgcgattctgtctacacactcccgcacaacgggcattaatctggtggaagctgacacagtagtgttctatgataatgacctgaatcccgtcatggacgcaaaggcgcaagagtggtgcgataggatcggcaggtgtaaagatattcacatatacagacttgtaagcggtaactcaatcgaagagaaactgctaaagaatggcacaaaggatctgataagagaagtggcagcccaggggaatgactacagtatggcatttctaacccagcgcacgatccaggagctgtttgaagtctattcccctatggacgatgccggattccccgtaaaagccgaggagttcgtcgtgttgagccaggagccctccgtcacggaaaccatcgcccctaagattgcccggccttttatcgaggcactcaaatctattgaatatctggaagaggacgcccagaagagcgctcaagaaggagttctgggcccccatactgacgccctgtctagtgattctgagaatatgccctgtgacgaggaaccatctcaactggaagaactagctgactttatggagcagctaacacctattgagaaatacgcattaaattatctggagctgttccacacgagtatagaacaggaaaaggaacgcaatagtgaggatgctgttatgaccgccgtgagagcctgggagttctggaacctgaaaactctccaggagagagaggcgcggctgcggctcgaacaggaagaagcagaactgctgacatacacaagggaagatgcttattctatggagtatgtctacgaggatgtggacggccagacggaagtcatgcctctttggaccccaccgacccccccgcaggacgatagcgacatctacctcgatagcgttatgtgcctgatgtacgaggcaacacccatccccgaggctaagctgcctccagtatacgttcgtaaggagcgaaaacgacacaagacagacccctccgctgccggtcgaaaaaagaagcagcggcatggggaggccgtagtcccccccagaagtctgtttgaccgtgcaactcccggcctgctaaagattcggagggaggggaaggagcagaaaaagaatattctgttaaagcaacaggtgccttttgccaaaccattgcctacctttgctaaacctacagccgagccaggccaagacaatccagagtggctgatcagtgaggattgggccctgctgcaagccgtgaagcagctcttagagctaccgctgaatcttaccattgtgtcccccgctcatacaccaaattgggatttagtatcagatgtggtgaattcatgtagcaggatttatagatctagcaaacagtgccggaaccggtatgagaacgttattattcctagagaagaagggaaatctaaaaataacagaccccttcgcaccagccaaatctacgcacaggatgaaaatgccacacacacccaactttacacttctcacttcgatttgatgaagatgacagcggggaagaggagcccgcctattaagcctctgctgggaatgaacccctttcagaagaatccgaagcacgcttcagttcttgctgagagtggcataaactatgataagcctttacctccaatacaagtggcttctttgagagccgagagaattgctaaagaaaaaaaggcactagccgatcagcaaaaggcccagcagcctgctgtggcacagcccccccctcctcagcctcaacctccaccacctcctcagcaaccacccccaccactgccacagcctcaggctgcagggagccagccacctgcgggtcctccagccgtacagccgcagcctcaacctcagccacagactcaacctcagcccgtgcaggcaccagcaaaggcacagccagctattacaacaggcggcagtgctgctgttctagcaggcacgatcaagacaagcgttactggtacatctatgccgactggggccgtgagcggcaatgtcatcgtgaatactattgctggcgtaccggcagccacgttccagagcataaacaaacgcctcgctagccccgtggctccgggcgcattgaccacgccagggggttccgctcctgcccaggtagttcacactcagcctccaccacgcgccgtgggttcccccgccactgcgacccccgacctggtctcaatggctaccacacagggagtgcgggccgtaacatccgtgaccgcatcagccgtggtgacaacaaatctcacccctgtgcaaacacctgcaagatcactcgtaccccaggtgtctcaggccaccggcgtgcagctgcccggaaaaactattacacctgcccacttccagctcctgcgacagcagcagcagcagcaacagcagcagcagcagcagcagcagcagcagcagcagcagcaacagcagcagcagcagcagcaacagcaaaccacgactacttcccaagttcaagtcccgcaaatccagggccaggcgcaatctcccgcccaaatcaaagcagtgggcaagttaacccctgagcatctgattaaaatgcagaagcagaaacttcagatgcccccacaacctcctccgccccaggctcagtccgcacccccacaacctaccgcacaagtacaggttcagacttctcagccacctcagcagcagtcacctcagttgaccacggtgaccgccccccgaccgggcgccctccttaccggcactaccgtggcgaacctgcaagtagctaggcttacacgcgttcccacctctcagctgcaagcgcaaggacagatgcagacccaagcgccccagcccgctcaggtggccctggctaaacctccggtggtttcagtacctgccgccgtcgtgtcaagtcctggtgtcactacactgcccatgaacgtcgccggcatttcagtcgcaatcgggcagccacagaaggctgccggtcagaccgtcgtcgcccagcccgtccacatgcagcagcttctgaaacttaagcagcaagccgtgcagcagcagaaggcaatccagccgcaggccgcccaaggacccgccgctgtgcaacagaaaatcaccgcacaacagataacaacccctggcgcgcagcagaaggtcgcgtacgcggcgcagcccgcccttaaaacccaattcctcactactcctattagccaagctcaaaagctcgccggtgcccagcaggttcagacccaaatccaggtggccaaactcccccaggtggtgcagcagcagacccccgtcgcttccattcagcaggtcgcgagcgcatctcagcaggcttcaccccagaccgtggcactcactcaggcgacagcagcggggcagcaggtgcagatgataccagcggtgacagccacagcccaggttgttcagcagaaactgatacagcagcaagtggtcacaaccgcaagcgcccctctccagacacctggagcccctaatccggcccaggtgccagcaagtagcgactctccctctcagcagcccaagctccaaatgcgagtgcctgccgtgcgtctgaagactcccaccaagcccccgtgccagtag

SEQ ID NO: 186551 - DNA, 9261 bp, Artificial Sequence
  derived and/or modified sequence
atgcaccatggtacaggcccccagaatgtgcagcaccaacttcagcggtcacgcgcctgtccaggatctgagggggaagaacagcccgcccatccaaacccacctcccagtcctgccgctccattcgcccctagcgcaagcccttcagcaccccagtctccatcataccaaattcaacagcttatgaacagatctcccgctactggtcagaacgtcaacattactctgcagagcgtggggcccgtcgttggcggcaatcagcagatcactctggcacccctgccactcccttcaccaacatctcctggatttcagtttagcgcgcagccaagaagatttgagcacggctccccgtcctacatccaggtaacctcacccttatctcagcaagtccagacccaatcaccgacacagccctcccccggccctggccaggccctccagaatgtacgggccggagctccagggcctggactcgggctgtgctcctcctcccctaccggcggttttgttgatgcgtccgtgcttgttcgccagatttctctgtcacccagtagtggcggacattttgtgtttcaggacggctcagggcttactcagatcgcccaaggcgcacaagtgcagcttcagcaccccggcactccaattacagtccgggagcggcgcccttcacagccgcatacacagtcaggaggtactatccaccatctgggaccccagtctccagcagcagctgggggggctggtttacagcctttagcctcgcccagccatatcacaaccgctaatctgccacctcagatctcgtctattatccaggggcagttggttcagcaacaacaggttttgcagggtccccccctgccacggcccttagggtttgaacggaccccaggagttctgttgccaggagccggtggcgcggcaggttttggcatgacatctccacctccgcccacatcaccgagccggacagccgtgcctccagggctgagctcccttccactgaccagcgtcggaaacaccggaatgaagaaggtgccaaaaaaattggaagaaattccacccgcgtcacccgagatggcacagatgcggaaacaatgtttggactaccactaccaagaaatgcaggcgctgaaggaggtcttcaaggaatatctgattgagttgtttttcctgcagcactttcaaggcaacatgatggatttcttggcgtttaaaaagaaacattatgccccccttcaggcttatttacgtcaaaatgacctcgacatcgaggaggaggaagaagaagaagaagaggaagaagagaagagtgaggtgattaacgatgagcaggcactcgcaggctctctggtggccggtgccggatctacagtggaaacagatctgtttaaacgccagcaggcgatgccttcgacaggcatggccggcggcatgccacccactcctcaggcagctcagctcgcgggtcagcgacaaagtcagcagcaatacgatccatccactggtccaccagtccagaacgctgcctcgcttcatactccccttccccaactgccaggaaggctgcctcctgccggcgtcccaacagcagccctatcctcagcactgcaattcgcgcagcagccgcaagtcgtcgaagctcagacgcaacttcagattcccgtcaagacacagcagccaaatgttcccatcccagcacccccatcatcgcagctgcccattccaccctctcagcctgctcaacttgcactccatgtaccaacacctggaaaggtacaagtgcaggcctcccagttatcctccttaccccagatggtcgcgagcaccagactgccagttgaccctgccccgccttgtccccgccccctgcccacatcctctacaagttcgttggctccagtgtccggctctggccccggtccgagtcctgccagaagctctccggtgaatagacccagttcggccactaataaggccctttcccctgtcacttccaggacccccggcgtcgtcgcctctgcccccacaaaaccacagtcacctgctcagaatgctacctcctctcaggactcctcacaagataccctgactgaacagataaccttggagaatcaggtgcatcagcggatcgctgagttgcgcaaagccggcctgtggtcccagagaaggctgccaaaactgcaggaagcgcccaggcccaagagccattgggactaccttctcgaggaaatgcagtggatggccaccgattttgcacaggaacgccgatggaaagtggcggccgccaaaaagctggtgaggaccgtagtgagacaccacgaagagaagcagttgcgagaggaaaggggcaagaaggaagagcagtctagactgcgtcgcatcgcggccagtaccgcaagggaaatagaatgtttctggtcaaacattgagcaggtcgtggaaatcaaactgcgcgtggagctggaggaaaaaagaaaaaaagccctcaatctgcagaaggtgtctcgacgaggcaaggaactgcgtccgaaaggtttcgacgctctgcaagagtcaagcctcgactccggtatgtccgggcggaaacggaaggcctcaattagtctgacagatgacgaggtggatgatgaggaagaaactattgaggaggaagaggccaacgagggcgtagtcgatcatcagacagagctatccaaccttgccaaggaggcagagctgcccctcctggatctaatgaagctatacgaaggcgcatttctgcctagcagccagtggccgagacctaaaccggatggagaggacacaagcggggaagaagacgccgacgactgtccaggggatcgcgaatcacggaaagacctcgtgcttatagactctctgtttatcatggatcagtttaaagcagcagagaggatgaatatcgggaaaccaaacgccaaggacatcgccgacgttactgccgtcgcagaggccatcctccctaaggggtcagcccgagtgacaacaagcgtcaagtttaatgcacccagcctcctatatggcgcactacgggattaccagaaaataggcttggattggttagccaaactgtaccgtaagaatctgaacggtattctggccgacgaggctgggctcggcaaaacagtgcagatcatcgccttctttgcccacctggcgtgtaacgaaggaaactggggaccgcaccttgtggtagtgaggtcctgcaacatattgaagtgggagctcgaactcaaacgttggtgtcccgggctgaagatcctctcttacattggatcgcaccgcgagcttaaagcaaagagacaggaatgggccgagccaaactcattccatgtctgcatcacctcttacacccagttctttcggggtctgactgcatttacacgggtacggtggaagtgcttggtgatagacgagatgcaacgcgttaagggtatgacagagagacactgggaagccgtttttaccctacagtctcagcagcgcctcctcctcatcgactctccacttcacaacacatttctggagttatggaccatggtccattttctggtgcccggcatctctcgcccctatctgtcttcgcccctgagagctccttctgaggagagtcaggactattatcacaaggtcgtaatcagactccatcgagttacccagccgttcattctcagacgcaccaaacgagatgtcgaaaagcaactcactaagaagtacgaacacgtgctgaagtgccgcctaagtaaccgacagaaggccctgtacgaggacgtaattctgcagcctggcacccaggaggctctcaagagcggacattttgtgaatgtgctctccattctggtgagattgcagcgaatttgcaatcatcctggcttggttgagccccggcatccagggagctcttacgtcgccggacccctggaataccccagcgcatccttgatcctgaaagctctcgagagagatttctggaaagaggccgatttgtcaatgttcgacctgataggcctggaaaacaagataactaggcatgaagctgaactactgagcaaaaagaagattccacgtaagctgatggaagagatctccaccagcgcagctcccgcagcaagaccagccgctgctaaactcaaagcatccaggctatttcagcccgtgcaatatgggcagaaacctgagggaaggaccgtcgccttcccttccactcatcctccaagaactgccgctccgacgactgcgtcagctgcgcctcaggggcccctcagaggccgtccgcccatcgccacattttccgccaacccagaggcaaaggcagccgctgctccatttcagacctctcaggcatccgcttctgccccaaggcaccagccggcctctgcctcctcaacagccgcatcgccagcccatccagctaagttgagagcccagaccactgcacaggcctcgacgcccggccaacctccaccccagcctcaagcgccaagtcacgccgccgggcagagcgcccttcctcaaagactagtgctgccttctcaggctcaagcgagacttcccagcggagaagtggttaaaattgcacaattagccagtatcaccggccctcagagccgagtcgctcagcctgagactcctgtaacccttcagtttcagggctctaagttcactttgagccacagtcagcttcgacagctcactgccggccaacccctgcagttacagggttcagtcttacaaattgtctctgccccaggacagccatacctgagggctcctggaccagtggtgatgcagaccgtgtcacaggcaggagccgtgcacggtgccctgggtagtaagcccccagctgggggcccttctccagcaccgttgacaccgcaggtgggtgtccctggccgagtggctgtgaatgcactggctgttggggaacctggaacagcctctaaacccgcttctcctatcgggggacccacccaggaagaaaagacaagactgctcaaagagcggctggatcagatatacctcgtaaacgagagacgttgttcacaggcaccagtgtacggcagggacctcttacgcatatgtgccctgccttctcacggccgggtgcagtggcgcggatcactggatggacggagaggtaaagaggcagggccggcccattcttataccagcagttcggaatcaccgtctgaactcatgctgactctctgtcgatgcggtgagtcgctgcaggacgttattgatcgtgtggcctttgtcattcccccagtggttgcagccccaccgtcactcagagtgccgcgccctccccctctgtactcacacagaatgcgcatcctgcggcagggcctacgggagcatgccgccccatactttcagcagctgcgccagacaaccgcaccaaggctcctgcagttcccagagttgcggttagtgcaatttgacagcggaaagttggaagcgctggccattctgctccaaaagctcaaatccgagggtagacgggtactcatcctgtcacagatgatactgatgcttgatatactcgaaatgttccttaactttcattacctgacctatgtccggatagacgaaaatgcttcaagtgaacagagacaggaactcatgcggtcgttcaatcgcgataggcggatcttttgcgctatcctctctacgcacagcaggactacagggattaacctggtcgaggcagatacagtggtgttctatgataacgatctgaatccagtaatggatgctaaggcacaggagtggtgtgatcgcattggtagatgtaaggacattcatatctacaggttagtctccggtaactccatcgaagagaaactcctcaaaaatggaaccaaggacttaataagggaggtggctgcccagggcaatgactatagtatggcattcctaacccagaggaccattcaggaactgttcgaggtgtacagtcctatggacgatgccggctttccagtgaaggctgaagaattcgtcgtgctgagccaagagccctctgtcacagagacaattgcccccaaaatcgcacggcccttcattgaggcgctgaagagtatcgaatacctggaagaagatgcgcaaaaaagtgcgcaggaaggcgtgttggggccccatacagatgccctgagcagcgattcagaaaacatgccttgcgatgaagagccatcacaattggaggaacttgccgacttcatggaacaactcaccccgatcgagaaatatgcactgaattatttagagctattccacacctccatcgagcaagaaaaagagcggaattccgaagacgcagtgatgacagctgtgcgagcatgggagttttggaatttaaaaacactgcaggaacgagaagcacgccttcggctggaacaggaggaagctgaactgctgacctataccagggaggacgcctactctatggaatacgtctatgaagatgtcgacggacagactgaagtgatgcccctgtggactccacccacacctccgcaggatgattcggatatctatctggacagcgttatgtgccttatgtatgaagccactccaatcccagaagcgaaactccccccggtttacgttaggaaagagagaaaacggcataaaacagatccaagtgccgccggccgtaagaaaaagcaacgccacggtgaagccgttgtccccccccgttctctattcgatagggcaacccctggtcttcttaaaatccgacgggagggaaaagagcagaagaaaaatatcctgcttaaacagcaagtcccattcgctaagccactccccactttcgccaagcccacagcagagcccgggcaggacaatcccgaatggttgattagtgaagattgggccttgctgcaggcagtgaaacagctacttgagctgcctctgaatttaacaatcgtttctccagcccatactccgaactgggacttggtcagcgacgtggtgaactcttgctccaggatctaccggtcgagcaagcagtgtcgtaatagatatgagaacgtgattatcccaagagaagaaggaaagagtaagaataaccgaccactgaggacaagtcagatttatgcacaagacgagaatgccacgcacacacagctttatacaagtcattttgacctcatgaagatgaccgccggaaagcgcagcccaccgattaagcccctgctcggcatgaatcccttccagaagaatccaaagcacgcaagtgtccttgccgagtcagggataaattacgacaagccactcccaccgatccaggtcgcgtctcttagagctgagcggatcgcaaaggagaagaaggccttggcagatcagcagaaggcacagcagcccgccgtagcacaaccaccacccccacaaccgcaacctcccccaccaccgcagcagcctccaccacccctgccccagccacaggccgccgggagtcaacccccagccggaccgccagcggtacagccacaaccccaaccgcaaccccagactcagccccagccagtccaagctcctgccaaagcgcaacctgctatcacgaccggtggcagcgctgcagtcctcgcagggaccattaaaacttcggttactggcactagcatgccgacaggcgccgtaagtgggaatgtcatcgtgaatacaattgccggcgtacccgccgcaacctttcaaagcattaataagagactcgctagtcctgtggctccaggtgcacttacaacgcctggtggctctgcacctgcccaggtggtgcacacccagccacctccccgcgctgtagggtcgcctgctacagcgaccccagaccttgtgagtatggctacaacacagggggtgcgcgctgtaaccagcgtcaccgccagcgctgtggtcacaaccaatttgacgcctgtgcaaaccccagctcgctcattggtcccgcaggtctcccaggctactggcgtgcagctgcccgggaagacgattacacctgcgcacttccaactcctgcgtcagcaacagcaacagcagcagcagcagcagcagcagcaacaacagcagcagcagcagcagcagcagcagcagcagcaacaacagcagacaactacgacttcccaggttcaggtgccgcagattcagggccaggcacaaagccctgctcagatcaaggctgtcggcaagctgacccccgagcaccttatcaagatgcagaagcagaagctccagatgccgcctcaacctcccccaccccaggcccaatcagcaccgccgcagccaacggcccaagtccaggttcagacttcccagccgccgcagcagcagtctcctcagctcaccacagtgaccgccccaagacctggcgccttgctgacagggaccacagtggcaaatctgcaggtggctagacttacacgggttccgacctcccagctacaagcacagggccaaatgcagacacaggctccacagccagctcaggtagccctggctaagccgccagttgtgtccgtgccggcagccgtggtgtcaagtcctggagtaacaaccctccctatgaatgtggccggaatatcggtagcaattgggcagccacagaaggctgccggacaaaccgtcgtggctcagcctgttcacatgcagcagctgctgaagctgaagcaacaggcagtgcagcaacagaaggccatccagccccaagccgctcaggggccagctgccgtgcaacaaaagattaccgctcaacagatcactactcccggcgcccagcagaaagtggcctatgctgcccagcccgcattaaagacacaattcctgactacacccatttcccaggcacaaaaattggctggcgctcagcaagtgcagactcagattcaagtggccaaattgccccaggtggtacagcagcaaacgcccgtcgcctctatccaacaggtagccagtgcctcacagcaggcttccccgcaaacggtcgctctgacccaagctacggcggccggtcaacaggtacagatgatccctgccgtgaccgcaaccgctcaggtcgtccagcaaaagttaattcagcagcaggtcgtgacgacagcatcagcgcccctgcagacacccggagcacccaatccggcacaggttcctgcaagcagcgacagcccatcccagcagcctaaactccagatgcgggtccccgctgtgcgcctgaaaacacccacgaaacccccatgtcagtag

SEQ ID NO: 186552 - DNA, 9480 bp, Artificial Sequence
  derived and/or modified sequence
atgcaccacggcaccgggccccaaaatgtgcagcatcagttacagcgatccagagcttgtcctgggagcgagggcgaggagcaaccggcccacccaaatccgcccccaagccccgccgcacccttcgcaccgagtgcatctccatcagcccctcaaagcccctcttatcagattcaacagttaatgaaccgatcgccagcgacaggtcagaatgtaaacattacattgcagtccgtgggccccgtcgtagggggaaatcagcaaataactctggcccctctgcccctgccgtcacctaccagcccaggatttcagttttccgctcagcctagaaggtttgagcacggctccccatcatatatacaggttacaagccctctcagccagcaagttcagactcaatctcccacccagccctcaccaggccccgggcaggccctgcaaaacgtgagggctggggctccaggtccagggcttggcctgtgtagcagtagcccaacgggtggatttgtggacgcatctgtgttagtgagacaaatcagtctctcacctagttccggcgggcactttgtgtttcaggacgggagcggcctcacacaaatcgctcagggcgctcaggtccagctgcagcacccaggcacacctatcactgtaagggagcgaagaccttctcagcctcacacacagagcggaggtaccatccatcacttaggacctcagtcccccgccgccgccggcggtgcaggtctccaacccctggcttctcccagccacatcactacagcaaatctccctcctcagatctcatccattatccaaggacaacttgttcagcagcaacaggtactccaagggcctccgcttcctcgtccactcggatttgaacgcacccctggagttcttttgcccggggctggcggggccgcaggatttggtatgacctcccctccacccccaaccagtccttcccggaccgcagtgcctcctggcctgagtagcttgccccttacatccgtcggtaacacagggatgaaaaaagtgcccaaaaagcttgaggagatccctcctgcctccccggagatggcacaaatgcgaaagcaatgcctcgactaccattaccaggaaatgcaggcactgaaagaagtatttaaggaatacctaatcgaacttttcttcctgcagcacttccagggcaacatgatggactttctggccttcaagaaaaagcactacgccccactgcaggcatacctgagacaaaacgatctcgacatagaagaagaagaagaagaggaagaggaggaagaggaaaaatctgaggtcataaacgacgaggttaaagtcgtcaccggtaaggatgggcagactggaacacccgtagctattgcgactcagctgccccccaaggtgtccgccgcattcagttcccagcagcagccttttcagcaggccctggccggctctttagtcgcaggggcaggaagtaccgtcgagaccgacctgttcaaaagacagcaggccatgccctctaccggcatggccgaacagtccaagcggcctcgcctggaagtggggcaccaaggagtggtgtttcagcacccgggagccgacgcaggtgttcctctccagcagctgatgccaaccgctcaaggtggaatgcctcctacaccgcaggccgctcagctcgctggccaaaggcaatcccagcagcaatatgacccttctaccgggccgccggtccaaaacgccgcctcattgcacacaccactgccacagttgcccggacgcctccctccggccggcgtgcccaccgctgcgctcagcagtgcgctgcagtttgcacagcagcctcaggttgtagaggcacagacccagctgcaaattcccgtaaaaacgcagcaacctaacgtgcccatccctgcccctccatccagccagttgcctatcccaccatcacaacccgctcagctagccttgcacgtcccaacccctggaaaagtgcaagtccaagctagccaactgtcatctctgccccagatggtcgccagcacaagactgcctgtcgacccagctccaccttgccctaggcctcttcctacctcatcaacctctagtctggctcctgtgtctggcagcggccctggccccagtcccgctcggtccagtcccgtgaaccgaccatccagcgctaccaacaaggccctgtcacctgtcacctccagaacgcccggcgtcgtagcttcagcccccactaaaccacaaagccctgcacagaatgctacatcatctcaggactcttcacaggatacgctcacggagcagattaccctggagaaccaggtacatcaaaggattgcagaactgagaaaagccgggctctggtcccaacgccggctcccaaaactccaggaagcgccccgacccaagtctcattgggactaccttctggaagaaatgcaatggatggctactgacttcgctcaagaacgcaggtggaaggtagctgcagccaagaagctcgtgcgaacagtcgtgcgccaccatgaagaaaagcagctccgtgaggaacggggcaaaaaggaagagcagtcaaggctccggcgaatcgccgcttcgactgcaagggagatcgaatgtttttggtctaatattgaacaggttgtggaaatcaaactgcgggtcgagttagaagagaagaggaaaaaagcactaaacctacagaaggtctccagaaggggaaaggaactacgaccaaagggctttgatgcattacaggaaagtagtctcgattcggggatgagcggacgcaaaagaaaggcatccatttctctgacagacgatgaagtggacgatgaggaggagactatcgaggaagaggaggcgaatgagggggtggtagaccaccagacagagcttagtaacctagccaaggaggctgagctgccacttctggatctcatgaagctgtacgagggggcgtttttaccctctagccaatggccaagacctaagccagatggagaagatacgagcggcgaggaggatgctgatgactgcccgggagaccgggaatcccgcaaggatctggtgctgatcgactcactgttcataatggaccaatttaaggccgcagagcggatgaatatcgggaagcccaatgctaaggatatcgccgacgtgaccgcagttgcagaggccattctgccgaaggggtctgcccgggttactacatctgtgaaattcaacgctcctagcttgttgtacggagcattgcgtgattaccaaaagatcgggctggactggcttgcaaaattatatcggaagaaccttaacggcattcttgccgacgaggcaggactgggcaagacagtgcagatcattgctttttttgcccatctggcctgcaatgaagggaattggggtcctcacctggtcgtggtcagatcttgtaatatactcaagtgggagctcgagctgaaacggtggtgtccgggactgaaaattctttcatatataggaagccatagggagctcaaagctaaacgccaggagtgggccgagccaaattctttccacgtatgcattacaagctacacccagttctttcggggcctgaccgctttcactcgagtacggtggaaatgcctggttattgacgagatgcaacgggtgaaaggcatgaccgaacggcactgggaagccgtcttcaccttacaaagccagcaacgcctgctcctgatagattccccattgcacaataccttcctagagctgtggactatggtgcatttccttgtccctggaatctcccgcccctatctgagctccccacttcgtgccccttcggaggagtcccaggactactatcacaaagtcgtgatccgtctgcacagagtgacccagccatttatcttgcgacgaaccaagagagatgtggagaagcagttaacgaaaaagtatgaacatgtactgaaatgtcggctcagcaaccgccaaaaggcgctgtatgaagacgtgattttgcaaccgggtacccaggaagctctaaagtctggccactttgtgaacgtcctctccattctggtccgtctgcaaaggatttgtaaccacccgggcctggttgagcctaggcaccctggttcttcatatgtggctgggcccctggagtacccttccgctagcctcatacttaaagctttggagcgcgatttttggaaagaggctgacctctccatgtttgaccttatcggcctcgaaaataaaataacccgccacgaagctgagcttctgtcaaagaaaaagattccacgcaaattaatggaggaaatctccactagcgccgcgcccgctgctaggcccgcggccgccaagctgaaagcctcgcgcctttttcagccagtccaatacggccagaagcccgaagggcggaccgttgctttccctagcacccatcccccgcgaactgccgcccccaccactgcatcagccgccccgcaaggccctctccgcggtcggccaccaatcgcgaccttcagtgccaatcctgaggccaaagccgccgcagcacctttccagacttcccaggcatctgcgtctgcccccaggcaccagccggcaagcgcctcatcaacagctgcttctccggcccaccccgcgaaattacgcgcgcagactaccgctcaggcctctactccaggccagccccccccccaaccgcaggccccgagccacgcggctggccagtcagctctccctcagcggctggtgctaccaagtcaggcacaggctcgcttgcctagcggagaggttgttaaaatcgctcagcttgcctctataacaggcccacagtccagggttgcccagcctgagactccagttacgctccagttccagggttccaaattcactctctctcatagccagctgcgccagctgaccgctggccagcccttgcaactccaaggctcagtcctgcagattgttagtgctcctgggcaaccatacctccgggcccctggacccgtggtaatgcagacagttagccaagcaggcgctgtgcatggcgcattggggtccaagcctccagctggcgggcctagtccagcaccactgaccccgcaagttggagtgccaggtcgcgtggctgtgaacgctttagcagtgggggaacccggcacagcctctaaacctgcaagtccaatcggcggacctacccaggaagaaaaaacccgactgcttaaggagcgtctggatcaaatatatctagtgaacgaaagacggtgttcacaggcaccagtctatgggcgcgacctgttgcgaatctgtgccctccctagtcacggtagagttcaatggaggggctccctggacggcagacggggaaaggaagctgggccagcacactcctatactagctccagcgaatccccctctgagctgatgctgaccctgtgccgttgtggagaaagcctgcaggacgtaatagaccgcgtcgctttcgtaattcctccggtggtcgctgcacccccttccctacgggtgccccgacccccacctctttatagccatcgcatgaggatcttgaggcagggcctccgcgagcacgcggctccttatttccagcagctgaggcagacaactgctccacggctgctgcagttcccagaactgcgactggttcagttcgacagcggcaagctcgaggcccttgcaatcttgctgcaaaagctaaaaagcgaaggtcgcagggtgctgatattgtcacagatgattctaatgctggatatcctggagatgttcctcaatttccattacctaacctacgttagaatcgacgaaaacgcaagctccgagcagcgtcaggaattgatgcggtcatttaatcgagaccgacggatcttttgcgctatactgtccacacacagtcggacaaccggtataaacctcgtggaagccgataccgtcgttttttacgacaatgacttgaaccccgtaatggatgccaaggctcaggagtggtgcgatcgcatcggtagatgcaaggacatccatatctaccggttggtgtctggcaactcaatcgaagagaagttgctcaaaaatggcacaaaagacttgatcagggaggtagccgcccaagggaacgattatagcatggcctttctcacccagcgaactatccaagagctgtttgaggtctactcacccatggatgatgcggggtttccagtgaaagcggaggagttcgtggtcctcagccaggagccttcagttactgaaactatcgctccgaaaatcgctagaccgtttatcgaggccctgaaatcaatagaatatctcgaggaggatgcgcagaagtctgcccaagagggagtactcgggccccacaccgacgctctaagctccgactccgagaacatgccttgcgatgaagagccctcgcagctcgaggaacttgctgactttatggagcagcttacccctattgagaaatacgctcttaactacctcgaacttttccatacatccattgagcaggagaaggaaaggaacagtgaagatgctgttatgacggcagtgagggcatgggagttttggaacctcaagacgctacaggagcgcgaggcccggctgcggctcgaacaagaggaagcagaacttctgacctacacaagggaagatgcatatagcatggaatatgtgtacgaagatgtggatggccagacagaagtcatgccactgtggacacctccaacccccccccaggatgacagtgacatctacttagactcggttatgtgcctgatgtacgaggcgacccccattccggaggcgaagctgccacccgtgtacgtacgaaaagagaggaagcggcataagaccgacccatctgccgcagggagaaaaaagaagcagagacatggggaggctgttgttccaccccggtccctgttcgacagggcaacacctggcctcctcaagatccggcgggagggaaaagagcagaagaaaaacatcttgctcaagcaacaagttccattcgccaagccgctgcctaccttcgcgaagccaactgcagaacccggccaggacaacccagaatggctgatctcagaggattgggctctgctgcaggcagtcaagcaactgcttgaactccccctgaacctgacaatcgtgtctcctgcccacacgccgaactgggacctggtgtcggacgtggtgaactcctgctcccgaatttacaggtcctcgaaacaatgtcggaatcggtatgaaaatgtgataattcccagagaggaaggaaaatctaaaaataatcgccccctgagaacatcccagatatatgcccaggacgagaatgccactcatacccagctctataccagccactttgatttaatgaaaatgactgcggggaaacggagcccgcccatcaaacctctcttgggaatgaacccttttcagaagaatccaaagcacgcctcggtactggcggaaagtggtattaattatgacaagccgctaccaccgatccaggtggcttcgcttagggcagagaggatcgcaaaagagaaaaaagccctggctgatcagcagaaagctcagcagcccgccgtagcgcaaccccccccaccacagccacagccgccaccccctccccagcagccgccaccccctttgcctcaaccgcaggcagccggatcccagccgcccgctggacctccggcagtgcaaccccaaccgcaaccgcagcctcaaacacaaccgcagccagtgcaggctcctgctaaggcacagccggctattaccaccggtggctcggccgcggtgttagctggcactatcaagacaagtgtcacaggcacgtccatgcctaccggggctgtgtcaggcaatgtgattgtgaacaccattgcaggcgttccagccgctacctttcaatccataaataaaaggctcgcatctccggtggctccgggagccctgacgacgcctggtggatccgcgccagctcaggtggttcacacacaaccccccccgagggccgtcgggtctcccgcaacggcaacccctgatctggtttcaatggccaccacgcaaggggtgcgggcagtcacatctgtcaccgcttctgcggtggtcacaaccaacttgaccccagtgcaaaccccggccagaagcctcgtccctcaagtgtcccaagccaccggcgttcagctcccgggtaagactattacgcccgcacatttccagcttcttagacagcagcaacaacagcagcaacaacagcagcaacagcagcagcaacaacagcagcagcagcagcagcaacagcagcagcagcaacagaccacgaccacatcccaggtgcaggttccccagatccaaggtcaggcgcagtctcctgcccaaatcaaggctgtgggaaagttgactcctgagcatctgatcaagatgcagaaacaaaaattgcagatgcccccccagcccccacccccacaggcccagtctgcacccccacaacctactgctcaggttcaagtgcagacctcccagcctccacagcaacagagcccccagctgacaaccgttactgcaccgcggcccggtgccctgctcactgggactactgtggctaacttgcaagtggcacgcttaactcgggtgccaaccagtcagctccaagcacagggacagatgcaaacccaagccccacagccagctcaggtggcacttgccaagcctcccgtggtcagtgtgcctgctgcggttgtgtcttctcccggagttacaactcttcctatgaatgtcgcaggcatctcagtcgcgatcgggcaaccccagaaagccgctggacaaaccgtcgttgcacagcctgtccatatgcagcaactgcttaaattaaagcagcaggctgtgcaacaacaaaaagccattcagccacaggcggctcaggggccggccgccgtccagcagaaaattacggcgcagcaaattaccacacccggagctcaacagaaggttgcttatgcggcccagcctgccttgaagacacagttcttaaccacccctatcagtcaggcacagaagcttgcaggagcccagcaggtgcagacacagattcaggttgccaagctgccccaggtggtgcagcaacagaccccggttgcctctattcaacaggttgcctccgcaagccagcaggcctctcctcagaccgttgctctcacccaggctaccgccgccggtcagcaagtgcaaatgatccccgcggtaactgctactgcacaggttgtgcagcaaaagttaatccaacagcaggtggtgaccaccgcctctgcacctctccagacccctggagctcccaaccccgcccaagtccccgctagcagcgatagcccgtcacagcaacctaaactacagatgcgcgtgccagcggtccgactgaagacccccactaagccaccttgccagtag

SEQ ID NO: 186553 - DNA, 9372 bp, Artificial Sequence
  derived and/or modified sequence
atgcaccacgggactggaccccagaatgtccagcaccagttgcagcgcagcagagcctgccccggcagtgagggtgaggagcaacccgcccatcccaaccctccgccatccccagccgccccttttgctccatctgcttctcctagtgcaccacaatccccgtcttatcagattcagcagctcatgaatcgatcccctgccactggacagaatgttaatattactctccagagcgtgggcccagttgtaggcgggaatcagcaaatcaccctggccccccttcctctcccttctcctacctccccagggtttcagttcagcgcccaaccccgacgcttcgagcacggttccccatcttatatccaagtcacgtcaccactgtctcaacaggtgcagacacagagtccaacacagccttccccaggacccggtcaggctctccaaaatgtacgggctggcgcacccggcccgggcttggggctctgttcaagttcccccaccggagggttcgtggatgcttctgttctggtcaggcagatttcactgtcgcccagctccggaggacactttgttttccaggacgggagcggactgacacagatagctcaaggagctcaggtgcaattacagcaccccggcacccctatcaccgtgcgggaaaggaggcctagtcagcctcacacccaatcaggagggacgattcatcacctcggaccgcaatcccccgctgccgccgggggggcaggactccagcccctggcctccccctcacacattactacggccaacctgccgcctcaaatttccagcattatacaggggcagctcgtccaacagcagcaggtactgcaagggcctccgttaccaagaccattaggttttgagagaacccccggggtgctgctcccaggtgcagggggcgcggcgggcttcggaatgaccagcccaccgccaccaacaagtcctagccggacggctgtccctcctgggctttcaagtttgcccctgacgagtgtgggtaacaccgggatgaagaaggttcccaagaaactcgaggagatccctccggccagcccggaaatggcccagatgcggaaacaatgtttagattaccattaccaggagatgcaggccttaaaagaggtgttcaaggaatacctgatagagcttttcttcttgcaacacttccagggaaatatgatggactttttggccttcaaaaagaagcattacgcccctctgcaggcctatctgcgacagaatgacctcgacattgaggaagaagaggaggaagaggaagaagaggaagagaaatctgaggtgatcaatgatgagcaacaggccctcgccgggagcttagtggctggggccggaagcacggtggaaacggacctcttcaaacggcagcaggctatgcctagcactggtatggcagagcaaagcaagcggccacgattggaagtgggacatcagggcgtcgtgtttcagcatccaggcgccgacgctggcgtgccattgcagcagctcatgccaaccgctcaggggggaatgccccccactccccaagcggctcagctggcaggtcagcggcagtcccaacagcagtatgacccctctaccggtccccctgtgcagaatgcagccagcctccacacacccctgccacagcttccgggccgcttgcctcccgccggagtgcctactgccgcattaagctccgccctccagtttgcccagcagcctcaggttgtggaggctcagacacaattgcagatacccgttaagacacagcagccgaacgtgcctatccccgcgcccccctcttcccagctacctataccccccagtcaaccggcacagctagccttgcatgtgcccacccctgggaaggtgcaggtccaggcaagtcagctgtccagccttcctcagatggtggcaagtacccgtctgcctgtggaccctgctcctccgtgtcctcggcccctgcctacttccagcactagcagcctggctccagtgtctggcagcggtcctggcccctccccagctagaagctccccggtgaaccgtccctcctccgcaactaacaaggccctcagccctgtgaccagtaggactcctggtgtggtcgcatcagctccgaccaagccacaaagtcccgcacaaaacgctactagcagccaggactccagccaggacactctgacggagcagattaccttggaaaaccaggtccaccagcgaatcgccgagctcaggaaggcagggctgtggtctcagagaaggcttcctaagcttcaggaggctccacgacctaagtcacactgggactacctgttggaggagatgcagtggatggctactgacttcgctcaggagcgacggtggaaggtggctgccgccaagaaactggtgcgcacggtggtccggcaccatgaagagaagcaactgagggaagagagaggcaagaaggaggagcaatcacgcctccgtcgcatcgctgcctctacagctcgagagatcgaatgcttttggtcaaacatcgagcaggtcgtggagattaagcttcgagtggaactggaagagaagaggaaaaaagcgttgaatcttcagaaagttagtcggcgaggaaaggagctacgccccaaagggttcgacgcattacaggagtcctctctcgattccgggatgtccggaagaaagaggaaggcatcaatcagtttgactgacgacgaggttgacgatgaggaagagaccatcgaagaggaggaggctaatgagggcgtggtggaccaccagaccgagcttagcaacctggctaaggaggctgaattgcctttattggacctcatgaagttatatgaaggggccttcctgccaagcagccaatggccccggcctaaacccgacggagaggatacctccggtgaggaggatgccgacgactgtcccggtgatcgcgagtcccggaaggacctagtgctgattgattcactattcatcatggaccaatttaaagccgcagagcgaatgaatattggaaagcccaatgcgaaagacatcgccgacgtcactgcagtagccgaggcaatcctgccaaaaggcagtgcccgggttacgacctcagtcaagttcaatgcccctagcctgttgtacggtgctcttagggactatcaaaagataggtttggactggcttgctaaactgtatagaaaaaatctaaacgggattcttgctgatgaggcaggcctggggaaaacagtccagatcatcgcgttctttgcccatttggcttgtaacgaaggaaactggggaccacatctcgtggtggttaggtcatgtaatatcctaaaatgggaacttgaactgaagaggtggtgtccaggcctgaagattctgtcttacataggctcacaccgggagctgaaagctaaacggcaagaatgggctgaacccaattcttttcatgtgtgcatcacctcctacacgcaatttttccgtggtctcaccgccttcactagagttcgctggaagtgtttggtaattgatgaaatgcagcgggtgaaaggaatgactgaacggcattgggaagccgtgtttacgctccaatcgcaacagagactccttcttatcgactctcccctccataacaccttcctggagctatggacaatggtgcacttcctggttcccggtatatctcggccttacctgtcgtctccgttgagggctccctcagaagagagccaggactattatcacaaggtggttatcagacttcatcgggtcactcagccatttattttgagaaggaccaagcgcgacgtggagaagcagctgacaaaaaagtacgagcacgtgctcaagtgcagactgtccaatcggcaaaaggctctgtatgaggacgtaatcctccagccagggacacaggaggctcttaaaagtggccattttgttaacgttctgagcattttagtgcgcttacagcgcatttgcaaccatcctggattagtcgagcctaggcaccccgggtcctcttacgtggccggccccctggaatacccatccgcaagccttatccttaaggctttggaacgcgatttttggaaagaggcggatctgagcatgttcgaccttatcgggttagagaacaaaatcactcgtcatgaggcggaactactctcgaaaaaaaagatccccaggaagctaatggaagagatctccacctctgccgccccggctgcccggcctgccgctgccaagcttaaagccagcaggctattccaacccgttcagtacgggcaaaagccagagggaaggacagtagcttttccctccacacaccctccccgcacggctgctccgaccaccgcaagcgctgcaccgcagggacctttgcggggaagaccccccattgctaccttttctgcaaaccccgaagctaaggctgctgccgcaccattccagacctcccaggctagtgcctcagccccccggcaccaaccagcttctgcatcttctactgcagcgagccctgctcatcccgctaagctgcgtgcccagaccacagcacaggcttctacaccgggacagcccccaccgcagccacaagccccatcacatgcagcagggcaaagcgcactgccccagcgccttgtgttacctagccaggcacaggcccgcctgccctccggggaggtcgtgaagatcgcccagctggcctccatcactgggccccaaagccgagttgcccagcctgagacaccagtcaccttgcagtttcagggttctaaatttactctcagtcactcacaattgcgacagctgaccgcggggcagcccctgcagctgcagggttccgtgctgcagattgtgagcgcaccagggcagccctacttgcgcgcaccaggccccgttgtcatgcagacagtgtcacaggctggcgcagttcacggtgctttgggtagtaaaccaccagctggtgggcctagccccgctcctctgaccccccaggtgggcgtgccagggcgggtcgccgtgaacgcgctggcagtgggggaacctgggacagcatccaaacctgcctcaccaatcggcggacccacccaggaggagaagacccgcctcctaaaagagcgactagaccaaatttaccttgtgaacgagcggcggtgttcacaagctcccgtgtatggcagagatctgttacggatttgcgcactgcccagtcacgggcgtgtacagtggcgcggttctctggacggccggcgcggaaaggaggccgggccagcccactcctacacctcctcatctgaatctccgagcgaattgatgctcaccctgtgccgctgtggagaatcgctgcaagatgttattgaccgggtggccttcgttatccctcccgtcgtggctgcccctccatcccttagggtgcctcggcccccacccctgtacagtcacagaatgcgcattctgagacagggcctcagggagcacgccgcgccatattttcaacaactccgacagacaaccgctccccggctactccagtttcccgaacttaggctggtacaattcgatagtggcaaactggaagccttggccatcctgcttcaaaaactaaaatctgaaggtaggagggtgctcatcctgagccagatgatactgatgctcgacatcctggagatgttcctcaattttcattatctcacgtacgtgagaatcgacgagaatgcatctagcgagcagcgacaggagctgatgcgctcatttaaccgtgatcgcaggatcttttgtgcaatactgtctacccactcccggacaaccggcatcaacctggtcgaggcagatacagtggtattttatgataatgacttgaatccagtgatggatgcaaaagcgcaggaatggtgcgaccggatagggcgatgtaaggacatccatatctatcggctcgtgtccggtaactctattgaagaaaaactgctgaagaatggcaccaaggatttgattagagaagtggcagcacaaggaaatgactatagcatggccttcttaacgcagcgcacaatccaggagttgtttgaggtgtattcacccatggatgatgccggattcccagttaaagccgaagagttcgtggtgctctctcaggaacccagtgtcaccgagactatagcgccaaagatcgctcgcccattcatcgaggccttgaagtcaattgagtacctggaggaggacgcgcagaagtctgcacaggaaggagtgctgggacctcacaccgacgctcttagctccgactcagagaacatgccatgtgatgaagagccttcccagctcgaagaacttgctgacttcatggagcagctgacccctattgagaagtacgcactcaactaccttgaactattccacacgtcaatcgagcaggagaaggaacggaattctgaggacgctgtgatgaccgctgtgcgggcctgggagttttggaacctcaaaacccttcaggaaagggaggcccgactgcgactcgagcaggaagaggcagagcttctgacatataccagagaggacgcctattctatggaatatgtgtatgaggacgtggacggccaaaccgaagtgatgcctctttggaccccccccacgccgccccaagacgattctgacatatatctggactcagtgatgtgtctaatgtatgaggctactccgatacctgaggccaagctgccgccggtgtacgtcaggaaagagcgcaagcgacacaagaccgatccaagcgccgctggacggaagaagaagcagcggcatggagaggccgtagttccacccagaagtttattcgacagggcaacacctggactgcttaaaattaggcgggaagggaaggagcagaaaaagaatatccttttgaagcagcaggtacccttcgccaagcctctcccgacctttgcgaaaccaacggccgaacctggccaagataatcccgaatggctgatctctgaagactgggcgctgttgcaggccgtaaagcagcttctcgagcttcccctgaaccttactattgtaagcccagcacacacacctaactgggacttagtgagtgatgtagtcaattcttgttctcgcatctataggtcatcgaagcagtgtagaaacaggtacgagaatgtgattatcccacgggaggaaggcaagtcaaagaacaaccgacctttgcggacctcacagatttacgcacaggacgaaaacgccacacacacccagctgtacacttcacacttcgatctcatgaaaatgaccgctgggaaaagatccccacctattaagcccttgctcgggatgaatcccttccaaaaaaaccctaagcatgcgtccgttctcgccgagagcggtatcaattacgataagcccctcccgccgattcaagtcgctagcctgcgagccgaacggattgcaaaagaaaaaaaggcccttgccgatcagcaaaaggcgcagcaaccagccgttgcacaaccaccccccccccagccacagccccctccccccccccagcagcctccgcccccactgccccaaccacaggccgcgggctcacagccgccagcgggtccccccgctgtgcagccccagccccagccgcagcctcagacccaaccacaacccgttcaggctcccgcgaaagcgcaaccggctatcaccaccggtggctcagctgcagtactggccggaacaatcaagacttccgtgacaggaaccagtatgcctacaggagcagtctccggcaatgtaatcgttaacacgatcgcaggtgtgccagccgccacctttcagtctattaacaagagactcgcatcacctgtggcccctggagccctgactactccaggaggatcagctccagcccaggtggtgcatacccagccacctccaagggcagtgggctctcccgcgaccgccacacccgatctggtctctatggcaaccacacagggcgttcgggctgtaacctccgtgaccgcaagtgccgtggtcactaccaatctcacccctgtccagacgccagctcggtctcttgtgccccaagtctcacaggctaccggggtccagcttcctgggaaaactattacccccgcgcacttccagctactgcggcagcagcagcagcagcaacagcagcaacagcaacagcagcagcaacagcagcagcagcagcagcagcaacaacagcagcagcagcaaaccacaactaccagtcaggtccaagtgccacagattcaaggccaggctcagagcccagcgcagatcaaggctgtcgggaaacttacccccgagcaccttataaagatgcagaaacagaaactgcaaatgccaccacagcctccgccacctcaagcgcaatccgccccgccccagcccaccgcacaggtgcaggttcagaccagccagccccctcagcaacaaagccctcagctcaccacagtaaccgcacctcgaccaggtgcactgttaactggcaccacagtggccaatctacaggtggcacggctgacccgcgtcccaacatctcagctgcaggctcagggacagatgcaaactcaggccccccagcctgcgcaggtagcactcgctaagcctcccgtcgtaagcgtacctgccgcggtggtttcatccccaggcgtcaccaccctacccatgaatgtggccggcatttctgtggctatcggacagccccagaaggccgccgggcagacagtggtggctcagcccgtgcatatgcagcagctcttaaaactgaagcagcaggctgttcagcaacaaaaggccatccagccacaggccgctcagggccccgccgccgttcagcagaagataacagcccagcaaataacgaccccaggagcacagcaaaaggtggcctacgctgcacagccggccttgaagacgcagttcctgacaactccaatctctcaagcgcagaaactggccggggctcagcaggttcagacccagatacaggtggccaaactgccacaggtggttcaacagcaaaccccagtcgctagtattcaacaagtggcctctgcctcccagcaggcgagccctcagacagttgccctgacgcaggccaccgctgctggtcagcaggtgcaaatgatcccagcggttactgccaccgcgcaggtggtacagcaaaaactgatccaacagcaggtggtgaccaccgcatctgcacctcttcagaccccaggggcacccaaccctgcacaggtgccagcaagctcagattcaccaagtcagcagcccaaactgcagatgagggtacccgccgtacggctgaaaacgccaaccaaaccaccctgccagtag

SEQ ID NO: 186554 - DNA, 9369 bp, Artificial Sequence
  derived and/or modified sequence
atgcaccacggcactgggcctcagaatgtgcagcaccagctacagcgcagccgagcttgtccaggctctgagggcgaggaacagcccgctcaccccaaccccccgcctagtcctgcggcccccttcgccccttcagcgtcccctagtgccccccagtctccgtcttaccaaatccagcagcttatgaacagatcccccgctaccggtcagaatgtaaacatcacgttgcaatccgtcggcccagtggttggtggcaatcagcaaatcactttggcccctctgcccctccctagcccaacaagtccaggattccagttttcagcccagccaagacggtttgagcacggcagccccagctacatccaggtgacaagcccgctgagccagcaggtgcagactcagtcccccacccagccctcccccgggccgggacaggctctccagaatgtaagagcaggcgcgccaggaccaggcctcggcctgtgcagttcatcccccaccggtggatttgtggacgcctctgtcttggtgagacagatttcactgtctccatctagcggtggacatttcgtgtttcaggacggctcgggtctcacacagatagcgcaaggggcccaggtgcagctgcagcacccaggaacaccaattacagtgcgtgagagacggccttctcagcctcatacacagtccggcgggacaattcatcacctcggaccccagagccccgctgccgctgggggtgcagggctccagcctcttgcctccccgtcccatattacaaccgctaacttgccaccccaaatctcttctatcatccaggggcagctggtccaacagcaacaagtgttgcagggccctccactacctagacctctgggtttcgaaaggacaccaggcgtgctacttcctggggctggaggggcggccgggtttggcatgacgtcaccaccacctcctacgtccccttcacggaccgctgtcccacccggcctttcctcactgcctctgactagtgtcggcaataccggaatgaaaaaggttccaaaaaaattggaagagatccctccggcaagtccggagatggctcaaatgcgaaagcaatgcctagactatcattatcaggaaatgcaagccctaaaagaagtgttcaaggaatatcttattgaactttttttcctccaacatttccagggcaatatgatggatttcctggcctttaaaaagaaacattacgctccccttcaagcatacctgaggcaaaatgatctagatatcgaagaggaagaggaagaagaagaggaagaagaagagaagtccgaagttatcaacgacgaacaggcactggcagggtctctggtggctggagccggctctactgtggaaaccgacttgtttaagaggcagcaggccatgccctcgactggtatggccgagcagagtaagcggcctagactagaagttgggcaccagggagtagtcttccagcaccctggagccgatgccggtgtgccactccagcagctgatgcccactgctcagggcggaatgcctccaaccccccaggcagcacagcttgccggtcagaggcaatcacagcagcagtacgaccctagcacaggacctcccgtgcagaatgcagcctccttgcatacacctctccctcagctgcccgggaggctgccacctgctggcgtccccaccgctgccctttcatcagcccttcagttcgcgcagcagcctcaggttgtcgaagctcaaacacagctccaaatccccgtgaaaacacagcagcctaatgtgcccatcccagccccgccctcaagccaacttccaataccccctagtcagcctgcgcaattagccctgcacgtgcccactccgggaaaagtccaagtccaggcctctcagctatcctctcttccccagatggtcgctagcacccggctcccagtcgatcccgcccctccctgccccaggcccttgcccacctcctctaccagtagcctcgccccggtcagcgggtctgggcctgggcctagtcccgcacggagttcccccgtcaaccggccctccagcgccacaaataaggcgctatcccctgtgacttctagaaccccaggcgtggtggcatcagctcccacaaaaccccaatctcccgcccagaatgcgacatcatcacaagattccagccaggatactctaacagaacaaattacactggagaatcaagttcaccagcgcatcgcagaactgcgtaaagccggtctctggtcacagagacggttgcccaaacttcaggaagcaccacgccccaaaagccactgggattatctcctcgaggagatgcagtggatggctaccgattttgcccaagagcggagatggaaggttgcggccgccaaaaaactggtgaggaccgtggtccgacatcacgaggagaagcagctccgagaggagcggggcaagaaggaagagcagtctcgcctacggcggatcgccgcgagtacagcgcgggagatcgagtgcttctggtcgaatatcgaacaggtcgttgaaatcaaattacgagtagaacttgaggaaaagaggaagaaagcactgaacctgcagaaggtctccaggaggggaaaggaactgcggccgaagggctttgacgcccttcaagagagtagcttagatagcggcatgtctggaagaaaacggaaagcctctatcagtctgaccgatgatgaagtcgacgatgaggaggagacaattgaggaggaagaggccaacgaaggagtggtcgatcatcagactgagctgtccaacctggcaaaagaagctgaactgcccctgttagacttgatgaagctctacgagggtgcctttttgccttccagccagtggccccgccctaaaccagacggggaggatacctctggagaagaagacgctgatgactgccctggggatcgggaatccaggaaggatctggtgctaattgactcattatttattatggaccagtttaaagcagcggagcgaatgaacattggtaaaccgaacgccaaggacattgctgatgtcaccgctgtggcagaagccatacttcccaaaggctcagctcgagtcaccacatccgttaagttcaatgccccctccctgctgtatggggcactgcgcgattaccaaaaaatcggacttgactggctcgccaaactgtataggaaaaatctgaacggcatccttgcagacgaagcagggctcgggaaaaccgtacagataattgccttttttgcccatctcgcctgcaacgaaggtaactggggtcctcacttggtggtggtgagatcttgtaatatactgaagtgggagctcgagctcaaacgatggtgccctggattgaaaatcttgtcttatatcggcagtcatcgtgagctcaaggcaaagcgtcaagaatgggccgagccgaacagttttcacgtgtgtatcactagctacacccagttcttccgtggccttacagcgtttacgcgagtccgatggaagtgcctggtgattgacgaaatgcagagagtgaagggtatgactgagagacattgggaggcagttttcactttgcagagccagcaaagactgctgctaattgacagtcctctgcataacacttttctcgagctttggaccatggttcactttctcgtgcccggcatttcacgcccttacctatcttcaccactgcgcgcccctagcgaagaaagccaggattactaccataaagtggttatacggctgcaccgggttacccagcccttcattctgcgccggaccaaacgagatgttgaaaaacagctaactaagaagtatgaacacgtgctgaagtgtcgtctgagcaaccggcagaaagctttgtatgaggatgttatcctccaaccagggactcaggaggcacttaagtctggccacttcgtgaacgtcctttcaattctcgtgcggttgcagaggatctgcaaccatcccggactggtggagcctagacaccccgggtcttcctacgtggcagggccccttgaatatccatctgcgtcgctcattctcaaggccctggagcgtgacttctggaaggaagccgatctgtccatgtttgatctgattggactggagaacaaaatcacaaggcacgaggctgagctgctctcaaaaaagaagattccgagaaaactgatggaggaaatttcaacaagcgccgctcctgccgcacgccctgccgctgcaaagctcaaagccagcaggcttttccagcctgtgcagtacggacagaaacccgagggaagaacagtggcttttccatcaactcatccacctcggacggctgcacctaccaccgcttcagctgctccccaggggcccttgaggggacggccccccattgcgaccttttcggccaatccggaggccaaggcagccgccgccccatttcaaacttctcaggcctctgcctcagcgcctagacaccagcccgccagtgccagtagcactgccgctagcccagctcatcctgcgaaacttcgcgctcagactactgcccaggcctcgaccccaggccagcctccaccccagccccaggccccctctcatgcagctggccagagcgcattgccacagcggcttgtgttgccatcacaggcacaggcacggctgcccagcggtgaggtggttaagatcgcgcagcttgcctctattaccggcccgcaatcacgcgttgctcagcctgaaacacccgtgactttgcagttccagggtagcaagtttactttgtcccactcacagcttagacagttaactgccgggcagccactgcagcttcaggggagtgtgctgcagatagttagtgctccaggacaaccttatctgagggctcccgggcccgtggtgatgcaaaccgtttcacaggcgggggcagtccacggcgccttaggctccaagccgccggcaggtggcccctcgcccgctcctttaactccccaggtcggcgttccaggccgggtcgcagtgaacgcccttgccgtcggagaacctggcacagcctcaaagcctgctagccctatcggagggccaactcaagaagagaaaacccgactgttgaaagagcgcctagaccagatttatttggttaatgaacgccgatgttctcaggctcctgtctatggcagagatctgctgaggatctgtgccttgccttctcacggaagggtacaatggagaggctcgctcgacggaaggagagggaaggaggccggccctgcccactcgtatacatcatccagcgagagccccagcgaactaatgctgactctgtgccgctgcggtgaatcactgcaggacgtgatcgatagagttgcgttcgttattccccctgtcgtagccgcaccaccttctctaagggtgccgcgaccgcctccactgtactctcatcgtatgcgcattctgcggcagggactccgcgagcatgccgccccatattttcagcagttacggcaaacgaccgctcctaggctcctgcagtttcccgagttgcgcctcgtgcagttcgacagcggcaagcttgaggcgttggcgatactcttgcagaagctgaagtcggagggccggcgcgttctgatactgtcacaaatgattcttatgttggacattctcgaaatgttcttaaacttccattatctgacctatgtcagaattgacgagaatgcatcatccgagcagcgtcaagagctaatgaggtcattcaaccgcgaccgcaggatcttttgcgcaattctcagcacacattctcgcaccaccggtatcaacctcgttgaagctgacacagtcgtcttctacgataatgatctgaatccggtgatggacgccaaggcccaggaatggtgcgatcggattggccggtgtaaggatattcatatttaccggttagtctcaggcaatagcattgaagagaaactcctgaaaaacggcacaaaagacctgatcagagaggtggccgcacagggtaacgactactctatggcgttcctcactcagcggacaatccaggagctgttcgaggtgtactcacctatggacgacgccggtttccccgtcaaggccgaagaattcgtcgttctcagccaggaaccaagtgtcacagaaactatagcccctaagattgcccgcccctttattgaagccctgaagtctattgagtatctggaagaagacgcccagaagagcgcccaggagggggttctgggtcctcacacagatgcattgtcttcagattccgagaacatgccgtgtgatgaagagccctcccaactggaggaacttgcagactttatggagcagttgactcctatcgagaaatatgccctaaactacctggaattatttcataccagtatcgagcaggagaaagaacgaaactctgaggatgcagtcatgaccgctgttcgggcgtgggagttttggaacctgaaaacgctccaggagcgtgaggctcggctccgcttagaacaagaagaggccgaattgctgacttacaccagggaggatgcatatagtatggagtatgtgtacgaagatgtggacgggcaaaccgaggtgatgcctttatggacaccacccacacctccgcaagacgattctgacatttatctggatagtgtgatgtgcctgatgtacgaggctacgcctatcccagaggccaagctccctccggtgtatgtgcgcaaggaacgcaagcgtcacaagacagatccttctgctgccgggcgaaagaagaaacaacgccatggcgaggctgtcgtcccaccacggtccctgtttgacagagcaacacccggactgctgaagatccggagggaaggtaaagagcagaagaaaaacatcctgctgaagcagcaggtgccatttgctaaacccttaccaactttcgccaaacccacagcagagcctggacaagacaatccagagtggctaatctccgaggactgggccctactgcaggcagtaaagcagctcctggagctcccgctcaatctgaccatcgtgtcaccagcccacacgcctaattgggatctggtgtctgacgttgtgaacagctgttccaggatctatagaagctccaagcagtgtcgaaataggtacgagaacgttataatccctcgagaagaagggaaatctaagaacaaccgtcccctacgtaccagtcagatttacgcccaagacgaaaatgcaacacatacccaattgtatacaagccattttgacctgatgaaaatgaccgccggaaagcgatcacctccaataaagccgctgctcgggatgaatccctttcagaaaaacccaaagcacgcgtctgtcctggctgagtccggcataaactatgataaaccactgccccctattcaagttgccagcctcagagccgaacgtatcgcaaaagaaaaaaaagctctagccgatcagcaaaaggctcagcagccagctgtggcccagccaccaccccctcagccccagcctccaccgccaccccaacaacccccccctcctcttccacagcctcaagctgcagggagtcagcccccagctggtccacctgcggtgcagccccaaccccaaccccaaccacaaactcagccccagccagtgcaagcacccgcaaaggcacagccagctatcacaaccggaggttcagcggctgtgttagcagggacaatcaaaactagcgtcactggcaccagcatgccaacgggcgccgtgagtggaaatgtgattgtgaatacaatcgccggcgtcccagctgccactttccagagtatcaataaaaggctagcatcacctgtcgcgcccggggccctaactactcccggcggctcagcccctgcccaggtggttcatacacagccccctcctcgggcagtgggaagcccagccacagcaacacccgacctcgtctccatggccacaactcagggcgtgagggcagtgaccagcgttacagcaagcgcagttgttaccactaatctaacccccgtccaaacaccggcccgcagcttagtgccacaggtgtcccaggccacgggcgttcaactgccgggcaagacaatcactccagctcacttccagctgctgcggcagcagcaacagcaacagcagcagcagcagcagcagcagcaacaacagcagcagcagcagcagcaacagcagcaacagcagcagcagaccacgacgaccagtcaagtgcaggtgccacagattcaggggcaagcacagagccccgcgcagatcaaagcagtggggaagttgactcctgagcatctgattaaaatgcaaaaacagaagctgcagatgcctccacagcctccacccccacaggcacagtctgcccccccacagcctacggcacaggtgcaggtgcagacatcccagcccccgcagcagcaatcacctcagctgacaacagttacagcccctaggccgggagccctcctcacagggactactgtcgccaatttgcaagttgcccggttgactcgcgtcccaacatctcagctgcaggcccaggggcagatgcagacccaagctccgcagcctgctcaggtagctctcgccaagcctccagtggtgtcagtcccagccgctgttgtgtccagtcctggtgtgacaaccttgcccatgaacgttgcgggaatctccgtagctattggccaaccccaaaaagccgccggccaaactgtcgtagcacagcccgtccacatgcagcagttgcttaagctgaaacagcaggccgtgcaacagcagaaagccatccagccccaggcagctcaaggccccgcagccgtgcagcagaagataacagcacagcagattaccacaccgggcgcccagcagaaagtagcgtacgctgcccagcccgcactcaagacccagttcctgactacccccataagtcaggcacagaaattggccggtgcacagcaggtgcagacgcagattcaggtggcaaaacttcctcaggttgtccagcagcagacacctgtcgcttctatacaacaggtcgcctccgcctctcagcaggcttcgccacagactgttgcccttacgcaggctaccgccgcggggcagcaggtacagatgattcctgccgtgaccgctactgcccaggtcgtccagcagaaattaattcaacagcaggttgtcaccactgcctccgcaccactccagacccctggcgctccaaatccagcccaagtcccagcaagttctgatagccccagtcagcagccaaaactgcagatgagggtgcccgctgttagactgaaaacccccactaagccaccctgtcaatag

SEQ ID NO: 186555 - DNA, 2475 bp, Artificial Sequence
  derived and/or modified sequence
atgcaccacggaactggccctcagaatgtgcagcaccagttacagaggtcaagggcctgccctggaagcgagggggaagaacagccggcacaccccaacccaccacctagcccagccgcccccttcgcccccagcgcctccccttctgccccacagagccccagctatcagatccagcagctcatgaacagatctcctgccaccgggcagaacgtgaacatcacccttcagtctgtgggccccgtggtcggggggaaccagcagataactctggccccactaccactgccttcacccacgtcccccggtttccaattcagcgcccaacccaggagatttgaacatggctcaccatcctacattcaggtgaccagccctttaagtcaacaggttcaaacccaaagccctacccagccgagcccagggcctgggcaggctctacagaacgtgagggctggggcccccgggccgggcctgggtctctgctcctcttccccaaccggcggatttgtggacgcgagtgtactggtcaggcagatctcgctttctccctcctctggcggccacttcgtgtttcaggatgggtctggcctgactcaaatcgcccaaggggcccaggtgcagcttcaacaccccggtacgcctatcaccgtaagggagaggcgcccctctcaaccacatacacagtcaggcgggactattcaccacttgggccctcagtccccggctgctgctggaggcgccggccttcagcccctcgcgagcccttcacatatcacaactgccaaccttccccctcagatttctagcataattcagggacaattagtgcagcaacagcaggtcctgcaaggacccccactccctcggccattaggttttgagaggactccgggtgtgttgctgcccggggcggggggcgccgcaggtttcgggatgactagcccgccgcctcctacttctccaagcaggacagccgtgcctcctggcttgtcaagtctccctctgactagtgtgggcaatactggtatgaaaaaggtccccaaaaaattagaagaaattccgcccgcctctcctgagatggcgcaaatgcgcaagcagtgtttagactatcactatcaagagatgcaagcactaaaggaggtttttaaagaatacctgatagagcttttttttctgcagcactttcaggggaacatgatggacttcctggcgttcaaaaagaaacactatgccccactgcaggcttatcttaggcagaacgacctagacatcgaagaggaggaggaggaggaggaggaagaagaggaaaagtccgaggtcatcaatgacgaacaggcactcgcggggagcctcgtggcgggggcaggttctactgtcgagaccgacctgttcaagcgccaacaggccatgcccagcactggaatggccggcggtatgcccccaaccccacaggcggcacagcttgcggggcagcggcaatcccagcagcagtacgatcccagcaccgggccacccgtccaaaatgctgcctctctgcatactcccctgccccaactgccgggccgcctacctcctgccggggttccaacagcagccctcagctctgcacttcagtttgcccagcagccccaggtggtagaggctcaaacccagttgcagattccagtgaaaacacagcaacctaatgttcctatccccgcgcctcccagttcacaattgccaattccaccatctcagcctgcccagctggccctccatgtccccacaccaggcaaagtgcaagtccaggcctcccaactgtcctcccttccccagatggtggctagcacgcgcctcccagtcgaccctgcacctccatgtcccaggccgctccctactagttccacctctagcttagcacctgtctccggctcagggcctggcccttcaccagcccgatcatcacccgtaaatagacccagttctgctaccaacaaggccttgtcacctgtgacttcaaggacaccaggggtggtggcttcggcgccgacaaagcctcagtcacccgctcagaacgccacctcaagtcaagactcctcacaggacactctgaccgagcagataacactggagaatcaggttcaccagagaattgcagagctacggaaggcgggcctgtggtcacagaggagactgccaaaactgcaggaggctccccggccaaagagccactgggattatctgcttgaggaaatgcagtggatggccactgacttcgcgcaggagcggcgttggaaagtggcagccgcaaagaagctggttcgcactgtggtgcgtcatcacgaagagaaacagctgagggaggaacggggaaagaaggaggagcaatcaaggctacggcgaattgccgccagcactgctagggaaattgaatgtttctggtcgaacatagagcaggttgtagaaatcaagctgcgggtggagctggaatag

SEQ ID NO: 186556 - DNA, 9372 bp, Artificial Sequence
  derived and/or modified sequence
atgcaccacgggaccgggcctcaaaacgtacagcatcagctccagagatcgagagcatgtcctgggagcgagggcgaagaacaaccagcccatccaaatcctcctccctctcccgcagccccctttgcaccaagtgcttcgccgtcagctccccagagtcccagctaccagattcaacaattgatgaaccgatcacctgccactgggcagaatgtcaatatcactttgcagtccgtcggacctgtagtcggggggaaccaacaaatcaccctggccccactccctttaccctctccaacatcccccggcttccagttctcagcacagccgagacggtttgagcacgggtcaccgtcttacattcaggtaacgtccccacttagtcagcaggtgcaaacccagtctcccacccaaccgtctcctggccctgggcaggctctgcagaatgtcagggcaggggccccgggcccaggcctgggcttgtgtagtagctccccaaccggcggcttcgtggatgccagcgtgctggtgcggcagatttctctgtccccatccagtggcggacactttgttttccaggatggttcgggactaacacagatcgcgcagggagcccaggtgcagctgcagcaccctggcacgcccatcactgtccgcgaacgtcgcccatcccagccacatacccaatctggcgggaccattcatcacctcggaccccagagcccggccgccgccggcggagccgggctacagccactggcgtccccaagtcatatcaccacggctaatctcccaccgcagatttccagcattattcaaggtcaattggttcagcagcagcaggtcttgcagggccccccccttccacggcctctcggcttcgaacgtacccccggagtgctcttaccaggggcaggaggggctgccgggttcggcatgacatctccaccaccgcccacctcaccgtctcgcactgccgtgccacccggcctgagttcgctgcccctaacatccgtggggaacaccggcatgaaaaaagttcccaaaaaactggaagagatacctcctgcttcacccgagatggcacaaatgaggaagcagtgcctagattatcattatcaggagatgcaggccctgaaggaggtgttcaaggagtatcttattgaactatttttcctgcagcattttcaaggcaatatgatggattttctcgcatttaaaaagaaacactatgcaccgttgcaggcctatctgcgccagaatgacctcgacatcgaggaagaagaagaggaggaggaggaagaagaagaaaagtcagaggtgataaatgacgaacagcaggccttggccggctcacttgtcgctggcgctggttcaacagttgaaaccgatctgttcaagcgccagcaggcaatgccatcaaccggcatggcagaacagtccaagcgaccaaggctggaagtggggcatcagggggttgtttttcagcaccccggcgcagatgcaggcgttcctctgcaacagctcatgcctaccgctcagggaggaatgcctcctacgcctcaagctgctcagctcgccgggcagaggcagtcacagcagcagtatgatccgagtacaggtcctccagtacagaatgcggcttcgctccacacacctctgccccaactgcctggacggctgccccctgcaggagtccccaccgctgctctgtcatcagccctccaatttgcacagcagcctcaggtcgtagaagctcaaacccaactgcagatcccagtgaaaacccagcagccaaatgtgccaatccctgccccaccttctagccagctccctattcccccatcccagcctgcacagctggcactgcatgtcccaacacccggtaaagttcaggtacaagccagtcagctgtccagtctgcctcagatggtggctagtacccgactgcccgttgatcccgcccccccctgtcccaggcccctccctacctccagtaccagctctctagctcctgttagcggctctggtcctggcccttcaccggctcgcagttctcctgtgaacagaccctcttctgcaactaataaagcgctttccccagtgacctcaagaactccgggtgttgtcgccagcgcccctaccaagccacagagcccagctcagaatgccacaagcagccaggattccagtcaggacactcttacagagcagatcaccctagagaaccaggtgcatcagcgtattgctgagctgcgcaaggccggcctatggtctcaacggcggctccccaaactgcaggaggccccccggcctaagagccattgggattacctgttagaggaaatgcagtggatggctacggattttgctcaggagcggcggtggaaggtagcagcagctaaaaagttagtgcggactgtggtccggcaccacgaagaaaaacagcttcgagaagagcgaggcaagaaagaagaacaaagcaggctcaggcgaatcgctgcctcaactgccagagagatcgaatgcttttggagcaacattgagcaagtcgtggagattaagctaagggtggagctcgaggaaaaaagaaaaaaggcattgaatcttcagaaggtgtcccggcgcgggaaggagctgaggccaaaggggttcgacgccttgcaggaaagcagccttgatagtggcatgagtggaagaaagaggaaagcaagcatttctttgactgacgacgaagtggacgacgaggaggagactatcgaggaggaggaagccaacgagggcgtggtcgaccaccagactgagctgtcgaaccttgccaaagaagctgagctgcccctgctcgatctgatgaagctgtacgagggcgcctttctcccaagcagccaatggcctcggcccaaacctgacggtgaggatacatccggagaggaagacgccgacgactgcccgggcgatcgagagtcccgcaaggacctggtgctgatagattcacttttcatcatggatcagtttaaggcagctgaaaggatgaatatcggcaaaccaaatgctaaggacatcgctgatgtgaccgcggtcgctgaagctattctgcccaagggctctgccagggtaaccacatccgttaagtttaacgcaccatccctgttatacggcgctctgagagattaccaaaagatcgggttagattggctggctaaactatataggaagaacttgaacggtatcctagcagatgaggctggcctgggaaagaccgttcagattatcgcatttttcgcacatttggcctgcaacgaaggcaactggggccctcatctcgttgttgtgaggtcatgcaatatcctcaaatgggagcttgagctcaagagatggtgtcctggattaaagatactcagttacattggcagccaccgagagctgaaagctaaacgacaagagtgggccgaacctaactcatttcatgtgtgcattacgagttacactcagttcttcaggggtctcacggcctttacgcgtgtgcgatggaagtgcttagtgattgatgagatgcagcgagtgaagggcatgacagagaggcactgggaggccgttttcacgctccagtcacagcaaaggctgctgctgatcgattctcctctgcacaacacttttctagagttgtggactatggtacacttcctcgtgcctgggatttcccgcccctatctgtcctcccctttacgggccccatctgaagagtcccaggattactaccacaaagtcgtgatacgcctccatagggtcactcaaccatttattctgcgccggactaagcgggatgtcgaaaaacagttaactaaaaagtacgaacacgtgttaaagtgccgactttctaaccgtcagaaggctctgtacgaagacgtgatccttcagccagggacacaggaagccctgaaaagcggccatttcgtgaacgtgttaagcattctagtgaggctgcagcgcatctgtaatcacccaggactggtggagccaagacatccaggatcaagttacgttgccgggcccttggaatacccttctgcgagcttgatcctcaaggctctggagcgagacttctggaaggaggctgatctttctatgtttgatcttatcggactggagaataaaattacacgacatgaagccgaactgctgagtaaaaagaagatcccgcgcaagctcatggaggagatatccacctccgccgctcccgctgcccgcccagccgctgcgaagcttaaagctagcaggttgttccaaccagtccagtacgggcaaaaacctgaagggagaacagttgccttcccctctactcacccccctaggaccgctgcaccgaccaccgcctctgccgccccccagggacctttaagaggccgcccccccattgccaccttcagcgccaatcccgaggccaaggcggctgcagccccctttcagaccagtcaagcatcagcgtctgctccgcggcaccagcctgccagtgcgtccagcactgccgctagtcccgcgcatcccgccaaattgcgagctcaaaccaccgcccaggcctcaaccccaggacagcccccccctcaacctcaggctccgtctcacgcagctggacaatctgctttaccacaaagactggtgctgcctagtcaggcccaagcacgcctccccagcggggaagtggtcaagattgcccaacttgcttctattactggcccccaatctcgcgtggctcagccagaaacacccgtgacgcttcagtttcagggaagcaaatttacattgtctcattctcagctcagacaactgacggccggacaacccctccagctgcagggaagcgtcttgcagattgtatctgccccaggtcagccataccttcgagccccgggccccgtcgtgatgcagactgtgtcccaggccggggctgtgcatggtgctctcggaagcaaaccgcctgcagggggcccatcacccgcgcctcttaccccgcaggtgggagtacctggcagggtggcagtcaatgcactggcagtcggagagcccggtaccgcttctaagcccgcaagcccaatcggtgggcctacacaagaggaaaagacacgcctgctaaaagagcgattagatcagatatatctggtcaacgagagaagatgtagccaagccccagtgtacggccgggacctcctcaggatctgcgcactgccctctcacgggcgcgtgcagtggcggggcagcctggacgggcgaagaggaaaagaggctggccccgcacactcctacacgtctagctcagagagccccagtgaactcatgctcaccctttgcaggtgcggtgagtccctgcaagatgttattgacagggtagccttcgtcatccctccagtcgtcgctgcacctccaagtcttcgggtcccacggcccccccccctttactcacataggatgaggattttaagacagggcctgcgggagcatgctgcgccctatttccagcaactgcgtcagacgactgccccccgactgctgcagtttcccgagttgagactcgtgcagttcgactccggcaagctcgaggccctggcgattttgcttcaaaagctgaaatctgaaggcagaagggttctcatcctcagccagatgatccttatgctggatattttagagatgtttttaaatttccattatctgacttacgtgagaatcgacgagaacgctagctctgaacagcgccaggaattaatgcgctcctttaacagggataggaggatcttctgtgccattctgtcaacgcattcccgcacaactggaatcaacctggtggaagccgacacggtggtcttttatgacaatgacctgaacccagtcatggatgctaaggcacaggagtggtgcgaccggatcggacggtgcaaagacattcacatctatcggctggtctcgggcaactcgatagaagaaaagctgctcaagaacggcaccaaagacttgatcagagaggtggctgcacagggaaacgactatagtatggcttttctgacacagcgaacgatacaagagctgttcgaggtttatagcccaatggacgatgccggctttcctgtcaaagcagaggaattcgtcgtgctcagtcaggagccgagcgtgaccgaaacaatcgctcctaaaattgccaggccctttatcgaggccctgaaaagcatcgagtatctggaggaagatgctcagaaatcagcccaggaaggtgtgttaggcccccacaccgatgccctcagcagcgacagtgaaaacatgccctgcgatgaggagccttctcaattggaggagctggcagacttcatggagcagctcacccccattgaaaaatatgccctgaactaccttgagttgttccacactagtattgagcaggaaaaagagcggaactcagaagacgcagtaatgactgcagtacgcgcgtgggaattctggaacctgaaaacgctacaggaaagggaggcacgattaagactagaacaggaggaggccgagctcttgacatatactcgtgaagacgcctattcaatggaatacgtgtatgaggacgtggacggacagacggaggtgatgccactctggaccccacctaccccccctcaggacgactctgatatttatcttgacagcgtcatgtgtctgatgtacgaggccacaccaattcccgaggcgaaactcccccctgtgtatgtcaggaaagagcggaaacgccataagactgatccctctgcagctggaaggaagaagaagcagcgtcatggggaggcggtcgtcccaccacgctctctgtttgatcgcgctacgccaggactcctgaagatccgacgcgaaggaaaggagcaaaagaagaatatcctcctgaaacagcaagttcctttcgctaagccccttccaacctttgcaaagcccacagcagaacctggccaggacaacccagaatggctgatttctgaagactgggctctcctgcaggccgtgaagcaactgttagaacttcctttaaacctgacaattgtcagccctgcccataccccaaattgggacctggtgagtgacgtggtgaattcctgtagcaggatatatcggagtagtaaacagtgcagaaatagatatgagaacgttattattcctcgagaagaaggcaagagcaaaaataataggccgcttagaaccagccagatttacgctcaggatgaaaatgcaacccacacacagctgtatactagccacttcgatctcatgaaaatgaccgccggaaagagatcaccgcctatcaagcctttgttgggcatgaatccctttcagaagaatcctaagcacgcgtccgtgctggcggagtccgggataaactacgacaagcccttacctcccatacaggtcgccagcttgcgcgctgaaaggatcgcaaaggaaaagaaggccctcgccgaccagcagaaagcacaacagccagctgtcgcccagcctccccccccccagccacaacccccacccccaccacaacagcccccacctcccttaccacagcctcaggcggctggctcacagccccctgctggacctccagctgtacagccccagccgcaacctcagccccagacacaacctcagcccgtgcaggcccccgctaaggctcaacccgctatcaccaccggcggaagtgctgctgtgctggctggcactattaaaaccagtgtgacaggcacgagtatgccaactggagcagtgtcaggtaatgtcatagtcaacaccatcgctggcgtgcctgcagcaacatttcagtccatcaataaaagactggctagtcccgtggctcccggcgctcttacaacacccggcggcagtgcaccagcccaagtcgtccacacccaacccccaccccgcgccgtagggtccccggccaccgccaccccggacctggtgtcaatggctacaacccagggggtaagagcagttacttctgtgactgcatccgctgtggtcaccacaaacctgacaccagtccagactcctgccaggagccttgtccctcaggtctcccaggccaccggagtgcagctgccagggaagactataacacctgcccactttcagctcctgcggcaacagcagcagcaacaacagcaacagcagcagcaacagcagcagcagcaacagcagcagcagcaacagcagcagcagcagcagcagactacaactaccagtcaagtgcaggtgcctcagatccaggggcaagcacaatcacccgcacagattaaggctgtcggcaaactcacccccgagcacctgattaaaatgcagaagcagaagttgcagatgccgcctcagccgcctccgcctcaggcccagtccgctccaccccagccaacagctcaggtccaggtgcaaacatcccagccgcctcaacaacagtccccccagttgaccaccgttactgcgcctagacctggtgcacttctcaccggcaccaccgtcgccaatttacaggttgcccgtctgactagggtgccaacatcgcagttacaggcacagggacagatgcagacacaggcccctcagcccgctcaggttgccttagccaagcctccggtggtgtcggttcccgcagccgtggtgtcctctcccggagtaacaactcttccaatgaacgtagctgggatctccgtcgcgatcggccagcctcagaaggcagccggccagacagtggtggcccagcccgttcacatgcaacagctgctcaagctgaagcagcaggctgtgcagcaacaaaaggccatccagccacaagctgcgcagggaccagccgcagtgcagcagaagattaccgcccagcagatcaccaccccaggagcacagcagaaagtagcctacgccgcccaaccagctctgaaaacccaatttctgaccaccccgataagtcaggcccagaagctggccggagcccagcaggtacagacacagatacaggtggctaagctaccccaggtggtgcagcaacaaacaccagtcgcatcgattcagcaggtcgcaagtgcgtcacagcaggctagcccccagactgttgccctcacccaggcgaccgccgctggccagcaggtgcagatgattcctgcagtcaccgccacagctcaagtggtccagcagaagttaatccaacaacaagtggtaactaccgcttccgcacctcttcagacaccaggggccccgaatcccgcccaagtccctgcaagcagtgactctccaagccagcaacccaaactccagatgcgcgtgcccgccgtgcggctcaagacacctaccaagccgccgtgccagtag

SEQ ID NO: 186557 - DNA, 9129 bp, Artificial Sequence
  derived and/or modified sequence
atgcaccacggcaccggcccccagaatgtgcagcaccagctgcagaggagccgggcctgccccggcagcgagggggaggagcagcctgcccaccccaaccccccacccagccctgctgccccctttgcccccagcgccagccccagcgccccccagagccccagctaccagatccagcagctgatgaacagaagccctgccaccggccagaatgtgaacatcaccctgcagagcgtgggccctgtggtgggcggcaaccagcagatcaccctggcccccctgcccctgcccagccccaccagccctggcttccagttcagcgcccagcccaggagatttgaacatggcagccccagctacatccaggtgaccagccccctgagccagcaggtgcagacccagagccccacccagcccagccctggccctggccaggccctgcagaatgtgcgggccggggcccctggccctggcctgggcctgtgcagcagcagccccactggaggctttgtggatgcctctgtgctggtgcggcagatcagcctgagccccagcagcggcggccactttgtgttccaggacggcagcggcctgacccagatcgcccagggcgcccaggtgcagctgcagcaccctggcacccccatcaccgtgcgggagcggcggcccagccagccccacacccagagcggcggcaccatccaccacctgggcccccagagccctgctgctgctggaggagctggcctgcagcccctggccagccccagccacatcaccacagccaacctgcccccccagatcagcagcatcatccagggccagctggtgcagcagcagcaggtgctgcagggcccccccctgccccggcccctgggctttgagaggaccccaggagtgctgctgcctggagctggaggagctgctggcttcggcatgaccagccccccaccacccaccagccccagcaggacagctgtgcccccaggcctgagcagcctgcccctgacctctgtgggcaacacaggcatgaagaaggtgcccaagaagctggaggagatccccccagccagccctgagatggcccagatgaggaagcagtgcctggactaccactaccaggagatgcaggccctgaaggaggtgttcaaggagtacctgattgagctgttcttcctgcagcacttccagggcaacatgatggacttcctggccttcaagaagaagcactacgcccccctgcaggcctacctgcggcagaatgacctggacatcgaggaggaggaggaggaggaggaggaggaggaggagaagtctgaggtgatcaatgatgagcagcaggccctggccggcagcctggtggccggggccggcagcacagtggagacagacctcttcaagaggcagcaggccatgcccagcacaggcatggccgagcagagcaagaggccccggctggaggtgggccaccagggcgtggtgttccagcaccctggagcagatgctggggtgcccctgcagcagctgatgcccacagcccagggcggcatgccacccaccccccaggccgcccagctggccggccagaggcagagccagcagcagtatgaccccagcacaggcccccctgtgcagaatgctgccagcctgcacacccccctgccccagctgcccggccgcctgcccccagctggggtgcccacagctgccctgagcagcgccctgcagtttgcccagcagccccaggtggtggaggcccagacccagctgcagatccctgtgaagacccagcagcccaacgtgcccatcccagccccacccagcagccagctgcccatcccccccagccagcctgcccagctggccctgcacgtgcccacccctgggaaggtgcaggtgcaggccagccagctgagcagcctgccccagatggtggccagcacccggctgcctgtggaccctgccccaccctgcccccggcccctgcccaccagcagcaccagcagcctggcccctgtgtctggcagcggccctggccccagccctgcccggagcagccctgtgaaccggcccagcagcgccaccaacaaggccctgagccctgtgaccagcaggaccccaggagtggtggccagcgcccccaccaagccccagagccctgcccagaatgccaccagcagccaggacagcagccaggacaccctgacagagcagatcaccctggagaaccaggtgcaccagagaattgctgagctgaggaaggccggcctgtggagccagaggcggctgcccaagctgcaggaggccccccggcccaagagccactgggactacctgctggaggagatgcagtggatggccacagactttgcccaggagcggcgctggaaggtggccgccgccaagaagctggtgaggacagtggtgcgccaccacgaggagaagcagctgcgggaggagcggggcaagaaggaggagcagagccggctgcggagaattgctgccagcacagcccgggagattgagtgcttctggagcaacatcgagcaggtggtggagatcaagctgcgggtggagctggaggagaagaggaagaaggccctgaacctgcagaaggtgtccagaagaggcaaggagctgcggcccaagggctttgatgccctgcaggagagcagcctggacagcggcatgagcggcaggaagaggaaggccagcatcagcctgacagatgatgaggtggatgatgaggaggagaccatcgaggaggaggaggccaatgaaggagtggtggaccaccagacagagctgagcaacctggccaaggaggccgagctgcccctgctggacctgatgaagctgtatgagggcgccttcctgcccagcagccagtggccccggcccaagccagatggagaggacaccagcggggaggaggatgctgatgactgccctggggaccgggagagcaggaaggacctggtgctgattgacagcctcttcatcatggaccagttcaaggctgctgagaggatgaacatcggcaagcccaatgccaaggacattgctgatgtgacagctgtggccgaggccatcctgcccaagggcagcgcccgggtgaccacctctgtgaagttcaatgcccccagcctgctgtatggagccctgcgggactaccagaagattggcctggactggctggccaagctgtacaggaagaacctgaatggcatcctggctgatgaggccggcctgggcaagacagtgcagatcatcgccttctttgcccacctggcctgcaatgaaggcaactggggcccccacctggtggtggtgcgcagctgcaacatcctgaagtgggagctggagctgaagcgctggtgccccggcctgaagatcctgagctacatcggcagccaccgggagctgaaggccaagaggcaggagtgggccgagcccaacagcttccacgtgtgcatcaccagctacacccagttcttccggggcctgacagccttcaccagggtgcgctggaagtgcctggtgattgatgagatgcagagggtgaagggcatgacagagcggcactgggaggccgtgttcaccctgcagagccagcagaggctgctgctgattgacagccccctgcacaacaccttcctggagctgtggaccatggtgcacttcctggtgcccggcatcagccggccctacctgagcagccccctgcgggcccccagcgaggagagccaggactactaccacaaggtggtgatccggctgcaccgggtgacccagcccttcatcctgcggaggaccaagagagatgtggagaagcagctgaccaagaagtatgagcacgtgctgaagtgccgcctgagcaaccggcagaaggccctgtatgaagatgtgatcctgcagcccggcacccaggaggccctgaagagcggccactttgtgaatgtgctgagcatcctggtgcggctgcagaggatctgcaaccaccctggcctggtggagcccaggcaccctggcagcagctatgtggccggccccctggagtaccccagcgccagcctcatcctgaaggccctggagcgggacttctggaaggaggccgacctgtccatgtttgacctgattggcctggagaacaagatcaccaggcatgaagctgagctgctgagcaagaagaagatccccaggaagctgatggaggagatcagcaccagcgctgccccagctgcccggcctgctgctgccaagctgaaggccagccgcctcttccagcctgtgcagtatggccagaagccagagggccgcacagtggccttccccagcacccacccccccaggacagctgcccccaccacagccagcgctgccccccagggccccctgcggggccggccccccatcgccaccttcagcgccaaccctgaggccaagggcggggaggtggtgaagatcgcccagctggccagcatcaccggcccccagagccgggtggcccagcctgagacccctgtgaccctgcagttccagggcagcaagttcaccctgagccacagccagctgcggcagctgacagctggccagcccctgcagctgcagggctctgtgctgcagatcgtgtctgcccctggccagccctacctgcgggcccctggccctgtggtgatgcagacagtgtcccaggccggggctgtgcacggggccctgggcagcaagcccccagctgggggccccagccctgcccccctgaccccccaggtgggcgtgcccggccgggtggccgtgaatgccctggccgtgggggagcctggaacagccagcaagccagccagccccatcggcggccccacccaggaggagaagacccggctgctgaaggagcggctggaccagatctacctggtgaatgaaagacgctgcagccaggcccctgtgtatggccgggacctgctgcgcatctgtgccctgcccagccacggccgggtgcagtggaggggcagcctggatggaagaagaggcaaggaggccggccctgcccacagctacaccagcagcagcgagagccccagcgagctgatgctgaccctgtgccgctgtggggagagcctgcaggatgtgattgacagagtggccttcgtcatcccccctgtggtggccgccccacccagcctgcgggtgccccggcccccacccctgtacagccacaggatgaggatcctgcggcagggcctgcgggagcacgccgccccctacttccagcagctgcggcagaccacagccccccggctgctgcagtttcctgagctgcggctggtgcagtttgacagcggcaagctggaggccctggccatcctgctgcagaagctgaagtctgagggccggcgggtgctgatcctgagccagatgatcctgatgctggacatcctggagatgttcctgaacttccactacctgacctacgtgagaattgatgaaaatgccagcagcgagcagaggcaggagctgatgaggagcttcaacagagaccggcgcatcttctgtgccatcctgagcacccacagcaggaccaccggcatcaacctggtggaggccgacacagtggtgttctatgacaatgacctgaaccctgtgatggatgccaaggcccaggagtggtgtgacagaattggccgctgcaaggacatccacatctaccgcctggtgtctggcaacagcattgaggagaagctgctgaagaatggcaccaaggacctgatccgggaggtggccgcccagggcaatgactacagcatggccttcctgacccagaggaccatccaggagctgtttgaggtgtacagccccatggatgatgctggcttccctgtgaaggccgaggagtttgtggtgctgagccaggagcccagcgtgacagagaccatcgcccccaagatcgcccggcccttcatcgaggccctgaagagcattgagtacctggaggaggatgcccagaagagcgcccaggagggcgtgctgggcccccacacagatgccctgagcagtgacagcgagaacatgccctgtgatgaggagcccagccagctggaggagctggccgacttcatggagcagctgacccccatcgagaagtatgccctgaactacctggagctgttccacaccagcattgagcaggagaaggagaggaacagtgaagatgctgtgatgacagctgtgcgggcctgggagttctggaacctgaagaccctgcaggagcgggaggcccggctgcggctggagcaggaggaggccgagctgctgacctacaccagagaagatgcctacagcatggagtatgtgtatgaagatgtggatggccagacagaggtgatgcccctgtggaccccacccaccccaccccaggatgacagcgacatctacctggacagcgtgatgtgcctgatgtatgaggccacccccatccctgaggccaagctgccccctgtgtatgtgaggaaggagaggaagaggcacaagacagaccccagcgctgctggcaggaagaagaagcagagacatggagaggccgtggtgccccccaggagcctgtttgaccgggccaccccaggcctgctgaagatccggcgggagggcaaggagcagaagaagaacatcctgctgaagcagcaggtgccctttgccaagcccctgcccacctttgccaagcccacagctgagcccggccaggacaaccctgagtggctgatcagcgaggactgggccctgctgcaggccgtgaagcagctgctggagctgcccctgaacctgaccatcgtgtccccagcccacacccccaactgggacctggtgtctgatgtggtgaacagctgcagccgcatctaccgcagcagcaagcagtgcaggaacagatatgaaaatgtcatcatcccccgggaggagggcaagagcaagaacaaccggcccctgcggaccagccagatctatgcccaggatgaaaatgccacccacacccagctgtacaccagccactttgacctgatgaagatgacagctgggaagaggagcccccccatcaagcccctgctgggcatgaaccccttccagaagaaccccaagcacgcctctgtgctggccgagagcggcatcaactatgacaagcccctgccccccatccaggtggccagcctgcgggcagagagaattgccaaggagaagaaggccctggccgaccagcagaaggcccagcagcctgctgtggcccagcccccaccaccccagccccagcccccacctccaccccagcagcccccaccacccctgccccagccccaggccgccggcagccagcccccagctggccccccagctgtgcagccccagccccagccccagccccagacccagccccagcctgtgcaggccccagccaaggcccagcctgccatcaccaccggcggcagcgctgctgtgctggccggcaccatcaagacctctgtgacaggcacctccatgcccaccggggctgtgtctggaaatgtcatcgtgaacaccatcgccggcgtgcctgctgccaccttccagagcatcaacaagaggctggccagccctgtggcccctggggccctgaccaccccaggcggcagcgccccagcccaggtggtgcacacccagcccccacccagggctgtgggcagccctgccacagccaccccagacctggtgtccatggccaccacccagggcgtgcgggctgtgacctctgtgacagccagcgctgtggtgaccaccaacctgacccctgtgcagaccccagcccggagcctggtgccccaggtgtcccaggccaccggggtgcagctgcccgggaagaccatcaccccagcccacttccagctgctgcggcagcagcagcagcagcagcagcagcagcagcagcagcagcagcagcagcagcagcagcagcagcagcagcagcagcagcagcagcagaccaccaccaccagccaggtgcaggtgccccagatccagggccaggcccagagccctgcccagatcaaggctgtgggcaagctgaccccagagcacctgatcaagatgcagaagcagaagctgcagatgccaccccagcccccaccaccccaggcccagagcgccccaccccagcccacagcccaggtgcaggtgcagaccagccagcccccccagcagcagagcccccagctgaccaccgtgacagcccccaggcctggggccctgctgaccggcaccaccgtggccaacctgcaggtggcccggctgaccagggtgcccaccagccagctgcaggcccagggccagatgcagacccaggccccccagcctgcccaggtggccctggccaagccccctgtggtgtctgtgcctgctgctgtggtgagcagccctggggtgaccaccctgcccatgaatgtggccggcatctctgtggccatcggccagccccagaaggctgctggccagacagtggtggcccagcctgtgcacatgcagcagctgctgaagctgaagcagcaggccgtgcagcagcagaaggccatccagccccaggccgcccagggccctgctgctgtgcagcagaagatcacagcccagcagatcaccacccctggggcccagcagaaggtggcctatgctgcccagcctgccctgaagacccagttcctgaccacccccatcagccaggcccagaagctggccggggcccagcaggtgcagacccagatccaggtggccaagctgccccaggtggtgcagcagcagacccctgtggccagcatccagcaggtggccagcgccagccagcaggccagcccccagacagtggccctgacccaggccacagctgctggccagcaggtgcagatgatcccagctgtgacagccacagcccaggtggtgcagcagaagctgatccagcagcaggtggtgaccacagccagcgcccccctgcagacccctggggcccccaacccagcccaggtgcctgccagcagtgacagccccagccagcagcccaagctgcagatgagggtgcctgctgtgcggctgaagacccccaccaagccaccctgccagtag

SEQ ID NO: 186558 - DNA, 9261 bp, Artificial Sequence
  derived and/or modified sequence
atgcaccacggcaccggcccccagaatgtgcagcaccagctgcagaggagccgggcctgccccggcagcgagggggaggagcagcctgcccaccccaaccccccacccagccctgctgccccctttgcccccagcgccagccccagcgccccccagagccccagctaccagatccagcagctgatgaacagaagccctgccaccggccagaatgtgaacatcaccctgcagagcgtgggccctgtggtgggcggcaaccagcagatcaccctggcccccctgcccctgcccagccccaccagccctggcttccagttcagcgcccagcccaggagatttgaacatggcagccccagctacatccaggtgaccagccccctgagccagcaggtgcagacccagagccccacccagcccagccctggccctggccaggccctgcagaatgtgcgggccggggcccctggccctggcctgggcctgtgcagcagcagccccactggaggctttgtggatgcctctgtgctggtgcggcagatcagcctgagccccagcagcggcggccactttgtgttccaggacggcagcggcctgacccagatcgcccagggcgcccaggtgcagctgcagcaccctggcacccccatcaccgtgcgggagcggcggcccagccagccccacacccagagcggcggcaccatccaccacctgggcccccagagccctgctgctgctggaggagctggcctgcagcccctggccagccccagccacatcaccacagccaacctgcccccccagatcagcagcatcatccagggccagctggtgcagcagcagcaggtgctgcagggcccccccctgccccggcccctgggctttgagaggaccccaggagtgctgctgcctggagctggaggagctgctggcttcggcatgaccagccccccaccacccaccagccccagcaggacagctgtgcccccaggcctgagcagcctgcccctgacctctgtgggcaacacaggcatgaagaaggtgcccaagaagctggaggagatccccccagccagccctgagatggcccagatgaggaagcagtgcctggactaccactaccaggagatgcaggccctgaaggaggtgttcaaggagtacctgattgagctgttcttcctgcagcacttccagggcaacatgatggacttcctggccttcaagaagaagcactacgcccccctgcaggcctacctgcggcagaatgacctggacatcgaggaggaggaggaggaggaggaggaggaggaggagaagtctgaggtgatcaatgatgagcaggccctggccggcagcctggtggccggggccggcagcacagtggagacagacctcttcaagaggcagcaggccatgcccagcacaggcatggccggcggcatgccacccaccccccaggccgcccagctggccggccagaggcagagccagcagcagtatgaccccagcactggacctcctgtgcagaatgctgccagcctgcacacccccctgccccagctgcccggccgcctgcccccagctggggtgcccacagctgccctgagcagcgccctgcagtttgcccagcagccccaggtggtggaggcccagacccagctgcagatccctgtgaagacccagcagcccaacgtgcccatcccagccccacccagcagccagctgcccatcccccccagccagcctgcccagctggccctgcacgtgcccaccccaggcaaggtgcaggtgcaggccagccagctgagcagcctgccccagatggtggccagcacccggctgcctgtggaccctgccccaccctgcccccggcccctgcccaccagcagcaccagcagcctggcccctgtgtctggcagcggccctggccccagccctgcccggagcagccctgtgaaccggcccagcagcgccaccaacaaggccctgagccctgtgaccagcaggaccccaggagtggtggccagcgcccccaccaagccccagagccctgcccagaatgccaccagcagccaggacagcagccaggacaccctgacagagcagatcaccctggagaaccaggtgcaccagagaattgctgagctgaggaaggccggcctgtggagccagaggcggctgcccaagctgcaggaggccccccggcccaagagccactgggactacctgctggaggagatgcagtggatggccacagactttgcccaggagcggcgctggaaggtggccgccgccaagaagctggtgaggacagtggtgcgccaccacgaggagaagcagctgcgggaggagcggggcaagaaggaggagcagagccggctgcggagaattgctgccagcacagcccgggagattgagtgcttctggagcaacatcgagcaggtggtggagatcaagctgcgggtggagctggaggagaagaggaagaaggccctgaacctgcagaaggtgtcccggcggggcaaggagctgcggcccaagggctttgatgccctgcaggagagcagcctggacagcggcatgagcggcaggaagaggaaggccagcatcagcctgacagatgatgaggtggatgatgaggaggagaccatcgaggaggaggaggccaatgaaggagtggtggaccaccagacagagctgagcaacctggccaaggaggccgagctgcccctgctggacctgatgaagctgtatgaaggagccttcctgcccagcagccagtggccccggcccaagccagatggagaggacaccagcggggaggaggatgctgatgactgccctggggaccgggagagcaggaaggacctggtgctgattgacagcctcttcatcatggaccagttcaaggctgctgagaggatgaacatcggcaagcccaatgccaaggacattgctgatgtgacagctgtggccgaggccatcctgcccaagggcagcgcccgggtgaccacctctgtgaagttcaatgcccccagcctgctgtatggagccctgcgggactaccagaagattggcctggactggctggccaagctgtacaggaagaacctgaatggcatcctggctgatgaagctggcctgggcaagacagtgcagatcatcgccttctttgcccacctggcctgcaatgaaggcaactggggcccccacctggtggtggtgcgcagctgcaacatcctgaagtgggagctggagctgaagcgctggtgccccggcctgaagatcctgagctacatcggcagccaccgggagctgaaggccaagaggcaggagtgggccgagcccaacagcttccacgtgtgcatcaccagctacacccagttcttccggggcctgacagccttcaccagggtgcgctggaagtgcctggtgattgatgagatgcagagggtgaagggcatgacagagcggcactgggaggccgtgttcaccctgcagagccagcagaggctgctgctgattgacagccccctgcacaacaccttcctggagctgtggaccatggtgcacttcctggtgcccggcatcagccggccctacctgagcagccccctgcgggcccccagcgaggagagccaggactactaccacaaggtggtgatccggctgcaccgggtgacccagcccttcatcctgcggaggaccaagagagatgtggagaagcagctgaccaagaagtatgaacatgtgctgaagtgccgcctgagcaaccggcagaaggccctgtatgaagatgtgatcctgcagcccggcacccaggaggccctgaagagcggccactttgtgaatgtgctgagcatcctggtgcggctgcagaggatctgcaaccaccctggcctggtggagcccaggcaccctggcagcagctatgtggccggccccctggagtaccccagcgccagcctcatcctgaaggccctggagcgggacttctggaaggaggccgacctgtccatgtttgacctgattggcctggagaacaagatcaccaggcatgaggccgagctgctgagcaagaagaagatccccaggaagctgatggaggagatcagcaccagcgctgccccagctgcccggcctgctgctgccaagctgaaggccagccgcctcttccagcctgtgcagtatggccagaagccagagggccgcacagtggccttccccagcacccacccccccaggacagctgcccccaccacagccagcgctgccccccagggccccctgcggggccggccccccatcgccaccttcagcgccaaccctgaggccaaggctgctgctgcccccttccagaccagccaggccagcgccagcgcccccaggcaccagcctgccagcgccagcagcacagctgccagccctgcccacccagccaagctgcgggcccagaccacagcccaggccagcaccccaggccagcccccaccccagccccaggcccccagccatgctgctggccagagcgccctgccccagaggctggtgctgcccagccaggcccaggcccggctgcccagcggggaggtggtgaagatcgcccagctggccagcatcaccggcccccagagccgggtggcccagcctgagacccctgtgaccctgcagttccagggcagcaagttcaccctgagccacagccagctgcggcagctgacagctggccagcccctgcagctgcagggctctgtgctgcagatcgtgtctgcccctggccagccctacctgcgggcccctggccctgtggtgatgcagacagtgtcccaggccggggctgtgcacggggccctgggcagcaagcccccagctgggggccccagccctgcccccctgaccccccaggtgggcgtgcccggccgggtggccgtgaatgccctggccgtgggggagcctggaacagccagcaagccagccagccccatcggcggccccacccaggaggagaagacccggctgctgaaggagcggctggaccagatctacctggtgaatgaaagacgctgcagccaggcccctgtgtatggccgggacctgctgcgcatctgtgccctgcccagccacggccgggtgcagtggaggggcagcctggatggaagaagaggcaaggaggccggccctgcccacagctacaccagcagcagcgagagccccagcgagctgatgctgaccctgtgccgctgtggggagagcctgcaggatgtgattgacagagtggccttcgtcatcccccctgtggtggccgccccacccagcctgcgggtgccccggcccccacccctgtacagccacaggatgaggatcctgcggcagggcctgcgggagcacgccgccccctacttccagcagctgcggcagaccacagccccccggctgctgcagtttcctgagctgcggctggtgcagtttgacagcggcaagctggaggccctggccatcctgctgcagaagctgaagtctgagggccggcgggtgctgatcctgagccagatgatcctgatgctggacatcctggagatgttcctgaacttccactacctgacctacgtgagaattgatgaaaatgccagcagcgagcagaggcaggagctgatgaggagcttcaacagagaccggcgcatcttctgtgccatcctgagcacccacagcaggaccaccggcatcaacctggtggaggccgacacagtggtgttctatgacaatgacctgaaccctgtgatggatgccaaggcccaggagtggtgtgacagaattggccgctgcaaggacatccacatctaccgcctggtgtctggcaacagcattgaggagaagctgctgaagaatggcaccaaggacctgatccgggaggtggccgcccagggcaatgactacagcatggccttcctgacccagaggaccatccaggagctgtttgaggtgtacagccccatggatgatgctggcttccctgtgaaggccgaggagtttgtggtgctgagccaggagcccagcgtgacagagaccatcgcccccaagatcgcccggcccttcatcgaggccctgaagagcattgagtacctggaggaggatgcccagaagagcgcccaggagggcgtgctgggcccccacacagatgccctgagcagtgacagcgagaacatgccctgtgatgaggagcccagccagctggaggagctggccgacttcatggagcagctgacccccatcgagaagtatgccctgaactacctggagctgttccacaccagcattgagcaggagaaggagaggaacagtgaagatgctgtgatgacagctgtgcgggcctgggagttctggaacctgaagaccctgcaggagcgggaggcccggctgcggctggagcaggaggaggccgagctgctgacctacaccagagaagatgcctacagcatggagtatgtgtatgaagatgtggatggccagacagaggtgatgcccctgtggaccccacccaccccaccccaggatgacagcgacatctacctggacagcgtgatgtgcctgatgtatgaggccacccccatccctgaggccaagctgccccctgtgtatgtgaggaaggagaggaagaggcacaagacagaccccagcgctgctggcaggaagaagaagcagagacatggagaggccgtggtgccccccaggagcctgtttgaccgggccaccccaggcctgctgaagatccggcgggagggcaaggagcagaagaagaacatcctgctgaagcagcaggtgccctttgccaagcccctgcccacctttgccaagcccacagctgagcccggccaggacaaccctgagtggctgatcagcgaggactgggccctgctgcaggccgtgaagcagctgctggagctgcccctgaacctgaccatcgtgtccccagcccacacccccaactgggacctggtgtctgatgtggtgaacagctgcagccgcatctaccgcagcagcaagcagtgcaggaacagatatgaaaatgtcatcatcccccgggaggagggcaagagcaagaacaaccggcccctgcggaccagccagatctatgcccaggatgaaaatgccacccacacccagctgtacaccagccactttgacctgatgaagatgacagctgggaagaggagcccccccatcaagcccctgctgggcatgaaccccttccagaagaaccccaagcacgcctctgtgctggccgagagcggcatcaactatgacaagcccctgccccccatccaggtggccagcctgcgggcagagagaattgccaaggagaagaaggccctggccgaccagcagaaggcccagcagcctgctgtggcccagcccccaccaccccagccccagcccccacctccaccccagcagcccccaccacccctgccccagccccaggccgccggcagccagcccccagctggccccccagctgtgcagccccagccccagccccagccccagacccagccccagcctgtgcaggccccagccaaggcccagcctgccatcaccaccggcggcagcgctgctgtgctggccggcaccatcaagacctctgtgacaggcacctccatgcccaccggggctgtgtctggaaatgtcatcgtgaacaccatcgccggcgtgcctgctgccaccttccagagcatcaacaagaggctggccagccctgtggcccctggggccctgaccaccccaggcggcagcgccccagcccaggtggtgcacacccagcccccacccagggctgtgggcagccctgccacagccaccccagacctggtgtccatggccaccacccagggcgtgcgggctgtgacctctgtgacagccagcgctgtggtgaccaccaacctgacccctgtgcagaccccagcccggagcctggtgccccaggtgtcccaggccaccggggtgcagctgcccgggaagaccatcaccccagcccacttccagctgctgcggcagcagcagcagcagcagcagcagcagcagcagcagcagcagcagcagcagcagcagcagcagcagcagcagcagcagcagcagcagaccaccaccaccagccaggtgcaggtgccccagatccagggccaggcccagagccctgcccagatcaaggctgtgggcaagctgaccccagagcacctgatcaagatgcagaagcagaagctgcagatgccaccccagcccccaccaccccaggcccagagcgccccaccccagcccacagcccaggtgcaggtgcagaccagccagcccccccagcagcagagcccccagctgaccaccgtgacagcccccaggcctggggccctgctgaccggcaccaccgtggccaacctgcaggtggcccggctgaccagggtgcccaccagccagctgcaggcccagggccagatgcagacccaggccccccagcctgcccaggtggccctggccaagccccctgtggtgtctgtgcctgctgctgtggtgagcagccctggggtgaccaccctgcccatgaatgtggccggcatctctgtggccatcggccagccccagaaggctgctggccagacagtggtggcccagcctgtgcacatgcagcagctgctgaagctgaagcagcaggccgtgcagcagcagaaggccatccagccccaggccgcccagggccctgctgctgtgcagcagaagatcacagcccagcagatcaccacccctggggcccagcagaaggtggcctatgctgcccagcctgccctgaagacccagttcctgaccacccccatcagccaggcccagaagctggccggggcccagcaggtgcagacccagatccaggtggccaagctgccccaggtggtgcagcagcagacccctgtggccagcatccagcaggtggccagcgccagccagcaggccagcccccagacagtggccctgacccaggccacagctgctggccagcaggtgcagatgatcccagctgtgacagccacagcccaggtggtgcagcagaagctgatccagcagcaggtggtgaccacagccagcgcccccctgcagacccctggggcccccaacccagcccaggtgcctgccagcagtgacagccccagccagcagcccaagctgcagatgagggtgcctgctgtgcggctgaagacccccaccaagccaccctgccagtag

SEQ ID NO: 186559 - DNA, 9480 bp, Artificial Sequence
  derived and/or modified sequence
atgcaccacggcaccggcccccagaatgtgcagcaccagctgcagaggagccgggcctgccccggcagcgagggggaggagcagcctgcccaccccaaccccccacccagccctgctgccccctttgcccccagcgccagccccagcgccccccagagccccagctaccagatccagcagctgatgaacagaagccctgccaccggccagaatgtgaacatcaccctgcagagcgtgggccctgtggtgggcggcaaccagcagatcaccctggcccccctgcccctgcccagccccaccagccctggcttccagttcagcgcccagcccaggagatttgaacatggcagccccagctacatccaggtgaccagccccctgagccagcaggtgcagacccagagccccacccagcccagccctggccctggccaggccctgcagaatgtgcgggccggggcccctggccctggcctgggcctgtgcagcagcagccccactggaggctttgtggatgcctctgtgctggtgcggcagatcagcctgagccccagcagcggcggccactttgtgttccaggacggcagcggcctgacccagatcgcccagggcgcccaggtgcagctgcagcaccctggcacccccatcaccgtgcgggagcggcggcccagccagccccacacccagagcggcggcaccatccaccacctgggcccccagagccctgctgctgctggaggagctggcctgcagcccctggccagccccagccacatcaccacagccaacctgcccccccagatcagcagcatcatccagggccagctggtgcagcagcagcaggtgctgcagggcccccccctgccccggcccctgggctttgagaggaccccaggagtgctgctgcctggagctggaggagctgctggcttcggcatgaccagccccccaccacccaccagccccagcaggacagctgtgcccccaggcctgagcagcctgcccctgacctctgtgggcaacacaggcatgaagaaggtgcccaagaagctggaggagatccccccagccagccctgagatggcccagatgaggaagcagtgcctggactaccactaccaggagatgcaggccctgaaggaggtgttcaaggagtacctgattgagctgttcttcctgcagcacttccagggcaacatgatggacttcctggccttcaagaagaagcactacgcccccctgcaggcctacctgcggcagaatgacctggacatcgaggaggaggaggaggaggaggaggaggaggaggagaagtctgaggtgatcaatgatgaggtgaaggtggtgacaggcaaggatggccagacaggcacccctgtggccatcgccacccagctgccccccaaggtgtctgctgccttcagcagccagcagcagcccttccagcaggccctggccggcagcctggtggccggggccggcagcacagtggagacagacctcttcaagaggcagcaggccatgcccagcacaggcatggccgagcagagcaagaggccccggctggaggtgggccaccagggcgtggtgttccagcaccctggagcagatgctggggtgcccctgcagcagctgatgcccacagcccagggcggcatgccacccaccccccaggccgcccagctggccggccagaggcagagccagcagcagtatgaccccagcacaggcccccctgtgcagaatgctgccagcctgcacacccccctgccccagctgcccggccgcctgcccccagctggggtgcccacagctgccctgagcagcgccctgcagtttgcccagcagccccaggtggtggaggcccagacccagctgcagatccctgtgaagacccagcagcccaacgtgcccatcccagccccacccagcagccagctgcccatcccccccagccagcctgcccagctggccctgcacgtgcccacccctgggaaggtgcaggtgcaggccagccagctgagcagcctgccccagatggtggccagcacccggctgcctgtggaccctgccccaccctgcccccggcccctgcccaccagcagcaccagcagcctggcccctgtgtctggcagcggccctggccccagccctgcccggagcagccctgtgaaccggcccagcagcgccaccaacaaggccctgagccctgtgaccagcaggaccccaggagtggtggccagcgcccccaccaagccccagagccctgcccagaatgccaccagcagccaggacagcagccaggacaccctgacagagcagatcaccctggagaaccaggtgcaccagagaattgctgagctgaggaaggccggcctgtggagccagaggcggctgcccaagctgcaggaggccccccggcccaagagccactgggactacctgctggaggagatgcagtggatggccacagactttgcccaggagcggcgctggaaggtggccgccgccaagaagctggtgaggacagtggtgcgccaccacgaggagaagcagctgcgggaggagcggggcaagaaggaggagcagagccggctgcggagaattgctgccagcacagcccgggagattgagtgcttctggagcaacatcgagcaggtggtggagatcaagctgcgggtggagctggaggagaagaggaagaaggccctgaacctgcagaaggtgtccagaagaggcaaggagctgcggcccaagggctttgatgccctgcaggagagcagcctggacagcggcatgagcggcaggaagaggaaggccagcatcagcctgacagatgatgaggtggatgatgaggaggagaccatcgaggaggaggaggccaatgaaggagtggtggaccaccagacagagctgagcaacctggccaaggaggccgagctgcccctgctggacctgatgaagctgtatgagggcgccttcctgcccagcagccagtggccccggcccaagccagatggagaggacaccagcggggaggaggatgctgatgactgccctggggaccgggagagcaggaaggacctggtgctgattgacagcctcttcatcatggaccagttcaaggctgctgagaggatgaacatcggcaagcccaatgccaaggacattgctgatgtgacagctgtggccgaggccatcctgcccaagggcagcgcccgggtgaccacctctgtgaagttcaatgcccccagcctgctgtatggagccctgcgggactaccagaagattggcctggactggctggccaagctgtacaggaagaacctgaatggcatcctggctgatgaggccggcctgggcaagacagtgcagatcatcgccttctttgcccacctggcctgcaatgaaggcaactggggcccccacctggtggtggtgcgcagctgcaacatcctgaagtgggagctggagctgaagcgctggtgccccggcctgaagatcctgagctacatcggcagccaccgggagctgaaggccaagaggcaggagtgggccgagcccaacagcttccacgtgtgcatcaccagctacacccagttcttccggggcctgacagccttcaccagggtgcgctggaagtgcctggtgattgatgagatgcagagggtgaagggcatgacagagcggcactgggaggccgtgttcaccctgcagagccagcagaggctgctgctgattgacagccccctgcacaacaccttcctggagctgtggaccatggtgcacttcctggtgcccggcatcagccggccctacctgagcagccccctgcgggcccccagcgaggagagccaggactactaccacaaggtggtgatccggctgcaccgggtgacccagcccttcatcctgcggaggaccaagagagatgtggagaagcagctgaccaagaagtatgagcacgtgctgaagtgccgcctgagcaaccggcagaaggccctgtatgaagatgtgatcctgcagcccggcacccaggaggccctgaagagcggccactttgtgaatgtgctgagcatcctggtgcggctgcagaggatctgcaaccaccctggcctggtggagcccaggcaccctggcagcagctatgtggccggccccctggagtaccccagcgccagcctcatcctgaaggccctggagcgggacttctggaaggaggccgacctgtccatgtttgacctgattggcctggagaacaagatcaccaggcatgaagctgagctgctgagcaagaagaagatccccaggaagctgatggaggagatcagcaccagcgctgccccagctgcccggcctgctgctgccaagctgaaggccagccgcctcttccagcctgtgcagtatggccagaagccagagggccgcacagtggccttccccagcacccacccccccaggacagctgcccccaccacagccagcgctgccccccagggccccctgcggggccggccccccatcgccaccttcagcgccaaccctgaggccaaggctgctgctgcccccttccagaccagccaggccagcgccagcgcccccaggcaccagcctgccagcgccagcagcacagctgccagccctgcccacccagccaagctgcgggcccagaccacagcccaggccagcaccccaggccagcccccaccccagccccaggcccccagccacgccgccggccagagcgccctgccccagaggctggtgctgcccagccaggcccaggcccggctgcccagcggggaggtggtgaagatcgcccagctggccagcatcaccggcccccagagccgggtggcccagcctgagacccctgtgaccctgcagttccagggcagcaagttcaccctgagccacagccagctgcggcagctgacagctggccagcccctgcagctgcagggctctgtgctgcagatcgtgtctgcccctggccagccctacctgcgggcccctggccctgtggtgatgcagacagtgtcccaggccggggctgtgcatggagccctgggcagcaagcccccagctgggggccccagccctgcccccctgaccccccaggtgggcgtgcccggccgggtggccgtgaatgccctggccgtgggggagcccggcacagccagcaagccagccagccccatcggcggccccacccaggaggagaagacccggctgctgaaggagcggctggaccagatctacctggtgaatgaaagacgctgcagccaggcccctgtgtatggccgggacctgctgcgcatctgtgccctgcccagccacggccgggtgcagtggaggggcagcctggatggccggcggggcaaggaggccggccctgcccacagctacaccagcagcagcgagagccccagcgagctgatgctgaccctgtgccgctgtggggagagcctgcaggacgtcatcgacagagtggcctttgtgatcccccctgtggtggccgccccacccagcctgcgggtgccccggcccccacccctgtacagccacaggatgaggatcctgcggcagggcctgcgggagcacgccgccccctacttccagcagctgcggcagaccacagccccccggctgctgcagtttcctgagctgcggctggtgcagtttgattctgggaagctggaggccctggccatcctgctgcagaagctgaagtctgagggcagaagagtgctgatcctgagccagatgatcctgatgctggacatcctggagatgttcctgaacttccactacctgacctacgtgagaattgatgaaaatgccagcagcgagcagaggcaggagctgatgaggagcttcaacagagaccggcgcatcttctgtgccatcctgagcacccacagcaggaccaccggcatcaacctggtggaggccgacacagtggtgttctatgacaatgacctgaaccctgtgatggatgccaaggcccaggagtggtgtgaccgcatcggccgctgcaaggacatccacatctaccgcctggtgtctggcaacagcattgaggagaagctgctgaagaatggcaccaaggacctgatccgggaggtggccgcccagggcaatgactacagcatggccttcctgacccagaggaccatccaggagctgtttgaggtgtacagccccatggatgatgctggcttccctgtgaaggccgaggagtttgtggtgctgagccaggagcccagcgtgacagagaccatcgcccccaagatcgcccggcccttcatcgaggccctgaagagcattgagtacctggaggaggatgcccagaagagcgcccaggagggcgtgctgggcccccacacagatgccctgagcagtgacagcgagaacatgccctgtgatgaggagcccagccagctggaggagctggccgacttcatggagcagctgacccccatcgagaagtatgccctgaactacctggagctgttccacaccagcattgagcaggagaaggagagaaattctgaagatgctgtgatgacagctgtgcgggcctgggagttctggaacctgaagaccctgcaggagcgggaggcccggctgcggctggagcaggaggaggccgagctgctgacctacacccgggaggatgcctacagcatggagtatgtgtatgaagatgtggatggccagacagaggtgatgcccctgtggaccccacccaccccaccccaggatgacagcgacatctacctggacagcgtgatgtgcctgatgtatgaggccacccccatccctgaggccaagctgccccctgtgtatgtgaggaaggagaggaagaggcacaagacagaccccagcgctgctggcaggaagaagaagcagagacatggagaggccgtggtgcccccaagaagcctgtttgaccgggccaccccaggcctgctgaagatcagaagagagggcaaggagcagaagaagaacatcctgctgaagcagcaggtgccctttgccaagcccctgcccacctttgccaagcccacagctgagcccggccaggacaaccctgagtggctgatcagcgaggactgggccctgctgcaggccgtgaagcagctgctggagctgcccctgaacctgaccatcgtgtccccagcccacacccccaactgggacctggtgtctgatgtggtgaacagctgcagccgcatctaccgcagcagcaagcagtgcaggaacagatatgaaaatgtcatcatcccccgggaggagggcaagagcaagaacaaccggcccctgcggaccagccagatctatgcccaggatgaaaatgccacccacacccagctgtacaccagccactttgacctgatgaagatgacagctgggaagaggagcccccccatcaagcccctgctgggcatgaaccccttccagaagaaccccaagcacgcctctgtgctggccgagagcggcatcaactatgacaagcccctgccccccatccaggtggccagcctgcgggcagagcgcatcgccaaggagaagaaggccctggccgaccagcagaaggcccagcagcctgctgtggcccagcccccaccaccccagccccagcccccacctccaccccagcagcccccaccacccctgccccagccccaggccgccggcagccagcccccagctggccccccagctgtgcagccccagccccagccccagccccagacccagccccagcctgtgcaggccccagccaaggcccagcctgccatcaccactggaggcagcgctgctgtgctggccggcaccatcaagacctctgtgacaggcacctccatgcccactggagctgtgtctggaaatgtgattgtgaacaccatcgccggcgtgcctgctgccaccttccagagcatcaacaagaggctggccagccctgtggcccctggggccctgaccacccctgggggcagcgccccagcccaggtggtgcacacccagcccccacccagggctgtgggcagccctgccacagccaccccagacctggtgtccatggccaccacccagggcgtgcgggctgtgacctctgtgacagccagcgctgtggtgaccaccaacctgacccctgtgcagaccccagcccggagcctggtgccccaggtgtcccaggccactggagtgcagctgcccgggaagaccatcaccccagcccacttccagctgctgcggcagcagcagcagcagcagcagcagcagcagcagcagcagcagcagcagcagcagcagcagcagcagcagcagcagcagcagcagcagaccaccaccaccagccaggtgcaggtgccccagatccagggccaggcccagagccctgcccagatcaaggctgtgggcaagctgaccccagagcacctgatcaagatgcagaagcagaagctgcagatgccaccccagcccccaccaccccaggcccagagcgccccaccccagcccacagcccaggtgcaggtgcagaccagccagcccccccagcagcagagcccccagctgaccaccgtgacagcccccaggcctggggccctgctgaccggcaccaccgtggccaacctgcaggtggcccggctgaccagggtgcccaccagccagctgcaggcccagggccagatgcagacccaggccccccagcctgcccaggtggccctggccaagccccctgtggtgtctgtgcctgctgctgtggtgagcagccctggggtgaccaccctgcccatgaatgtggccggcatctctgtggccatcggccagccccagaaggccgccggccagacagtggtggcccagcctgtgcacatgcagcagctgctgaagctgaagcagcaggccgtgcagcagcagaaggccatccagccccaggccgcccagggccctgctgctgtgcagcagaagatcacagcccagcagatcaccacccctggggcccagcagaaggtggcctatgctgcccagcctgccctgaagacccagttcctgaccacccccatcagccaggcccagaagctggccggggcccagcaggtgcagacccagatccaggtggccaagctgccccaggtggtgcagcagcagacccctgtggccagcatccagcaggtggccagcgccagccagcaggccagcccccagacagtggccctgacccaggccacagctgctggccagcaggtgcagatgatcccagctgtgacagccacagcccaggtggtgcagcagaagctgatccagcagcaggtggtgaccacagccagcgcccccctgcagacccctggggcccccaacccagcccaggtgcctgccagcagtgacagccccagccagcagcccaagctgcagatgagggtgcctgctgtgcggctgaagacccccaccaagccaccctgccagtag

SEQ ID NO: 186560 - DNA, 9372 bp, Artificial Sequence
  derived and/or modified sequence
atgcaccacggcaccggcccccagaatgtgcagcaccagctgcagaggagccgggcctgccccggcagcgagggggaggagcagcctgcccaccccaaccccccacccagccctgctgccccctttgcccccagcgccagccccagcgccccccagagccccagctaccagatccagcagctgatgaacagaagccctgccaccggccagaatgtgaacatcaccctgcagagcgtgggccctgtggtgggcggcaaccagcagatcaccctggcccccctgcccctgcccagccccaccagccctggcttccagttcagcgcccagcccaggagatttgaacatggcagccccagctacatccaggtgaccagccccctgagccagcaggtgcagacccagagccccacccagcccagccctggccctggccaggccctgcagaatgtgcgggccggggcccctggccctggcctgggcctgtgcagcagcagccccactggaggctttgtggatgcctctgtgctggtgcggcagatcagcctgagccccagcagcggcggccactttgtgttccaggacggcagcggcctgacccagatcgcccagggcgcccaggtgcagctgcagcaccctggcacccccatcaccgtgcgggagcggcggcccagccagccccacacccagagcggcggcaccatccaccacctgggcccccagagccctgctgctgctggaggagctggcctgcagcccctggccagccccagccacatcaccacagccaacctgcccccccagatcagcagcatcatccagggccagctggtgcagcagcagcaggtgctgcagggcccccccctgccccggcccctgggctttgagaggaccccaggagtgctgctgcctggagctggaggagctgctggcttcggcatgaccagccccccaccacccaccagccccagcaggacagctgtgcccccaggcctgagcagcctgcccctgacctctgtgggcaacacaggcatgaagaaggtgcccaagaagctggaggagatccccccagccagccctgagatggcccagatgaggaagcagtgcctggactaccactaccaggagatgcaggccctgaaggaggtgttcaaggagtacctgattgagctgttcttcctgcagcacttccagggcaacatgatggacttcctggccttcaagaagaagcactacgcccccctgcaggcctacctgcggcagaatgacctggacatcgaggaggaggaggaggaggaggaggaggaggaggagaagtctgaggtgatcaatgatgagcagcaggccctggccggcagcctggtggccggggccggcagcacagtggagacagacctcttcaagaggcagcaggccatgcccagcacaggcatggccgagcagagcaagaggccccggctggaggtgggccaccagggcgtggtgttccagcaccctggagcagatgctggggtgcccctgcagcagctgatgcccacagcccagggcggcatgccacccaccccccaggccgcccagctggccggccagaggcagagccagcagcagtatgaccccagcacaggcccccctgtgcagaatgctgccagcctgcacacccccctgccccagctgcccggccgcctgcccccagctggggtgcccacagctgccctgagcagcgccctgcagtttgcccagcagccccaggtggtggaggcccagacccagctgcagatccctgtgaagacccagcagcccaacgtgcccatcccagccccacccagcagccagctgcccatcccccccagccagcctgcccagctggccctgcacgtgcccacccctgggaaggtgcaggtgcaggccagccagctgagcagcctgccccagatggtggccagcacccggctgcctgtggaccctgccccaccctgcccccggcccctgcccaccagcagcaccagcagcctggcccctgtgtctggcagcggccctggccccagccctgcccggagcagccctgtgaaccggcccagcagcgccaccaacaaggccctgagccctgtgaccagcaggaccccaggagtggtggccagcgcccccaccaagccccagagccctgcccagaatgccaccagcagccaggacagcagccaggacaccctgacagagcagatcaccctggagaaccaggtgcaccagagaattgctgagctgaggaaggccggcctgtggagccagaggcggctgcccaagctgcaggaggccccccggcccaagagccactgggactacctgctggaggagatgcagtggatggccacagactttgcccaggagcggcgctggaaggtggccgccgccaagaagctggtgaggacagtggtgcgccaccacgaggagaagcagctgcgggaggagcggggcaagaaggaggagcagagccggctgcggagaattgctgccagcacagcccgggagattgagtgcttctggagcaacatcgagcaggtggtggagatcaagctgcgggtggagctggaggagaagaggaagaaggccctgaacctgcagaaggtgtccagaagaggcaaggagctgcggcccaagggctttgatgccctgcaggagagcagcctggacagcggcatgagcggcaggaagaggaaggccagcatcagcctgacagatgatgaggtggatgatgaggaggagaccatcgaggaggaggaggccaatgaaggagtggtggaccaccagacagagctgagcaacctggccaaggaggccgagctgcccctgctggacctgatgaagctgtatgagggcgccttcctgcccagcagccagtggccccggcccaagccagatggagaggacaccagcggggaggaggatgctgatgactgccctggggaccgggagagcaggaaggacctggtgctgattgacagcctcttcatcatggaccagttcaaggctgctgagaggatgaacatcggcaagcccaatgccaaggacattgctgatgtgacagctgtggccgaggccatcctgcccaagggcagcgcccgggtgaccacctctgtgaagttcaatgcccccagcctgctgtatggagccctgcgggactaccagaagattggcctggactggctggccaagctgtacaggaagaacctgaatggcatcctggctgatgaggccggcctgggcaagacagtgcagatcatcgccttctttgcccacctggcctgcaatgaaggcaactggggcccccacctggtggtggtgcgcagctgcaacatcctgaagtgggagctggagctgaagcgctggtgccccggcctgaagatcctgagctacatcggcagccaccgggagctgaaggccaagaggcaggagtgggccgagcccaacagcttccacgtgtgcatcaccagctacacccagttcttccggggcctgacagccttcaccagggtgcgctggaagtgcctggtgattgatgagatgcagagggtgaagggcatgacagagcggcactgggaggccgtgttcaccctgcagagccagcagaggctgctgctgattgacagccccctgcacaacaccttcctggagctgtggaccatggtgcacttcctggtgcccggcatcagccggccctacctgagcagccccctgcgggcccccagcgaggagagccaggactactaccacaaggtggtgatccggctgcaccgggtgacccagcccttcatcctgcggaggaccaagagagatgtggagaagcagctgaccaagaagtatgagcacgtgctgaagtgccgcctgagcaaccggcagaaggccctgtatgaagatgtgatcctgcagcccggcacccaggaggccctgaagagcggccactttgtgaatgtgctgagcatcctggtgcggctgcagaggatctgcaaccaccctggcctggtggagcccaggcaccctggcagcagctatgtggccggccccctggagtaccccagcgccagcctcatcctgaaggccctggagcgggacttctggaaggaggccgacctgtccatgtttgacctgattggcctggagaacaagatcaccaggcatgaagctgagctgctgagcaagaagaagatccccaggaagctgatggaggagatcagcaccagcgctgccccagctgcccggcctgctgctgccaagctgaaggccagccgcctcttccagcctgtgcagtatggccagaagccagagggccgcacagtggccttccccagcacccacccccccaggacagctgcccccaccacagccagcgctgccccccagggccccctgcggggccggccccccatcgccaccttcagcgccaaccctgaggccaaggctgctgctgcccccttccagaccagccaggccagcgccagcgcccccaggcaccagcctgccagcgccagcagcacagctgccagccctgcccacccagccaagctgcgggcccagaccacagcccaggccagcaccccaggccagcccccaccccagccccaggcccccagccacgccgccggccagagcgccctgccccagaggctggtgctgcccagccaggcccaggcccggctgcccagcggggaggtggtgaagatcgcccagctggccagcatcaccggcccccagagccgggtggcccagcctgagacccctgtgaccctgcagttccagggcagcaagttcaccctgagccacagccagctgcggcagctgacagctggccagcccctgcagctgcagggctctgtgctgcagatcgtgtctgcccctggccagccctacctgcgggcccctggccctgtggtgatgcagacagtgtcccaggccggggctgtgcatggagccctgggcagcaagcccccagctgggggccccagccctgcccccctgaccccccaggtgggcgtgcccggccgggtggccgtgaatgccctggccgtgggggagcccggcacagccagcaagccagccagccccatcggcggccccacccaggaggagaagacccggctgctgaaggagcggctggaccagatctacctggtgaatgaaagacgctgcagccaggcccctgtgtatggccgggacctgctgcgcatctgtgccctgcccagccacggccgggtgcagtggaggggcagcctggatggccggcggggcaaggaggccggccctgcccacagctacaccagcagcagcgagagccccagcgagctgatgctgaccctgtgccgctgtggggagagcctgcaggacgtcatcgacagagtggcctttgtgatcccccctgtggtggccgccccacccagcctgcgggtgccccggcccccacccctgtacagccacaggatgaggatcctgcggcagggcctgcgggagcacgccgccccctacttccagcagctgcggcagaccacagccccccggctgctgcagtttcctgagctgcggctggtgcagtttgattctgggaagctggaggccctggccatcctgctgcagaagctgaagtctgagggcagaagagtgctgatcctgagccagatgatcctgatgctggacatcctggagatgttcctgaacttccactacctgacctacgtgagaattgatgaaaatgccagcagcgagcagaggcaggagctgatgaggagcttcaacagagaccggcgcatcttctgtgccatcctgagcacccacagcaggaccaccggcatcaacctggtggaggccgacacagtggtgttctatgacaatgacctgaaccctgtgatggatgccaaggcccaggagtggtgtgaccgcatcggccgctgcaaggacatccacatctaccgcctggtgtctggcaacagcattgaggagaagctgctgaagaatggcaccaaggacctgatccgggaggtggccgcccagggcaatgactacagcatggccttcctgacccagaggaccatccaggagctgtttgaggtgtacagccccatggatgatgctggcttccctgtgaaggccgaggagtttgtggtgctgagccaggagcccagcgtgacagagaccatcgcccccaagatcgcccggcccttcatcgaggccctgaagagcattgagtacctggaggaggatgcccagaagagcgcccaggagggcgtgctgggcccccacacagatgccctgagcagtgacagcgagaacatgccctgtgatgaggagcccagccagctggaggagctggccgacttcatggagcagctgacccccatcgagaagtatgccctgaactacctggagctgttccacaccagcattgagcaggagaaggagagaaattctgaagatgctgtgatgacagctgtgcgggcctgggagttctggaacctgaagaccctgcaggagcgggaggcccggctgcggctggagcaggaggaggccgagctgctgacctacacccgggaggatgcctacagcatggagtatgtgtatgaagatgtggatggccagacagaggtgatgcccctgtggaccccacccaccccaccccaggatgacagcgacatctacctggacagcgtgatgtgcctgatgtatgaggccacccccatccctgaggccaagctgccccctgtgtatgtgaggaaggagaggaagaggcacaagacagaccccagcgctgctggcaggaagaagaagcagagacatggagaggccgtggtgcccccaagaagcctgtttgaccgggccaccccaggcctgctgaagatcagaagagagggcaaggagcagaagaagaacatcctgctgaagcagcaggtgccctttgccaagcccctgcccacctttgccaagcccacagctgagcccggccaggacaaccctgagtggctgatcagcgaggactgggccctgctgcaggccgtgaagcagctgctggagctgcccctgaacctgaccatcgtgtccccagcccacacccccaactgggacctggtgtctgatgtggtgaacagctgcagccgcatctaccgcagcagcaagcagtgcaggaacagatatgaaaatgtcatcatcccccgggaggagggcaagagcaagaacaaccggcccctgcggaccagccagatctatgcccaggatgaaaatgccacccacacccagctgtacaccagccactttgacctgatgaagatgacagctgggaagaggagcccccccatcaagcccctgctgggcatgaaccccttccagaagaaccccaagcacgcctctgtgctggccgagagcggcatcaactatgacaagcccctgccccccatccaggtggccagcctgcgggcagagcgcatcgccaaggagaagaaggccctggccgaccagcagaaggcccagcagcctgctgtggcccagcccccaccaccccagccccagcccccacctccaccccagcagcccccaccacccctgccccagccccaggccgccggcagccagcccccagctggccccccagctgtgcagccccagccccagccccagccccagacccagccccagcctgtgcaggccccagccaaggcccagcctgccatcaccactggaggcagcgctgctgtgctggccggcaccatcaagacctctgtgacaggcacctccatgcccactggagctgtgtctggaaatgtgattgtgaacaccatcgccggcgtgcctgctgccaccttccagagcatcaacaagaggctggccagccctgtggcccctggggccctgaccacccctgggggcagcgccccagcccaggtggtgcacacccagcccccacccagggctgtgggcagccctgccacagccaccccagacctggtgtccatggccaccacccagggcgtgcgggctgtgacctctgtgacagccagcgctgtggtgaccaccaacctgacccctgtgcagaccccagcccggagcctggtgccccaggtgtcccaggccactggagtgcagctgcccgggaagaccatcaccccagcccacttccagctgctgcggcagcagcagcagcagcagcagcagcagcagcagcagcagcagcagcagcagcagcagcagcagcagcagcagcagcagcagcagcagaccaccaccaccagccaggtgcaggtgccccagatccagggccaggcccagagccctgcccagatcaaggctgtgggcaagctgaccccagagcacctgatcaagatgcagaagcagaagctgcagatgccaccccagcccccaccaccccaggcccagagcgccccaccccagcccacagcccaggtgcaggtgcagaccagccagcccccccagcagcagagcccccagctgaccaccgtgacagcccccaggcctggggccctgctgaccggcaccaccgtggccaacctgcaggtggcccggctgaccagggtgcccaccagccagctgcaggcccagggccagatgcagacccaggccccccagcctgcccaggtggccctggccaagccccctgtggtgtctgtgcctgctgctgtggtgagcagccctggggtgaccaccctgcccatgaatgtggccggcatctctgtggccatcggccagccccagaaggccgccggccagacagtggtggcccagcctgtgcacatgcagcagctgctgaagctgaagcagcaggccgtgcagcagcagaaggccatccagccccaggccgcccagggccctgctgctgtgcagcagaagatcacagcccagcagatcaccacccctggggcccagcagaaggtggcctatgctgcccagcctgccctgaagacccagttcctgaccacccccatcagccaggcccagaagctggccggggcccagcaggtgcagacccagatccaggtggccaagctgccccaggtggtgcagcagcagacccctgtggccagcatccagcaggtggccagcgccagccagcaggccagcccccagacagtggccctgacccaggccacagctgctggccagcaggtgcagatgatcccagctgtgacagccacagcccaggtggtgcagcagaagctgatccagcagcaggtggtgaccacagccagcgcccccctgcagacccctggggcccccaacccagcccaggtgcctgccagcagtgacagccccagccagcagcccaagctgcagatgagggtgcctgctgtgcggctgaagacccccaccaagccaccctgccagtag

SEQ ID NO: 186561 - DNA, 9369 bp, Artificial Sequence
  derived and/or modified sequence
atgcaccacggcaccggcccccagaatgtgcagcaccagctgcagaggagccgggcctgccccggcagcgagggggaggagcagcctgcccaccccaaccccccacccagccctgctgccccctttgcccccagcgccagccccagcgccccccagagccccagctaccagatccagcagctgatgaacagaagccctgccaccggccagaatgtgaacatcaccctgcagagcgtgggccctgtggtgggcggcaaccagcagatcaccctggcccccctgcccctgcccagccccaccagccctggcttccagttcagcgcccagcccaggagatttgaacatggcagccccagctacatccaggtgaccagccccctgagccagcaggtgcagacccagagccccacccagcccagccctggccctggccaggccctgcagaatgtgcgggccggggcccctggccctggcctgggcctgtgcagcagcagccccactggaggctttgtggatgcctctgtgctggtgcggcagatcagcctgagccccagcagcggcggccactttgtgttccaggacggcagcggcctgacccagatcgcccagggcgcccaggtgcagctgcagcaccctggcacccccatcaccgtgcgggagcggcggcccagccagccccacacccagagcggcggcaccatccaccacctgggcccccagagccctgctgctgctggaggagctggcctgcagcccctggccagccccagccacatcaccacagccaacctgcccccccagatcagcagcatcatccagggccagctggtgcagcagcagcaggtgctgcagggcccccccctgccccggcccctgggctttgagaggaccccaggagtgctgctgcctggagctggaggagctgctggcttcggcatgaccagccccccaccacccaccagccccagcaggacagctgtgcccccaggcctgagcagcctgcccctgacctctgtgggcaacacaggcatgaagaaggtgcccaagaagctggaggagatccccccagccagccctgagatggcccagatgaggaagcagtgcctggactaccactaccaggagatgcaggccctgaaggaggtgttcaaggagtacctgattgagctgttcttcctgcagcacttccagggcaacatgatggacttcctggccttcaagaagaagcactacgcccccctgcaggcctacctgcggcagaatgacctggacatcgaggaggaggaggaggaggaggaggaggaggaggagaagtctgaggtgatcaatgatgagcaggccctggccggcagcctggtggccggggccggcagcacagtggagacagacctcttcaagaggcagcaggccatgcccagcacaggcatggccgagcagagcaagaggccccggctggaggtgggccaccagggcgtggtgttccagcaccctggagcagatgctggggtgcccctgcagcagctgatgcccacagcccagggcggcatgccacccaccccccaggccgcccagctggccggccagaggcagagccagcagcagtatgaccccagcactggacctcctgtgcagaatgctgccagcctgcacacccccctgccccagctgcccggccgcctgcccccagctggggtgcccacagctgccctgagcagcgccctgcagtttgcccagcagccccaggtggtggaggcccagacccagctgcagatccctgtgaagacccagcagcccaacgtgcccatcccagccccacccagcagccagctgcccatcccccccagccagcctgcccagctggccctgcacgtgcccaccccaggcaaggtgcaggtgcaggccagccagctgagcagcctgccccagatggtggccagcacccggctgcctgtggaccctgccccaccctgcccccggcccctgcccaccagcagcaccagcagcctggcccctgtgtctggcagcggccctggccccagccctgcccggagcagccctgtgaaccggcccagcagcgccaccaacaaggccctgagccctgtgaccagcaggaccccaggagtggtggccagcgcccccaccaagccccagagccctgcccagaatgccaccagcagccaggacagcagccaggacaccctgacagagcagatcaccctggagaaccaggtgcaccagagaattgctgagctgaggaaggccggcctgtggagccagaggcggctgcccaagctgcaggaggccccccggcccaagagccactgggactacctgctggaggagatgcagtggatggccacagactttgcccaggagcggcgctggaaggtggccgccgccaagaagctggtgaggacagtggtgcgccaccacgaggagaagcagctgcgggaggagcggggcaagaaggaggagcagagccggctgcggagaattgctgccagcacagcccgggagattgagtgcttctggagcaacatcgagcaggtggtggagatcaagctgcgggtggagctggaggagaagaggaagaaggccctgaacctgcagaaggtgtcccggcggggcaaggagctgcggcccaagggctttgatgccctgcaggagagcagcctggacagcggcatgagcggcaggaagaggaaggccagcatcagcctgacagatgatgaggtggatgatgaggaggagaccatcgaggaggaggaggccaatgaaggagtggtggaccaccagacagagctgagcaacctggccaaggaggccgagctgcccctgctggacctgatgaagctgtatgaaggagccttcctgcccagcagccagtggccccggcccaagccagatggagaggacaccagcggggaggaggatgctgatgactgccctggggaccgggagagcaggaaggacctggtgctgattgacagcctcttcatcatggaccagttcaaggctgctgagaggatgaacatcggcaagcccaatgccaaggacattgctgatgtgacagctgtggccgaggccatcctgcccaagggcagcgcccgggtgaccacctctgtgaagttcaatgcccccagcctgctgtatggagccctgcgggactaccagaagattggcctggactggctggccaagctgtacaggaagaacctgaatggcatcctggctgatgaagctggcctgggcaagacagtgcagatcatcgccttctttgcccacctggcctgcaatgaaggcaactggggcccccacctggtggtggtgcgcagctgcaacatcctgaagtgggagctggagctgaagcgctggtgccccggcctgaagatcctgagctacatcggcagccaccgggagctgaaggccaagaggcaggagtgggccgagcccaacagcttccacgtgtgcatcaccagctacacccagttcttccggggcctgacagccttcaccagggtgcgctggaagtgcctggtgattgatgagatgcagagggtgaagggcatgacagagcggcactgggaggccgtgttcaccctgcagagccagcagaggctgctgctgattgacagccccctgcacaacaccttcctggagctgtggaccatggtgcacttcctggtgcccggcatcagccggccctacctgagcagccccctgcgggcccccagcgaggagagccaggactactaccacaaggtggtgatccggctgcaccgggtgacccagcccttcatcctgcggaggaccaagagagatgtggagaagcagctgaccaagaagtatgaacatgtgctgaagtgccgcctgagcaaccggcagaaggccctgtatgaagatgtgatcctgcagcccggcacccaggaggccctgaagagcggccactttgtgaatgtgctgagcatcctggtgcggctgcagaggatctgcaaccaccctggcctggtggagcccaggcaccctggcagcagctatgtggccggccccctggagtaccccagcgccagcctcatcctgaaggccctggagcgggacttctggaaggaggccgacctgtccatgtttgacctgattggcctggagaacaagatcaccaggcatgaggccgagctgctgagcaagaagaagatccccaggaagctgatggaggagatcagcaccagcgctgccccagctgcccggcctgctgctgccaagctgaaggccagccgcctcttccagcctgtgcagtatggccagaagccagagggccgcacagtggccttccccagcacccacccccccaggacagctgcccccaccacagccagcgctgccccccagggccccctgcggggccggccccccatcgccaccttcagcgccaaccctgaggccaaggctgctgctgcccccttccagaccagccaggccagcgccagcgcccccaggcaccagcctgccagcgccagcagcacagctgccagccctgcccacccagccaagctgcgggcccagaccacagcccaggccagcaccccaggccagcccccaccccagccccaggcccccagccatgctgctggccagagcgccctgccccagaggctggtgctgcccagccaggcccaggcccggctgcccagcggggaggtggtgaagatcgcccagctggccagcatcaccggcccccagagccgggtggcccagcctgagacccctgtgaccctgcagttccagggcagcaagttcaccctgagccacagccagctgcggcagctgacagctggccagcccctgcagctgcagggctctgtgctgcagatcgtgtctgcccctggccagccctacctgcgggcccctggccctgtggtgatgcagacagtgtcccaggccggggctgtgcacggggccctgggcagcaagcccccagctgggggccccagccctgcccccctgaccccccaggtgggcgtgcccggccgggtggccgtgaatgccctggccgtgggggagcctggaacagccagcaagccagccagccccatcggcggccccacccaggaggagaagacccggctgctgaaggagcggctggaccagatctacctggtgaatgaaagacgctgcagccaggcccctgtgtatggccgggacctgctgcgcatctgtgccctgcccagccacggccgggtgcagtggaggggcagcctggatggaagaagaggcaaggaggccggccctgcccacagctacaccagcagcagcgagagccccagcgagctgatgctgaccctgtgccgctgtggggagagcctgcaggatgtgattgacagagtggccttcgtcatcccccctgtggtggccgccccacccagcctgcgggtgccccggcccccacccctgtacagccacaggatgaggatcctgcggcagggcctgcgggagcacgccgccccctacttccagcagctgcggcagaccacagccccccggctgctgcagtttcctgagctgcggctggtgcagtttgacagcggcaagctggaggccctggccatcctgctgcagaagctgaagtctgagggccggcgggtgctgatcctgagccagatgatcctgatgctggacatcctggagatgttcctgaacttccactacctgacctacgtgagaattgatgaaaatgccagcagcgagcagaggcaggagctgatgaggagcttcaacagagaccggcgcatcttctgtgccatcctgagcacccacagcaggaccaccggcatcaacctggtggaggccgacacagtggtgttctatgacaatgacctgaaccctgtgatggatgccaaggcccaggagtggtgtgacagaattggccgctgcaaggacatccacatctaccgcctggtgtctggcaacagcattgaggagaagctgctgaagaatggcaccaaggacctgatccgggaggtggccgcccagggcaatgactacagcatggccttcctgacccagaggaccatccaggagctgtttgaggtgtacagccccatggatgatgctggcttccctgtgaaggccgaggagtttgtggtgctgagccaggagcccagcgtgacagagaccatcgcccccaagatcgcccggcccttcatcgaggccctgaagagcattgagtacctggaggaggatgcccagaagagcgcccaggagggcgtgctgggcccccacacagatgccctgagcagtgacagcgagaacatgccctgtgatgaggagcccagccagctggaggagctggccgacttcatggagcagctgacccccatcgagaagtatgccctgaactacctggagctgttccacaccagcattgagcaggagaaggagaggaacagtgaagatgctgtgatgacagctgtgcgggcctgggagttctggaacctgaagaccctgcaggagcgggaggcccggctgcggctggagcaggaggaggccgagctgctgacctacaccagagaagatgcctacagcatggagtatgtgtatgaagatgtggatggccagacagaggtgatgcccctgtggaccccacccaccccaccccaggatgacagcgacatctacctggacagcgtgatgtgcctgatgtatgaggccacccccatccctgaggccaagctgccccctgtgtatgtgaggaaggagaggaagaggcacaagacagaccccagcgctgctggcaggaagaagaagcagagacatggagaggccgtggtgccccccaggagcctgtttgaccgggccaccccaggcctgctgaagatccggcgggagggcaaggagcagaagaagaacatcctgctgaagcagcaggtgccctttgccaagcccctgcccacctttgccaagcccacagctgagcccggccaggacaaccctgagtggctgatcagcgaggactgggccctgctgcaggccgtgaagcagctgctggagctgcccctgaacctgaccatcgtgtccccagcccacacccccaactgggacctggtgtctgatgtggtgaacagctgcagccgcatctaccgcagcagcaagcagtgcaggaacagatatgaaaatgtcatcatcccccgggaggagggcaagagcaagaacaaccggcccctgcggaccagccagatctatgcccaggatgaaaatgccacccacacccagctgtacaccagccactttgacctgatgaagatgacagctgggaagaggagcccccccatcaagcccctgctgggcatgaaccccttccagaagaaccccaagcacgcctctgtgctggccgagagcggcatcaactatgacaagcccctgccccccatccaggtggccagcctgcgggcagagagaattgccaaggagaagaaggccctggccgaccagcagaaggcccagcagcctgctgtggcccagcccccaccaccccagccccagcccccacctccaccccagcagcccccaccacccctgccccagccccaggccgccggcagccagcccccagctggccccccagctgtgcagccccagccccagccccagccccagacccagccccagcctgtgcaggccccagccaaggcccagcctgccatcaccaccggcggcagcgctgctgtgctggccggcaccatcaagacctctgtgacaggcacctccatgcccaccggggctgtgtctggaaatgtcatcgtgaacaccatcgccggcgtgcctgctgccaccttccagagcatcaacaagaggctggccagccctgtggcccctggggccctgaccaccccaggcggcagcgccccagcccaggtggtgcacacccagcccccacccagggctgtgggcagccctgccacagccaccccagacctggtgtccatggccaccacccagggcgtgcgggctgtgacctctgtgacagccagcgctgtggtgaccaccaacctgacccctgtgcagaccccagcccggagcctggtgccccaggtgtcccaggccaccggggtgcagctgcccgggaagaccatcaccccagcccacttccagctgctgcggcagcagcagcagcagcagcagcagcagcagcagcagcagcagcagcagcagcagcagcagcagcagcagcagcagcagcagcagcagaccaccaccaccagccaggtgcaggtgccccagatccagggccaggcccagagccctgcccagatcaaggctgtgggcaagctgaccccagagcacctgatcaagatgcagaagcagaagctgcagatgccaccccagcccccaccaccccaggcccagagcgccccaccccagcccacagcccaggtgcaggtgcagaccagccagcccccccagcagcagagcccccagctgaccaccgtgacagcccccaggcctggggccctgctgaccggcaccaccgtggccaacctgcaggtggcccggctgaccagggtgcccaccagccagctgcaggcccagggccagatgcagacccaggccccccagcctgcccaggtggccctggccaagccccctgtggtgtctgtgcctgctgctgtggtgagcagccctggggtgaccaccctgcccatgaatgtggccggcatctctgtggccatcggccagccccagaaggctgctggccagacagtggtggcccagcctgtgcacatgcagcagctgctgaagctgaagcagcaggccgtgcagcagcagaaggccatccagccccaggccgcccagggccctgctgctgtgcagcagaagatcacagcccagcagatcaccacccctggggcccagcagaaggtggcctatgctgcccagcctgccctgaagacccagttcctgaccacccccatcagccaggcccagaagctggccggggcccagcaggtgcagacccagatccaggtggccaagctgccccaggtggtgcagcagcagacccctgtggccagcatccagcaggtggccagcgccagccagcaggccagcccccagacagtggccctgacccaggccacagctgctggccagcaggtgcagatgatcccagctgtgacagccacagcccaggtggtgcagcagaagctgatccagcagcaggtggtgaccacagccagcgcccccctgcagacccctggggcccccaacccagcccaggtgcctgccagcagtgacagccccagccagcagcccaagctgcagatgagggtgcctgctgtgcggctgaagacccccaccaagccaccctgccagtag

SEQ ID NO: 186562 - DNA, 2475 bp, Artificial Sequence
  derived and/or modified sequence
atgcaccacggcaccggcccccagaatgtgcagcaccagctgcagaggagccgggcctgccccggcagcgagggggaggagcagcctgcccaccccaaccccccacccagccctgctgccccctttgcccccagcgccagccccagcgccccccagagccccagctaccagatccagcagctgatgaacagaagccctgccaccggccagaatgtgaacatcaccctgcagagcgtgggccctgtggtgggcggcaaccagcagatcaccctggcccccctgcccctgcccagccccaccagccctggcttccagttcagcgcccagcccaggagatttgaacatggcagccccagctacatccaggtgaccagccccctgagccagcaggtgcagacccagagccccacccagcccagccctggccctggccaggccctgcagaatgtgcgggccggggcccctggccctggcctgggcctgtgcagcagcagccccactggaggctttgtggatgcctctgtgctggtgcggcagatcagcctgagccccagcagcggcggccactttgtgttccaggacggcagcggcctgacccagatcgcccagggcgcccaggtgcagctgcagcaccctggcacccccatcaccgtgcgggagcggcggcccagccagccccacacccagagcggcggcaccatccaccacctgggcccccagagccctgctgctgctggaggagctggcctgcagcccctggccagccccagccacatcaccacagccaacctgcccccccagatcagcagcatcatccagggccagctggtgcagcagcagcaggtgctgcagggcccccccctgccccggcccctgggctttgagaggaccccaggagtgctgctgcctggagctggaggagctgctggcttcggcatgaccagccccccaccacccaccagccccagcaggacagctgtgcccccaggcctgagcagcctgcccctgacctctgtgggcaacacaggcatgaagaaggtgcccaagaagctggaggagatccccccagccagccctgagatggcccagatgaggaagcagtgcctggactaccactaccaggagatgcaggccctgaaggaggtgttcaaggagtacctgattgagctgttcttcctgcagcacttccagggcaacatgatggacttcctggccttcaagaagaagcactacgcccccctgcaggcctacctgcggcagaatgacctggacatcgaggaggaggaggaggaggaggaggaggaggaggagaagtctgaggtgatcaatgatgagcaggccctggccggcagcctggtggccggggccggcagcacagtggagacagacctcttcaagaggcagcaggccatgcccagcacaggcatggccggcggcatgccacccaccccccaggccgcccagctggccggccagaggcagagccagcagcagtatgaccccagcactggacctcctgtgcagaatgctgccagcctgcacacccccctgccccagctgcccggccgcctgcccccagctggggtgcccacagctgccctgagcagcgccctgcagtttgcccagcagccccaggtggtggaggcccagacccagctgcagatccctgtgaagacccagcagcccaacgtgcccatcccagccccacccagcagccagctgcccatcccccccagccagcctgcccagctggccctgcacgtgcccaccccaggcaaggtgcaggtgcaggccagccagctgagcagcctgccccagatggtggccagcacccggctgcctgtggaccctgccccaccctgcccccggcccctgcccaccagcagcaccagcagcctggcccctgtgtctggcagcggccctggccccagccctgcccggagcagccctgtgaaccggcccagcagcgccaccaacaaggccctgagccctgtgaccagcaggaccccaggagtggtggccagcgcccccaccaagccccagagccctgcccagaatgccaccagcagccaggacagcagccaggacaccctgacagagcagatcaccctggagaaccaggtgcaccagagaattgctgagctgaggaaggccggcctgtggagccagaggcggctgcccaagctgcaggaggccccccggcccaagagccactgggactacctgctggaggagatgcagtggatggccacagactttgcccaggagcggcgctggaaggtggccgccgccaagaagctggtgaggacagtggtgcgccaccacgaggagaagcagctgcgggaggagcggggcaagaaggaggagcagagccggctgcggagaattgctgccagcacagcccgggagattgagtgcttctggagcaacatcgagcaggtggtggagatcaagctgcgggtggagctggagtag

SEQ ID NO: 186563 - DNA, 9129 bp, Artificial Sequence
  derived and/or modified sequence
atgcaccacggcaccggcccccagaacgtgcagcaccagctgcagcggagcagggcctgccccgggagcgagggcgaggagcagccagctcaccctaatccacccccatcccccgccgcacctttcgcgcctagcgcatctcccagcgcccctcagagcccctcttatcagatccagcagctaatgaacagaagcccggctactggccagaacgtgaatatcaccctgcagtcagtggggcccgtcgtcggaggtaaccaacagatcaccttggctcccctgcctctgccatcccctacctctcccggcttccagttttctgcccagccacgaagatttgagcacggctcgccgagctacatccaagtcacgtcccctctgtcccagcaagtgcagacccagtcccctacgcaaccgagtccaggacctgggcaggcgctgcagaatgtgagagctggcgcccctggacccgggttaggcctatgttcttcctctccgaccggcggattcgtggacgcgtctgtattggttcgacaaatcagcctgtcaccctcctctggtggtcatttcgtttttcaggacggaagcggcttgactcagattgcccaaggcgcgcaggttcaactgcagcaccccgggacccctatcacagttcgggagcgccgcccctcacagccacacacccagagtggcggtactatccatcacctggggccacagagtcctgcggcggctgggggggcaggactccaaccactggctagtccctcacacattactaccgcaaatctgccaccacaaattagctccattattcagggtcagttggttcaacagcagcaggtgctgcaggggccccccctgcctcggcctctcggcttcgaacggacaccgggggtgctgttacccggtgcggggggtgcagccgggttcggtatgacatctccccctcctccgacgtccccttctcgaaccgccgtaccccccggcctgtccagcttacctttgaccagtgtggggaacaccgggatgaagaaggtgcctaaaaaactggaggagatcccccccgctagccctgaaatggcacagatgcgaaaacagtgcctcgactatcactaccaggagatgcaggccctcaaggaagtgtttaaagaatacctcatcgagctgtttttccttcagcatttccaggggaatatgatggacttcctggccttcaagaagaagcactacgcccctctacaggcttacttgagacaaaatgacctcgacatcgaggaggaggaggaagaagaggaggaagaggaagagaaatccgaggtcataaacgacgaacaacaggctctcgctggatctctggtggccggcgctggctctactgttgaaaccgacctgttcaagaggcagcaagctatgccctcaaccgggatggccgaacaatctaaacggcccaggttggaagtgggccaccagggggtcgtctttcagcacccaggggccgacgcgggcgtgccattgcagcaactgatgcctactgcgcagggcggaatgccaccaacaccacaggccgcacagcttgctgggcagcgccaatcccagcagcagtatgatccctctacgggccctcccgtgcagaatgccgccagtctgcatacaccactgccgcagctgcccggcagattgcctccagcgggcgtccccactgctgctctgagtagcgcgctgcaattcgcccagcagcctcaggtagtcgaggcccagacccagttgcagatccctgtgaagacccagcagccaaacgtcccgattcccgcaccgccctcaagccagcttcccatcccaccaagtcagccagctcagctagctctccacgtcccaactcccggaaaggtgcaggtacaggctagccagcttagtagcctgccacaaatggttgcatccacccgtctccccgttgatcccgcccccccctgcccgcgacctctgccaacaagtagcacgagcagcctggcaccagtcagcgggtcaggacccggaccttctccagctcgctcttcacccgtaaacagaccatctagtgctactaacaaagctctctcccccgtgaccagccgtacgccaggtgtcgttgcaagcgcccccacaaagccccagtctcctgcacaaaacgctacaagcagtcaggatagctcccaggacacccttacggaacaaattacactggagaaccaggtacaccagcgcattgccgagctcaggaaggccggactgtggtcccaacgccggttgccaaaactgcaggaggccccacggcctaaatcccattgggattacctgctggaagagatgcagtggatggccactgattttgcacaggagagacgctggaaggtggcagctgccaaaaaactggtgcgtactgtcgtgaggcatcacgaagagaaacagcttagggaagagcgcggaaaaaaagaggaacagtcccgtctgcgtcggatcgccgcttcaactgcaagggagattgagtgtttttggtctaacatagagcaagtggttgagattaaattgcgcgtagaattagaggaaaagaggaagaaggccctgaatctgcaaaaggtgagcagacgtggtaaagaactgcgccccaaagggttcgatgcacttcaagagagcagcttggatagtggaatgtcgggacgtaaaaggaaagcttccatctctctgactgatgatgaagtggacgatgaagaggaaacaatcgaggaggaggaagcaaatgaaggggtcgtagatcaccagactgagctgtcaaatctggcaaaggaggccgaactgccgctactcgatctgatgaaactctatgagggagcttttcttccaagctcacagtggccacggcctaagcctgatggtgaggacacctctggtgaagaagatgccgacgactgcccaggcgacagagaatcacggaaagacctggtgctgatagactctttatttatcatggatcagttcaaggccgccgaacgtatgaacattggcaagcctaacgctaaggacatcgccgacgtgaccgctgtggcagaagccattctacccaaaggaagtgccagggtgaccacgtcggtcaagtttaacgcaccttctcttctttacggcgccctgagggattatcagaaaataggtcttgattggctcgccaaactgtatcgaaagaatctcaacgggatccttgcagacgaagccggcctgggaaaaacagtacagatcattgccttctttgctcacttggcgtgtaacgaggggaattggggtccccacttggttgtggtccgatcctgcaatatccttaagtgggagttggaacttaagcgttggtgccccggtttgaagatccttagctatattggatcccatcgagaactcaaggcgaagagacaggaatgggcagagccaaactcttttcacgtctgtatcacctcctatacccagttcttcagagggctcaccgccttcacacgtgtgcggtggaagtgcctggttattgacgaaatgcagcgtgtgaaaggtatgactgagagacattgggaggcagtcttcacactacagagccagcagcgcctgctgctgattgactctccactgcataatactttcctggagctgtggaccatggttcactttctggtgccgggaatttcccggccctatttgtcgtctccgctccgggcaccaagtgaggaatcccaggattactaccacaaggtagtgatccgactgcatcgcgtgactcagccgttcatcctgaggcggacaaagcgtgatgtggaaaagcagctgacgaagaagtacgagcacgtgttgaaatgtaggctgagcaatcgccagaaagccctatatgaggacgtgatcctccagcccggaacgcaggaggctctgaagtcgggtcactttgtgaatgtcctcagtatcctggtgcggctgcagagaatatgcaaccacccaggtcttgtggagccgaggcacccaggaagcagctacgtggcaggcccacttgaatatccttccgccagcctgatcctcaaggctctagaacgcgacttctggaaagaagcagacttaagtatgttcgatctgatcggtctcgaaaataaaattacccgtcatgaggcggaattgctctctaagaaaaagatcccacgcaagctgatggaggagattagcacttccgcagcaccggccgcccgcccagccgcagcaaaactaaaagcctcacgcctgttccagcctgtgcaatacggccaaaaaccggaaggtcgtacagtggcctttccttcaacgcaccccccccggaccgctgctcccacgacagcatccgctgcccctcaaggtcctctgcgtgggagaccccctattgccactttttcagcgaatcccgaggccaaaggcggggaagttgtgaaaattgcccagttagcatctattaccggaccccaatcaagggtggcccagcctgaaacccctgtcacactgcagttccaaggcagcaaatttacattatcacatagtcaactgcggcagctgacagccggccagcctttgcagttgcaggggagtgtgcttcagatcgtgtccgcgcctggccagccatatcttcgagcacctggacctgtcgtgatgcagacggtgtcccaagctggggcagtccatggcgctctaggaagtaagcctcccgctggcgggccttccccagccccgctgacaccccaggttggcgtgccaggcagagtggccgtgaacgccttggcagttggagagcctggaaccgcctctaaaccagcttccccaatcgggggtccaactcaagaggagaagaccaggttactgaaagagaggctcgaccaaatctacctggtcaatgaaagaagatgttcccaggccccagtctacgggagggacctactacgaatttgcgccctgccttcccacgggcgggtgcagtggcgcgggtcattggacggaaggcgcggtaaggaagccggacctgcccattcgtacactagtagctctgagagcccgtctgaactgatgcttacactctgccgctgtggggaatcactgcaagacgtgatcgatcgggttgctttcgtgatccccccggtagtggccgctcccccatctcttagagtgccgcgtccaccccctctttacagccacagaatgaggatcctccgccagggtctgcgggagcacgctgcgccttacttccaacagctgaggcaaactactgctccacgactgcttcagtttcctgaattaagactggtacagtttgactctgggaaactggaagccctagcaatcctactgcagaaactcaagtctgagggccggcgcgtgctcattctctcccagatgatcttgatgctcgatattctggaaatgtttctgaatttccattacttgacctacgttcgcatcgatgaaaacgccagctccgagcaacggcaggagctgatgcgaagctttaatcgggaccgcaggatcttctgtgctattctcagcacccactccagaacaacaggaattaacctggtggaagcagacacagttgtcttttacgataacgacctgaacccagtgatggatgccaaggcacaagaatggtgtgataggataggtaggtgtaaagatattcacatctacagactggtgagtggtaactcaattgaggaaaagctgctgaaaaatgggaccaaagacttgattcgagaagtcgctgcgcagggcaatgactattcgatggccttcttgacacagagaacaattcaggaacttttcgaggtatactctcctatggacgacgcaggatttccagtcaaggcagaggagttcgttgtcctgtcccaggaacccagtgtgaccgaaactatagctcccaagatcgctagaccattcatcgaagctctgaaatccatcgagtacttggaggaggatgcacagaagtcagctcaagagggagttctcggcccccataccgatgctctgtcatccgacagtgagaatatgccatgtgatgaggagccaagtcagctggaggagttagcggatttcatggaacaactgacccccatcgaaaaatacgcactgaactacttggagctctttcatacatcaattgaacaagagaaggagaggaacagtgaagacgctgtgatgacagccgttagagcctgggagttctggaacctcaagaccctgcaggagcgggaggcgagattacgccttgaacaagaggaggctgagctcctcacatatacccgcgaggatgcctattccatggagtatgtctacgaggatgtggacggacagacagaggtcatgccgctgtggactcctccaacgcccccacaggatgattccgatatctaccttgactcagttatgtgcctgatgtacgaggcgacacccattccagaagccaagttgccgccggtgtatgttcggaaagagcgaaagaggcataagacggaccctagcgcggccggccgtaaaaagaagcagcgacatggagaggccgtcgtgcctccgaggagcctgttcgatcgggctactcccggtctactgaaaatacgtcgcgagggcaaagaacagaagaagaacatcctgttgaaacagcaagtgccgtttgccaaacctctacctacttttgcaaagccaacggccgagccgggacaggataatcccgagtggcttatttcagaggattgggcactgttgcaggctgtcaaacagctactggagctgccactcaacctcacaatcgtgtccccagcacacacgcccaattgggaccttgtgtctgatgtggtaaatagctgctcaaggatctatcgatcatctaaacagtgccgaaaccggtacgagaacgtgattatcccacgggaggagggtaagtcgaagaacaacagaccccttaggacctctcagatctatgcccaggacgaaaacgccacacatacacagttgtacacctcccatttcgatctcatgaagatgacagccggaaagagatcaccaccaatcaagcctctcctgggcatgaatccattccagaagaatcctaagcacgcctcggtgctggccgagtccgggatcaactacgacaaacctctgccaccaattcaggtagcatcactaagagctgagcgcattgcgaaggagaagaaagctttggcggaccagcagaaggctcagcagcccgcagtcgcccagccacctcctcctcagccccagccacctcctccgcctcagcagcctccgccaccactgcctcagcctcaggccgctgggtcacagcctccggcagggcccccagcagtacagccccagccccagccccagccgcagacacagccccaaccggtacaagcaccagctaaggcccagcctgccatcactaccggaggtagtgcggccgttctcgctggtacaataaaaaccagtgtcacgggcactagcatgcccaccggcgccgttagtggtaatgtgattgtgaacactatcgcgggggtcccagcggccaccttccagagcatcaacaaaagattagcttcccctgtggctcccggcgccttgacgacacctggaggctctgcccccgcccaagtggttcatactcagccgcctccccgggcggtgggatcacctgctaccgctacacccgatctggttagcatggccacaacacagggcgttagggccgtcaccagcgtcacggcctcggccgtggtgactactaacctgacgccggtccagacgcctgcaagaagccttgttccgcaggtttctcaagccactggcgtgcagcttcctggcaaaactatcactcccgcacattttcagcttctacgccagcaacagcagcaacagcaacagcagcaacagcagcagcagcagcaacagcaacaacagcagcagcagcagcagcagcagcagcaaacgacaaccacttcacaggtgcaagttccgcaaattcagggtcaggctcaaagccctgcgcaaataaaagccgtgggtaaactcacccctgaacatctgatcaagatgcaaaaacagaaactgcagatgcctccccagccccctccaccacaggctcagtctgccccccctcagccaacagcccaagtgcaagtgcagaccagtcagccaccacagcagcagagccctcagcttacaactgtgacagccccccggcccggtgcactgctgaccggaaccaccgtcgccaatctgcaggtggcaagactgactagagttccgacaagccagctccaggctcagggccagatgcaaacccaggcccctcagccagcccaggtggcattagccaaacctccagtggtttccgttcccgccgcagtcgttagttctcctggcgtcactaccctgcctatgaacgtcgctggaatatcagtcgccatcggacaaccacagaaggcggcaggccaaacggttgtcgcccagcctgtgcacatgcagcagctgctgaaattaaaacagcaagccgtgcagcaacagaaggccattcaaccacaggccgctcagggacctgcagccgtacaacagaagatcacagcccagcagattaccactcctggcgctcagcagaaagtggcctatgccgcgcagcccgctctgaagactcagtttctgacaaccccaatctcgcaggctcagaaactagccggggcgcaacaggtgcagactcaaatacaggtggccaaactgcctcaggtagtgcagcagcagaccccggtagcatcgatccagcaagtcgcaagtgcctctcaacaggcttctccccaaactgtggccctcacgcaagccaccgcagccggacagcaggttcagatgattccagctgttacagctaccgcccaagtcgtgcagcagaagttgatccagcagcaggtggtgactactgcatctgcgccccttcagacgccaggggcaccaaaccctgcacaggtgccagcctcttcggactcgcccagccagcagcccaaattgcagatgagggttccggccgtgcggcttaagaccccaacaaagcctccatgtcagtag

SEQ ID NO: 186564 - DNA, 9261 bp, Artificial Sequence
  derived and/or modified sequence
atgcaccacggcaccggcccccagaacgtgcagcaccagctgcagcgctcaagagcctgccctggtagcgagggagaggagcaacctgcacaccccaatccaccaccctccccagccgctccattcgctccatctgcgtccccttctgccccccagagtccatcttatcaaatacagcagttgatgaaccggagtcccgccactggccagaacgttaatattacactgcagagcgttggcccagtggtagggggtaatcagcaaattacactcgccccactacctctgccctcccctacttcacctgggtttcagtttagcgctcagcctaggcggtttgagcatgggtcccctagctacatacaggttacttcacccctctcccaacaagtgcagacccagtctcccacccagccctcacccggacccggacaggccctgcaaaatgttcgggccggggctcctggacctggcctgggactttgctcaagctctcctacaggaggttttgtggatgcctccgtgctagtgaggcagatcagccttagtccatcgagtggcggccatttcgtttttcaggatgggtccggattgactcaaattgcccagggcgctcaggtgcagctccagcacccagggacccccatcaccgtgcgcgagcgcagaccttctcagccgcatacccagtcaggggggacgatccatcacctggggccacagtccccagccgccgctggtggagccggcctgcaacccctggcaagcccatcccatatcactactgctaatctgcctcctcagatttcctccattatccaggggcagttagtccagcagcagcaagtgttacagggcccaccactcccacgccccctcgggttcgaacggacaccaggggtgctcctcccaggcgcaggtggcgccgccggattcggtatgacttctccccccccccctacatcaccgtctcgaacagctgtgccccctgggctgagtagcttgcctctcacaagtgtgggcaacacaggcatgaagaaggtgcccaaaaagctagaagaaatcccacccgcctccccagagatggcccagatgcgcaaacaatgcctggactatcattaccaggagatgcaggcactcaaagaggttttcaaggaatatttaatagagctcttttttcttcaacactttcaggggaacatgatggactttttggcattcaagaagaaacactatgccccactacaagcttaccttaggcagaacgacctggatatagaggaagaagaggaagaggaggaagaagaagaggagaagagtgaggtgattaacgatgaacaggctctggcaggctccctagtagccggggccggaagcactgttgaaaccgatctttttaagagacagcaggcaatgccctcaaccggcatggcaggggggatgccccccacaccccaggctgcacaattagccggacagagacaatcccagcagcaatacgacccgtctaccggacctccagtgcagaatgctgctagtcttcatacgccgctgccacagttaccgggacggctcccacccgctggcgtgcccaccgcagctctcagctccgctctacagttcgcccagcaaccacaggtggtcgaggctcagacccaactgcagataccggtaaaaactcagcaacctaacgtgccaatcccagcccccccttcctcccagttacctatccctccgagccagcccgcgcagctcgctttgcacgtgcccactcccggaaaagtgcaggtccaggcgtcacagctgagctccctgccgcagatggttgcaagcaccaggcttccggtagatccagctcccccttgtcctagacccctccccaccagttcgacctctagcctggcccctgtgtctgggagcggtccagggcctagcccagcaaggtcttccccagtaaatcgcccttctagtgcgaccaacaaagccctgtcacctgtgactagtaggacgcccggagtcgttgcttcagccccaaccaagccccagtctccggcccagaacgccacttcttcccaggacagttcacaggacactttaaccgagcagattacgttagaaaaccaagtgcaccagcggattgccgaactcagaaaggccggactgtggtcccagaggcgtttgcccaaactgcaggaggctccccgacctaaatcacattgggactacctcctcgaggagatgcagtggatggcaaccgacttcgcccaggaaaggagatggaaggtggcagctgcaaagaaattagttcgtactgttgtgcgtcaccatgaggagaaacaactccgagaagagaggggaaagaaggaggagcagtcgaggctcaggcgaatcgctgcctcaacagcaagggaaatcgagtgcttctggagtaatatagagcaggtggttgagatcaagctgcgtgttgagctcgaggagaagcgaaagaaagccctaaatctccagaaagtatcaagacggggaaaggagctgagacccaaaggttttgacgccttgcaagaatccagccttgattctggcatgtcgggtcggaaacgaaaggcctcaatttctcttaccgatgacgaagtggacgacgaagaggagacaatcgaggaagaagaggctaacgagggtgtcgttgatcaccagactgagctgtctaacctagctaaggaggcggagctgccgctgcttgatctgatgaagctgtatgaaggggctttcctgccatcctcacaatggcctagaccgaagcctgacggcgaagatacatctggtgaggaggatgccgatgattgcccaggggacagggagtcccgcaaggacctcgtcctaatcgacagcctctttattatggaccagttcaaggctgccgagcggatgaacatcggtaagcctaacgccaaggatattgcggacgtgaccgcggtagctgaggctattctaccaaagggttccgccagagttactaccagtgtgaaattcaatgcaccttccttattgtacggcgcgctcagggactatcaaaagatcggcctggactggctggcgaagctttatcgaaaaaacctgaacgggattctggccgatgaggccggccttggcaagacagtgcaaatcatagcattttttgcccacctggcttgcaatgaagggaattggggaccgcaccttgtcgtggtaagaagctgcaacatcctgaaatgggaactggagctgaagcgctggtgcccaggcttaaaaattctttcttatattggatcccaccgcgagctgaaagcaaaacgacaggagtgggctgaacccaactctttccacgtgtgcattacaagctacacccagttctttcgcgggctcacagcatttacaagagtgcggtggaaatgcctggtgatcgacgaaatgcaaagggttaaaggaatgacggagcggcactgggaggctgtgttcaccctgcaaagccaacaaagactcttgctaattgattcacccctccataacactttccttgagctgtggaccatggttcacttcctcgtccctggtataagccgtccctatctcagtagccctctgagggccccatctgaggagtctcaggactactatcacaaagtagtgatcaggctgcaccgcgttacgcagccattcatccttcggagaactaagagggacgttgagaagcaactcaccaagaagtatgaacacgtgctgaagtgccggctcagtaatcggcagaaggccctgtacgaggacgtcatcctccaaccagggacacaggaggcgctgaaatcaggccattttgtcaatgttttgtcgatcctggtccgcctccagagaatatgtaatcatcctggcttagtagaacctcggcaccctggaagttcctatgttgcgggcccgctcgaataccctagcgcatcactcattttgaaagccctggagcgggatttctggaaagaggcagacctgagcatgtttgacctcatcgggcttgaaaacaagattacacggcacgaggcggaactcctgagtaagaaaaaaatacccaggaagctgatggaagagatcagcacgtccgccgctcctgccgcacggcccgccgccgccaaactcaaggctagccgcctctttcagcccgtgcagtatggccagaaaccggaaggtcgaaccgtcgcctttccatccactcatcccccaaggaccgctgcaccgactacagcctcggccgcccctcagggccccttgcgagggcggccacctattgcaacattctcggctaaccctgaggccaaggccgctgcggctccgttccaaaccagccaggcttcagcgtcggctccgcggcaccagcccgcatccgctagctccacagcggcaagcccagctcacccagctaagctgcgtgcccagactaccgcccaggctagcacccccggccagcccccacctcagccacaggcaccgtctcatgcagcgggccaaagtgctctgccgcaaagactcgtcctcccatcccaagcccaggcccgccttcccagcggcgaggtggtcaagatagcacagctggccagcatcaccggaccccagtcacgcgttgcgcagccagaaacaccagtgactctccaatttcaaggtagtaaatttaccctgagccattcacagctgcgtcaattaacagccggccagcctctgcagctgcaaggcagcgttctgcagattgtgtccgcacccggccaaccctatctgcgggccccgggacccgtggtcatgcagacagtgagtcaggccggggcggttcacggggctttagggagtaagccccccgctggcggaccttcccccgccccattaaccccacaggtaggagttccaggacgggtggctgtcaacgctctggctgtgggcgagcctggcaccgcctccaagcctgcctcacccatcggtggtccaacccaggaggagaagactcgcttgcttaaggaacggctcgatcagatttacctggttaacgagcgtcgctgttctcaggctcccgtgtatggccgagatctcctcagaatctgcgctctgcctagccacggcagagtgcagtggcgggggagcctggacggaaggagaggaaaggaagctggccctgcacactcctacacatctagttcggaaagtccatcagagctgatgttaaccctctgtcggtgtggagagtccctccaggacgttattgatagggtcgcttttgtgatccccccagtggtggctgcaccaccctccctacgcgtgcccagacctccaccgctatacagtcaccgaatgcggatactcaggcaggggttgcgagagcacgctgccccttactttcagcagttacgccagaccaccgcacccaggctgctccaatttcctgaactgcgcctggtgcagttcgattccggcaaattagaagcactggccattctcttgcagaaacttaagtccgaaggacggcgagtgctgatcttgtcacagatgatacttatgctggatattcttgagatgtttctgaacttccactacctgacatacgtccgaattgacgagaacgcaagtagtgagcagaggcaggaactcatgcgcagttttaaccgtgaccggcggatcttctgcgccatcctgtccacacatagccggacaacaggcattaacctcgtggaagccgatacagtggtattctacgacaacgacctgaaccctgtgatggatgccaaagcccaggagtggtgcgaccgcatcggacggtgcaaggatattcacatctatcgcctggtgtccggaaatagcatcgaagagaagttgctcaaaaacggtaccaaggatctcattcgtgaggtggccgcacagggcaacgattactcaatggcattcctaacgcagaggactatacaggaactgtttgaggtgtacagtcccatggacgatgcaggcttcccagtgaaggccgaggaatttgtggtcctgagccaagagccaagcgtgacggaaactatcgcacccaagatcgcacggccttttattgaggccctgaaaagcatcgagtatttggaagaggatgcccaaaagtcagctcaggaaggggtcttgggacctcatacagacgcactgtcatcagactccgaaaatatgccttgcgacgaagaaccgagtcagttagaggagctggctgattttatggaacagcttacacccatcgaaaagtatgcgcttaactacctagagctgttccacaccagcatcgaacaagagaaagagcgcaactcagaagacgccgtgatgacggccgttagagcctgggagttctggaacctcaagacattacaagaaagggaagcccgcttgcgtcttgaacaagaagaagccgaactgttgacttatacccgtgaggatgcctactctatggaatacgtctacgaagacgttgatgggcagactgaagtgatgcctctgtggacaccacctaccccaccgcaggacgattctgatatttacctcgactccgttatgtgcctcatgtacgaagctacccctatacctgaagctaaactgccacctgtctatgtcaggaaggaacgcaagcgccataaaacggacccctccgccgcaggcaggaaaaaaaagcaacgacacggagaggccgtggtgcctcctcggtccctgttcgatagagccacgcctggcctcctgaaaattcgccgggagggtaaggaacagaagaaaaacatcttattaaaacagcaggttccttttgcaaagccactgccaacatttgctaaaccaacagcagagcccggacaggacaatccagaatggctgatttccgaagactgggcacttttgcaggctgtgaagcaactcttagagctgccccttaacctcaccatcgtttctcctgcacataccccaaactgggatttggtctctgacgttgtgaattcctgctctcggatttaccggagctcaaagcaatgtcgtaacaggtacgagaatgtgatcatcccacgggaagagggcaaatccaagaacaacagacccctgaggacctctcagatttacgctcaagacgaaaacgccacgcacacacagctctatacttcacacttcgatcttatgaaaatgaccgcaggaaagaggtcgccgcctattaaaccactgctcggcatgaaccctttccagaagaacccaaagcatgcttctgtgctggcagaatccgggatcaactacgataagccgctcccccccattcaggtggccagtctgcgagctgaaagaatagctaaagagaaaaaagctctggcagaccagcagaaagcgcagcagcccgccgtcgcccaaccaccccccccgcagccccaacctcccccccccccgcagcagccccccccacctcttccccagccccaagcagcaggctctcagccacctgctggtccgcccgctgtgcagccccagccccaacctcagccgcagacacagccccaacccgtgcaggctcctgcgaaggcccagcctgcaatcacaaccggaggctctgctgcagtcctcgccggcacaattaagacctccgttactggcacaagcatgccaactggagcggtgtccggcaacgtgatagtaaacacaattgcaggcgtgccagctgctacatttcagtccattaataagcgtctcgcttcaccagtggcacctggtgcactgaccactcccggagggtctgccccagcgcaagttgtgcacactcagcctccccccagagcagttgggagccccgctactgcaacccccgatctggtaagtatggctaccactcagggagtgagggctgtgacctctgtgaccgcttcagccgtggtaactacaaatcttaccccagtgcaaactcccgcacgctcactggtgcctcaggtgtcccaagccaccggcgttcagctgccgggaaaaacaataacacccgcacacttccagctgctgcgccagcaacagcagcagcagcagcagcaacagcagcagcagcagcagcagcaacagcagcagcagcaacagcagcagcagcagcagcagacaactactaccagccaagtccaggtgccgcagatccagggccaggcccagagccctgcccagattaaggcagtcggcaagctgacacccgaacacttgatcaagatgcagaaacagaaattgcaaatgcccccacagcccccaccaccgcaggcacagagtgctcctccgcagccaaccgctcaagtgcaagtccagacatcccagcccccccagcagcagagtccacaactcacgaccgtgacagcgcctcggccaggggcgctgctgactggaaccactgtggccaatctgcaagttgccagactcactcgggtccctaccagccaactacaggcccagggccagatgcaaacccaagccccacagcctgcacaggtagccttagccaagcctccagtggtgtcggtgcccgccgcggtggtgagcagccccggcgtcaccacccttccaatgaatgtcgccgggatatctgttgccattggacagccacagaaagctgccgggcaaaccgtggtagcccagcctgttcatatgcagcaattgctcaagttgaagcagcaagcagttcagcagcaaaaagccattcagccccaggcagcgcagggtcctgcagcggtgcaacagaagattaccgctcagcagatcacaacccccggagcccagcaaaaggtcgcatatgccgcccaacctgcccttaaaacccagtttttgaccacacctattagccaggctcagaaattagccggggcccagcaagtgcagacacagattcaggtagcgaaactgccccaggtcgtccagcagcagacccctgttgcctctattcaacaggtggcctctgcatctcagcaagcctccccgcaaactgttgctctgacacaagcgaccgccgctggtcagcaggttcagatgatcccagcggttactgccacagcccaggttgttcaacagaaacttatccagcagcaggtagtgacaactgcctccgctccgttgcaaacgcctggcgcaccgaatcccgctcaggttccggcttctagtgactcacctagccagcagccaaaacttcagatgagggtcccggccgtgaggttgaaaacacccacaaagccaccctgccagtag

SEQ ID NO: 186565 - DNA, 9480 bp, Artificial Sequence
  derived and/or modified sequence
atgcaccacggcaccggcccccagaacgtgcagcaccagctgcagagatcaagggcgtgccctggatcagagggggaggagcaacctgctcaccccaacccaccccctagcccggcggcccccttcgcaccgtcggcatctccttctgcgccacaatctccgagttatcagattcagcagttgatgaatagaagccctgcgacaggccaaaatgttaacatcacactgcagagcgtgggcccagtggtcggaggcaatcagcagatcaccctagcccctttacccctgccaagtccaaccagtccggggttccagtttagcgcccaacctaggcggtttgaacatggatccccatcctatattcaggtgacttcaccactaagtcagcaggtgcagactcaatctcctacgcaaccttccccgggcccgggccaggcactgcagaatgtcagagcaggcgcaccgggccctggactcggtctctgtagctcttcacctaccggcggtttcgtcgacgccagtgtcctcgtgaggcagatctcgttgagtccttcttctggcggtcattttgtctttcaggatggaagtgggctcacccagattgcccagggtgcacaggtgcagctccagcatcctggcaccccaatcaccgtgcgcgagagaagaccatcccaacctcatacacagtctggaggcacaatccaccacctgggccctcaatcacccgccgcagcaggcggtgctggcctgcaaccgttagcctcaccttcccatattactactgccaacctgcctccacaaatatcatccataattcaaggccagctggtccagcagcaacaagtgctgcagggcccccctctgcctcgcccactgggatttgaaaggacccccggcgtcttgctgcccggggcgggaggagctgccggctttggaatgacgtcacctcctccccccacgtcaccatcccgcacagccgtccccccagggctctccagcctgccattgaccagtgtaggaaatacgggaatgaagaaagtccctaaaaagctggaagaaatcccgcctgcgagcccggaaatggcacagatgagaaagcagtgccttgattaccactatcaggagatgcaagccttgaaagaggtgttcaaggagtatctgattgagctgtttttcttgcagcacttccaaggtaatatgatggacttcctggcattcaaaaaaaagcactatgcacctttgcaggcatacctcagacagaacgacctggacatcgaagaggaagaagaagaggaagaagaagaagaagagaaatccgaggttataaacgacgaagtcaaggttgtgacaggaaaagacggacagaccgggacacctgtggccattgcaacccagctgccgcctaaggtgtccgccgccttcagcagccagcagcagccgtttcaacaggcattggccggatccctcgtggctggcgccggaagtacagtggagaccgacctctttaaacgccagcaggccatgccttcaacaggaatggcagagcaatcaaaacggccgcggctggaagtgggtcatcagggggtggtctttcaacatcccggagcagacgcaggagtgcctctccaacagcttatgcctaccgctcaagggggaatgccacccactccacaggccgctcagttggctggccagaggcagtcacaacaacagtacgacccaagcaccggcccgcccgttcagaatgctgcctcgctccatacccccttaccgcagctgcctgggcgcctgcccccagccggcgtgcctactgcagcgctatcttctgccctccagtttgctcagcagccacaagttgtggaggctcagacacagctgcagatccccgtgaaaacacagcagccgaatgtaccaattcctgccccccccagctctcagctgccaattcccccctctcaaccagcccagctggctctgcacgtgcccacgcctgggaaagtccaggtgcaggccagccagctctcctcactgccgcagatggtggcttccacacgcctccctgttgatcctgctcccccctgcccacggcctctcccaacttccagtacttcttccctggcgccggtgagtggttccgggcctggaccatctcccgcccgatcttcccctgtaaataggcctagttcagccactaacaaagccctgtccccagtcacgagtcggacacctggggttgtggcctctgctccaacgaaaccccaaagtcctgcccagaatgccacctcaagccaggactcctcacaagacacacttaccgaacagataactctcgaaaaccaggtgcatcagcgcatcgctgaactgaggaaggcagggctgtggtcccagaggcgcctgccaaaactgcaggaggccccgcgacccaaatcgcactgggattacctccttgaggaaatgcaatggatggctacagattttgctcaggaaaggagatggaaggtcgctgccgctaaaaaactggtgaggaccgtcgtcaggcatcacgaggagaagcagctgcgggaagagagaggcaaaaaagaggaacagtctcgcctgaggcgaattgcagcctccactgcaagagaaatcgaatgcttctggtctaacatagagcaggtggtggaaatcaagctgcgagtggagcttgaggagaaaaggaagaaagcactgaatctgcagaaagtgtctcgtaggggcaaggaactgcgcccaaaaggctttgatgcccttcaagagtcgagcctcgactctgggatgtccggtagaaagagaaaggcaagcatttctctgactgatgacgaagtggacgacgaggaggagacaattgaagaagaggaggcaaacgagggagtcgttgaccaccaaactgagctgtcgaacttggccaaagaagccgaactgcccctgcttgacttaatgaaattgtatgagggagcttttctcccaagctcacaatggccccggcctaaaccagatggggaggacacgtccggagaggaggatgcggatgattgtcctggagacagggagagccgcaaggatctggtgctgattgacagtctgttcataatggaccagttcaaggccgctgagcgcatgaatatcggtaaaccaaatgccaaggatatagctgacgtgactgcggtggccgaagcgatcctgcctaaaggatctgcccgagtgacaacctccgtcaagttcaacgcgccctccctgctgtatggagcccttcgggactatcagaagatcggactggattggctggccaaattgtatcggaagaacttgaacggcatactggccgatgaagccggactgggaaagaccgtgcaaattattgcttttttcgcccatcttgcctgcaatgagggaaattggggaccacatctggtcgttgtgaggtcctgcaatatccttaagtgggagctcgaacttaaaagatggtgtcctggtctgaagatactctcctacatagggtcgcaccgagagctaaaggctaaaagacaggaatgggccgagcccaacagcttccacgtgtgcatcacttcttatacccagttcttcaggggtctcacggcattcacacgtgtacggtggaagtgcctcgtgattgatgagatgcagcgtgtcaagggtatgaccgagcggcactgggaagccgtgttcaccttgcaatctcagcaaagactgctcctgattgatagtccactgcacaacactttcctggagctttggaccatggtgcatttcctggtccccggtatcagtcggccctatctgagcagtccactgagggcgcccagtgaggagagccaggactactatcataaagtggtgataagattgcacagagtgacccaaccctttatcctgagacggaccaagcgggacgtggagaagcagttgaccaagaaatatgagcatgtgctgaaatgtcggctcagcaatcgtcagaaggcgctttacgaggatgtaattctgcaacccggaactcaagaagcactaaagtccggacacttcgttaatgttctgagtattttggtgcgcttacagcggatttgtaatcatcctggactagttgaaccacggcacccaggttcaagctatgtggcaggcccattggagtacccatcagctagcctcattctcaaagccctagaacgcgacttttggaaagaggctgacctaagcatgttcgacttgatcggactagagaataagataacacgccacgaggcggagctgcttagtaaaaagaaaatccccagaaaactcatggaagagatttccacgtctgcggccccggctgctcgcccggctgccgcaaagttgaaggcatcacggcttttccagccggtgcagtacgggcagaaaccagaaggcagaaccgtcgctttccctagcacacaccctccacggactgcagctccgaccacggcaagcgctgccccccagggaccgcttcgtggtcggcctccaattgctacgttcagtgcaaatcccgaagctaaggccgcagcggcaccctttcagacgtcacaggcatcagccagtgctccgaggcatcagcccgcttccgcatcaagcacagcggcaagtcccgcccacccggctaaactccgcgcccagaccaccgctcaggccagcactcccggccagccgcctcctcagccacaagctccgtctcacgcagccggccaaagcgccctgccgcagagactcgttctgccaagccaagcgcaggccaggctacctagtggcgaagttgtgaagatcgcccaactggcaagtattacaggaccccagtctcgcgtcgcccagccagagacgcccgtgacactccaattccagggcagcaaatttaccctgagccattcacaattacgccagctgaccgccggtcagcctttgcaactgcagggcagcgtcctgcagatcgtgtctgcacccggccaaccgtacctgcgcgcacccggccccgtcgtgatgcaaactgtgtcacaggccggagctgtgcatggggccctcggttctaaaccacctgccggtggcccctcgcccgctccattaacacctcaagtgggagtcccaggtagagttgccgtgaacgccctcgcagtcggcgaacccggaacggcttcaaagccagcctctccaataggcggtcctacgcaggaagaaaagacgcggctactgaaagagaggttagaccagatctatctggtgaacgagcgccgttgtagccaagcgccggtgtacgggagggatttactccggatatgcgccctcccgtcacatggaagagttcagtggcgcggttcgctggacggtagacgtggaaaagaggcgggccccgcccactcttacacctccagctcagagtccccaagtgagcttatgttgactctttgcaggtgcggcgagagcctgcaggacgtgattgatcgcgtcgcttttgtgattcctccggtagtggccgcccctccttcattgcgggtccctcgacccccacccctctactctcacagaatgaggatccttagacaagggctccgtgaacacgcggcgccttactttcagcagctgcgccagaccaccgccccaaggttactgcaattccccgaactgcggctcgtgcagttcgactccggcaaactcgaggctctggccatcctcctgcaaaaattgaagagtgaagggaggcgtgtgttgattctatcacagatgatcttgatgctggacatcttagagatgttcctgaatttccactacctgacctacgtgcgcatcgacgaaaatgcgtcaagtgaacagagacaggaattaatgagatcctttaaccgggatcggagaattttttgcgctatcctgtcaacacactctaggactaccggaatcaacctggttgaggccgatacagtggtcttctacgacaacgaccttaatcccgttatggatgccaaagcccaggaatggtgtgacagaattggccgctgcaaggacatccatatctaccgcctggtatccggaaacagcatagaagagaagttgcttaagaacgggactaaagatctcatcagagaggtggccgcccagggaaacgactattccatggcatttctgacccagaggacaattcaggagctctttgaggtctactcccctatggacgacgctggatttcccgtgaaggccgaagaattcgttgtcctgagtcaagagccttctgtaaccgaaactattgctcccaaaatcgcccgcccattcatcgaggccctcaaatctatcgagtacctggaagaggatgcccaaaagagcgcccaagaaggtgtgctcggcccccacacagacgcgttgtccagcgactcagaaaacatgccctgcgacgaagaaccgagccaattagaagagcttgctgactttatggaacagcttacccccatcgaaaaatacgccctgaactacctggagttattccatacatctatcgaacaggagaaagagcggaattccgaggacgcagtcatgacagctgtgcgggcctgggaattctggaatctgaagacactgcaggagagagaagcccgcctgaggctcgaacaggaggaggccgagctcctgacatatactcgcgaggacgcgtatagcatggagtatgtgtacgaggatgtagacgggcagaccgaagtcatgcctttatggaccccacctaccccaccccaggatgactcggatatctacctggactcggtcatgtgtctaatgtacgaagcgacccccatacctgaggccaaacttccccccgtatacgtgcggaaagagagaaaaaggcacaagacagatcccagcgccgccggcaggaagaagaagcagcgtcacggcgaggccgtggttccccccagatctctgttcgaccgcgcaacacccggactcctgaagatccgacgagagggcaaagaacaaaaaaagaatatcctgttgaagcagcaggtgcccttcgccaagcctctccctacattcgccaagccgactgcagaacccggccaggacaacccagaatggctcatatcagaggattgggctctcctccaagccgtgaagcagctgctggaacttccactgaacttaaccatagtatcacctgcccacacacccaattgggacctcgttagcgatgtcgtcaacagctgctcgagaatctaccggagtagcaagcaatgtaggaacagatacgaaaacgtgattattcctcgtgaggaaggcaaatcaaaaaataacagaccccttcggacaagccagatctatgcccaggatgagaatgctactcacactcagctgtatacatcacattttgaccttatgaagatgactgctggcaagcggagtccaccaattaaacctctcctgggaatgaacccattccagaagaatccaaagcatgcttccgtccttgcggaaagtgggattaactacgataagcctctacccccgatccaggtggcatcactgagggcagagcgcattgctaaagaaaaaaaggcattagccgaccaacaaaaggcccagcagcccgcagtcgcccagcctccacccccccagccacaaccgcccccccctccacagcagcctccaccacccctgcctcaaccccaagccgccgggtcccagcctccagcggggcctcctgctgttcaaccacagccccagccccaaccccaaacccagccccagccagtccaagcaccagccaaggcccagccggccatcaccaccggaggaagtgcggcagtccttgcaggaaccattaaaacaagcgtcaccggaacttcaatgccaacaggagccgtttcgggcaacgtaatagtgaacacaattgctggggtgccggctgccaccttccagagcatcaataaaagactggccagcccggtagcgccaggagccctaacaactccggggggcagtgcccccgctcaggtggtccacacccagcctcctccccgggccgtcggttcacccgcaaccgcaacaccagatctggtgtcgatggcaacaacacagggggtccgagccgttacaagcgtaacggctagcgccgtagttacaaccaatcttacacccgtgcaaaccccggcccgctccctggttcctcaggtgtctcaagccacaggagtgcagttacccggcaagacaattactcctgcccattttcagctgctgcgccagcagcagcagcagcagcagcagcagcagcagcagcagcaacagcagcagcaacagcagcagcagcagcagcaacagcagcagcagaccacgaccacttcacaggtgcaagtccctcaaatacagggccaggcccagtccccagcacagatcaaggccgtaggaaaactgacccctgagcacctgattaagatgcagaagcaaaaactccaaatgcccccacagccaccccctcctcaggctcagtctgctccgcctcagccgactgcccaagtacaggtccagacctctcagcccccacagcaacagtcaccacagctcacgaccgtaactgccccccgccccggcgccctattaaccggcactaccgtggctaatctgcaggttgcgcggctgacaagagtcccaaccagtcagctgcaggcccagggacaaatgcagacacaagcccctcagccagctcaggtcgcactcgcaaaacccccagtggtgagcgtgcctgccgcggtggtgtcaagcccaggcgttacaaccctcccaatgaacgtcgctggcatttctgttgcaatcggccagccccagaaagctgcaggtcaaaccgtggtggcccagcctgtgcatatgcagcagctgctcaaacttaaacagcaggcagtgcagcagcaaaaggctatccagcctcaggccgcccaagggcccgccgccgtgcaacaaaagatcacagcccaacagatcaccacccccggcgcccaacagaaggttgcttacgccgctcagcccgcactgaagacacagtttttgaccaccccaattagccaggcccagaagctggcgggggcccagcaggtgcaaacacaaattcaggtagccaagttgccacaagttgtgcaacagcagacaccagtggcctccatccagcaggtggctagtgcttctcagcaagcttccccacagacagtggctctcactcaggctacggccgcgggccaacaggtgcaaatgatccccgcggtcaccgcaacggcacaggtagtgcagcagaaattgatccagcagcaggtcgtgaccacagcgtcagctcctctccagacacccggagctccgaatccagcacaggtgcctgcatcctctgactccccgtctcagcaaccaaagctccagatgcgcgttcctgcggtccgtctgaaaacgccaacaaaacccccctgccagtag

SEQ ID NO: 186566 - DNA, 9372 bp, Artificial Sequence
  derived and/or modified sequence
atgcaccacggcaccggcccccagaacgtgcagcaccagctgcagcgtagcagggcttgccccggttccgaaggtgaagaacagccagctcatccaaatcctccaccttccccagctgctccctttgccccctcagcgtcaccctccgcaccgcaatccccctcctaccagatccaacagctcatgaacaggagtcccgccacaggtcaaaatgtgaatatcactctccagagcgtaggcccggttgtgggcgggaatcagcagatcactctggccccccttccacttccatcaccaacatctcctggatttcaattctccgctcagcccaggcgtttcgagcacgggtcccccagttatattcaggtgaccagtccactttcccagcaggtacagacgcagtcacccactcaacctagcccagggcccgggcaggccctccaaaacgtgcgcgccggcgcccctggccccggcctcgggctgtgctcaagttccccaaccggagggttcgtggacgcctcagttctggtccggcagatcagtctttccccctcaagcgggggccattttgtttttcaagatggctctggactgacacagattgctcagggtgcccaagttcaacttcaacaccctgggacccccatcactgtgagggaaagaagaccgtctcagccccacacacagagcggtggtacgatccaccatcttggcccacagtctcccgctgccgccgggggcgctggtttacagcctctggcctctccatcgcacatcacaacggctaaccttccaccgcagatcagctccattattcagggacagctcgttcagcagcagcaggtcctgcaaggtcctccactcccaagacctttgggtttcgagcgaactccgggcgtcctgctgccgggagctggaggggcggctggctttgggatgacgtcaccgccccctcccacctcgccatccaggaccgccgtgccgcctggacttagtagcttgcctttaacgtctgtgggaaacacaggtatgaaaaaggtgccgaaaaagctggaagaaatccccccagcgagcccagaaatggcccagatgagaaagcagtgcctggactatcattatcaggagatgcaggcgttgaaagaagtttttaaagagtatctgatcgagctattcttccttcaacacttccagggaaacatgatggatttcctcgcctttaagaagaaacattatgctccactacaggcgtatctgaggcagaatgaccttgatatcgaagaagaggaggaggaggaggaggaggaagaggaaaagagcgaagtaattaatgacgagcaacaggctcttgcaggatctctggttgccggagctggctcaaccgtggaaactgatctattcaaacggcagcaggccatgcctagcaccggtatggccgagcagtctaagcgcccaagactggaagttggacaccagggggtcgtgttccagcatcccggcgctgacgcaggagtgcccctgcagcagcttatgccaactgcccagggcgggatgcctcccacaccccaggcagcccagctcgcgggccagcgtcagtcccaacagcagtacgacccgtccacaggaccacccgtgcagaatgcagcatcccttcacacccctttgccccagttaccaggcagattgccacccgcgggtgtgcctacagctgctttaagttcagctcttcagtttgcccagcagccgcaggtcgtcgaagctcaaacacaattacagatccccgtgaaaacccagcagcctaacgtgccaatccccgctcccccatcctcgcagctgccaattccgccctctcagccagcacagctggccctccacgtaccaacacccggtaaggtgcaggtgcaggcctcccagctttcatcgttgcctcagatggtcgccagcaccagactgcccgttgacccggccccaccatgccccagacctctgcctacaagtagcacatcatcattggctcctgttagcgggtccggccccggtccaagtcctgcccggtccagtcccgtcaacaggccatcttctgctaccaataaagccctctcgcccgtgacttcccgaactcccggggtggtagctagcgcacccactaaaccccagtcccctgctcagaatgctacctccagccaggattccagccaagatactctcaccgagcagatcacactggagaaccaagtacaccaacgaattgccgaactgcggaaggctggcctgtggagtcaaagaaggctgcctaaactccaggaggctcctcgcccaaagtcacattgggactacctcctggaagagatgcaatggatggcaactgacttcgcacaggaacgacgctggaaagttgcagctgctaagaagcttgttcgcacagtggtgcgccatcatgaagagaagcagcttcgcgaggagaggggaaagaaggaggaacagtctcggcttaggcgcatagccgccagtactgccagagagatcgagtgcttctggtctaatattgagcaggttgtggaaataaagctgagggtcgagctcgaagaaaagcggaagaaggcactgaatctgcaaaaagtaagccgcagggggaaggaactccggcctaaaggttttgatgcgcttcaggagtccagcctcgattctgggatgtcagggcgcaaaagaaaggcatccatatctcttactgatgatgaagttgacgatgaagaggaaacaatagaagaggaagaagccaacgagggtgtggtcgatcaccagaccgaactgtctaacctggcaaaggaggccgaactacccctgcttgatctgatgaaactgtacgagggcgcctttctaccatcttcacagtggcctcggccgaagcccgatggtgaagacaccagcggagaagaagatgccgatgactgccccggggacagggaatcaagaaaagatctagttttaatcgactccctcttcataatggatcaattcaaagctgccgaaaggatgaatatcggcaagccaaatgccaaagatatcgcagatgttacagccgtcgctgaagctattctaccgaaggggagcgcccgcgtgaccacttccgtcaagttcaacgctcccagcctgttgtacggagcgctgcgggattaccagaagatcggcctggattggctcgcaaaactctatcgcaaaaatctgaacggtatcctcgcggacgaggccggccttggcaagaccgtgcaaattatcgctttttttgcccacctcgcttgcaacgagggtaactggggcccccatctggtagttgttcggagctgtaatattttgaagtgggaactggagctgaagcgatggtgtcccgggcttaaaatactcagctatattggttcgcacagagaacttaaggccaagcgtcaggagtgggctgaaccgaacagtttccacgtgtgtataacgtcttacactcagttttttaggggactcacagcctttactagagttcggtggaagtgtctggtgatcgatgagatgcagcgggttaagggcatgacagaacgccattgggaggccgtctttacattgcagagtcagcagcggcttctgctgatcgatagcccactgcataacacgtttcttgagctctggaccatggtccactttctcgttcctgggatttccagaccctacttgtctagcccacttagggccccctccgaagagagccaggattattatcacaaggttgttattaggttacaccgcgtcacccaacctttcattctccgtcgtactaagagagatgtggagaagcagctgactaaaaaatacgaacacgtgctcaagtgtaggctcagtaacaggcagaaagcactgtatgaagatgtgattctgcaacccggaacgcaggaggccctaaagtcaggccactttgtcaacgtcctctctatcctggtcagattgcagcgtatctgtaatcaccctggactagtggaaccccgtcaccccggatcttcctacgtggctgggccactggagtatccatcagcctccctgatactgaaagcacttgagagggatttttggaaggaggcggacctttccatgtttgacttgatagggcttgaaaacaaaatcaccaggcatgaggctgagctgctgtctaagaagaagatcccgcgcaaattgatggaggagattagtactagcgctgcaccggccgctcgtcctgccgcggccaaactgaaggcctctcgattgttccagcctgttcagtacggccaaaagcccgagggaaggactgtggccttccctagtacgcaccctcctcggaccgcagcccccactactgcgtctgccgcccctcagggccctcttcgagggcgtcctcccatagcaactttcagtgcaaacccggaagctaaagcggccgcagccccctttcagacctcacaggcctcagcctcagccccccgccaccagcccgcttctgccagcagtactgctgccagccctgcccaccccgctaagctgcgggcccagaccacagctcaggcctcaacacctggccagccccccccacaacctcaggcacctagccacgcagctgggcaatctgccctcccacagcgactggtattaccttcgcaggctcaggctcgactgcctagcggcgaggttgtgaagatcgctcagctggctagtataaccggcccacaatccagagttgcccaacctgaaacccccgtcacgctacagtttcaggggtctaagtttacccttagccactcgcagcttcggcagctgacagctggtcagcccctgcaactccagggctccgtactgcagattgtctccgccccaggccaaccttaccttcgtgcaccaggtccagtcgtgatgcagactgttagtcaagccggcgccgtgcatggcgctctgggctcaaagccccctgccggaggaccctcaccggccccgttaacacctcaggtaggagttcccggtcgggtggctgtgaacgccctcgccgtgggcgaaccaggaacagcatctaaacctgcctcgcctattgggggtcctacccaggaggagaagactcggctcctgaaggaaaggctcgaccagatctacctggttaacgaaagaaggtgctcccaggcccccgtttatgggagagacttactccggatatgcgccctaccatcacacgggcgtgtccagtggcgcggtagtctcgacggccgcagggggaaggaagcgggccctgcccactcatacacatctagttccgaaagcccctccgagctgatgttgactctgtgcaggtgtggggagtcattgcaggacgtgattgaccgagtcgcctttgtgatcccccctgtcgtcgccgctcctccctccctccgagttcccaggccccccccactctatagtcaccgaatgcgcatcctaagacaggggctgagagagcacgcagcgccttactttcagcagctcaggcagactaccgcacctaggctgcttcagtttccggaactacgactagtgcaatttgactctgggaagctagaggctctggcgatcctgcttcagaaactcaaaagcgagggacggagggtgctgatcctgtcccagatgatccttatgctggacattctggagatgttcctgaacttccattatctgacatatgtcaggattgacgagaatgcttcaagcgaacaacgccaggagctcatgcgtagtttcaatagagaccgccggatcttttgtgcaatcctgtctacacattcaaggactacgggtatcaacctggtggaggctgacacggtagtcttctacgataacgatctcaatcctgtcatggacgcaaaggcacaagaatggtgtgaccgcattggtcgctgcaaagatattcatatctaccgcttagtgagcggtaactccatcgaggagaagctgcttaagaacggcactaaggacctgatacgggaggttgcagctcaggggaacgactatagcatggccttcctgactcaacgcaccattcaagaactcttcgaagtctactcgcctatggacgatgcgggctttcccgtgaaagcagaagaattcgtcgttttgtctcaagaaccatctgtgacggagacaattgcccccaaaatcgcccgcccatttattgaggctttgaaaagtatcgagtatttggaggaagatgctcagaaatctgcacaggaaggagttctcggtccccacacagacgcattaagtagcgattcagagaacatgccatgcgatgaagaaccctcccagctggaggaactggcagactttatggaacaactgaccccgatcgagaaatacgctctgaactatttggaactgttccacacttctatagagcaggaaaaagagaggaactctgaggatgccgtcatgactgccgtgcgagcttgggaattctggaatctcaagactctgcaggaacgcgaggctcgactgcgtctggagcaagaagaagccgagttactaacctataccagagaggacgcctactcaatggagtatgtgtacgaggacgtcgacggccaaaccgaagttatgcccctctggactcctcccacgcccccccaggacgactcagacatctacctcgacagcgtaatgtgtctgatgtacgaggctacgcccatccctgaggccaagctgccccccgtatatgtaaggaaagagcgaaagagacacaaaaccgaccccagtgcggccgggcgaaaaaaaaaacagcgccacggggaagcggtggtcccacctaggtcactttttgacagagcgacccctggcctgctgaaaattcggcgggagggtaaagagcaaaaaaagaacatactcttgaagcagcaggtgcctttcgcaaagcccttgcctaccttcgcaaagcctaccgccgagccaggacaggataatccagaatggctgatcagcgaagattgggcgcttttacaggccgttaagcagctgctggagcttcccctgaacctaaccatcgtgtctcccgcacacactccaaattgggatttggtaagcgatgtagtgaatagttgttctcgtatttatcggtcatccaaacaatgtagaaaccgctatgagaatgtcatcatcccccgggaagagggaaagagcaagaataatagacctctgaggactagccaaatctatgctcaggacgagaacgccacccacacccagctgtatacctctcacttcgacctgatgaaaatgacggccgggaagagaagtcctcccatcaagccactgttgggcatgaacccgttccagaagaatccaaagcacgcctccgtcctggccgagtctggcattaactacgataagccactgcctcctatacaggtggcatcattgcgggcggaaaggattgctaaggagaaaaaagccctcgccgatcaacagaaagcccagcaacccgccgtcgcgcagcccccccccccgcagccacagcctcctcccccacctcaacagccccctcctcccctgccgcagccacaggcagctgggtctcagccccccgctggcccacctgctgtgcaaccgcaacctcagccacagcctcagacccagccacagccggtgcaagctcccgccaaagcccagcctgccatcaccacaggtggctcggctgccgttctggctggtacgatcaagaccagcgtgactggcacaagcatgcccacaggagctgtgagtgggaatgtcattgtgaacacgattgctggggtgcccgccgccacctttcagtcaatcaacaagaggctggcatcccctgtggcccccggggcgctgactacgcccgggggcagcgctcctgctcaggttgtgcacacccagcctccacctagagccgtgggttcccccgctaccgctactcctgatcttgtgtcaatggctaccacccagggcgtccgcgcagtaaccagcgttactgctagcgctgttgtgacaaccaaccttacaccagtgcagactcctgcccgaagtctggttccccaagtttctcaggctacaggcgtgcagctgccggggaagacaattactcctgcacacttccagctgcttcggcagcaacagcagcagcagcagcagcaacagcagcagcaacagcagcagcagcaacaacagcaacagcagcagcagcaacagcaacagacaacaacaaccagtcaagtgcaggtgccgcaaatccagggccaggcacagagcccggcgcagatcaaggccgtaggcaaactcacgcctgagcacttaatcaaaatgcagaagcagaaacttcagatgcccccacagccgccccctccacaggcccagtcagcccctccacagcctacagctcaggtccaggtgcagacatctcagccaccccaacagcagtctccgcagcttacaactgtgacggctccaagacctggcgcactcctgaccggaacaaccgtcgcaaaccttcaagtggcaaggctgacacgcgtccctacctcgcaactacaagcccaagggcagatgcagacgcaggcaccacaaccagcccaggtcgcccttgccaaacccccagtcgtgagcgtgccggccgcggtcgtcagttctcccggagtaaccaccctgccaatgaacgtggccggcatatccgtagctattggtcagccccagaaggccgccggtcaaaccgtggtggcacagcccgttcacatgcaacaattgcttaaactaaagcaacaggcggtgcagcaacagaaggccattcagccccaggctgctcagggtcctgcggcagtacagcagaaaatcacagctcagcaaatcactacccccggagctcaacagaaggtggcctacgctgctcaacctgccctaaaaacacagttcctgaccaccccaatttcacaagcccaaaaactggctggcgctcagcaggtgcagacgcagatccaggtcgccaagctgccacaagtggtgcaacagcagacaccagtcgctagtattcagcaagttgcctctgcttcccagcaggcctccccgcaaactgtggcactgactcaggccacagctgcgggacaacaggtgcaaatgatccccgcggtcaccgcaaccgcccaggtcgtccaacaaaagctaattcaacagcaggtggtgacgaccgcaagtgcacctctccagacgccgggagccccgaatcccgcccaggtcccagctagttcggacagcccgtctcagcaaccaaagcttcagatgcgcgtgccagcggtgaggctgaaaacaccaacaaaaccaccctgtcagtag

SEQ ID NO: 186567 - DNA, 9369 bp, Artificial Sequence
  derived and/or modified sequence
atgcaccacggcaccggcccccagaacgtgcagcaccagctgcagcgatccagggcctgccctggctcagaaggcgaagagcagcccgcccatcctaacccacccccgagcccagccgcaccgttcgcaccatcagcaagtccttccgccccacagagtccttcttatcagatacagcagctgatgaaccgctcccctgctactggacagaacgttaatatcacgctgcaatcggtcggacccgtggtaggcggaaaccagcagattacgctggctcctctgcctctcccctccccaaccagccctggatttcaattctcggcacagccgcgtcggttcgagcacggatccccttcatacattcaggtgacttcccctttgtcacagcaggttcagacacagtctccaactcagccgagccccgggcccgggcaggccctgcagaacgtgagagccggcgccccagggccaggactgggcctatgctctagttctccaacgggaggcttcgtggacgcatccgttctggtgcggcagatttcactcagccccagctctggcggacatttcgtgttccaagacggctccggactcactcagatcgcacagggtgcgcaggtccagctgcagcatcccggaacccctattacagtgcgggagaggcggccatctcagccgcatacccaaagtggcggtacaatccatcacttaggcccacagtcgcctgccgcggccggcggggctggcctgcagcccctagcttcaccctcccatatcactacagctaacctgcctccacagatctcctccattattcagggccagctcgtccaacaacagcaagtgcttcagggccccccacttccgagacctctgggatttgagaggacgccaggggtgttgcttccaggggccggtggggctgccggttttggaatgaccagtccccctccccctacaagcccatctcggaccgccgtgccccctggcctgtccagcctgcctcttacctccgtcgggaatactgggatgaaaaaggtccccaagaagcttgaagagatcccccctgccagcccagagatggcccagatgcggaagcagtgcttggactaccactatcaggagatgcaggctctgaaggaggtgttcaaggagtacctgatcgaactgttctttctccagcacttccaaggaaacatgatggacttcttggcgtttaaaaagaaacactacgcacctctgcaggcctacctgagacagaatgatctggacatcgaggaggaagaagaggaggaagaggaggaggaagaaaaatccgaggtcatcaatgacgagcaagctctggcagggtctcttgtcgccggggccggtagcaccgtagaaacagacttattcaaacgccaacaggcgatgccttctaccgggatggccgaacagagcaagcgcccaaggcttgaagtgggacatcagggcgtggtgtttcagcaccctggcgcagatgccggtgttcctctacagcagctgatgcccacagcgcagggagggatgcctccgacgccacaggccgcccagttggcaggccagcgtcagtcacaacagcagtatgacccatccaccggccctcctgttcagaatgctgcctctttgcacacaccattacctcaactgcctggtcgcctgccgccagccggagttccaacagccgccctgagtagtgcactgcaattcgcccaacagccacaagtggttgaagcacagacccaactacaaattccggtcaagactcaacagccgaatgtgccgatcccagcgccaccatccagccaacttcctatcccccctagccagccagctcagctggccctgcatgtgcccacacccggaaaggtgcaggtgcaggcctcgcagctttcctccttacctcaaatggtggctagtacccgcctgccagttgatcccgccccaccgtgtccccggccactcccaacaagcagtacttcatccctagcccctgtgtcagggagcggccccggaccttcaccggccagaagttcacccgtgaatcgcccgagcagcgccaccaataaggcattatccccagtaaccagcagaactcccggagtcgtggcctctgcccccactaagccccagagtcctgcccaaaatgcaacctcatcccaggattcttcacaagataccctgacggaacagatcaccctggaaaaccaggtgcaccagcgcatcgctgaattgagaaaggccggactgtggtctcagcgccgtctgcctaaactgcaggaagccccccgccccaaaagtcattgggattatctactggaagaaatgcagtggatggccacagactttgctcaggagaggcggtggaaggtcgctgctgctaagaagttggtaaggaccgtggtgaggcaccacgaggagaaacagctaagggaggaacgaggaaagaaggaggaacaatctaggcttcggcgcatcgctgcctcaacagcccgcgaaattgagtgcttttggtcaaacatagaacaggtggtggaaatcaaacttcgagtagaattggaagaaaaacgaaaaaaggcacttaacctacaaaaagtctcaagaaggggcaaggaactacgcccgaaggggtttgatgcactccaggaaagcagcctcgattccggaatgtctggccgaaagaggaaagcatcaattagcttgacagacgatgaggttgatgacgaggaggagacaattgaggaagaagaggccaacgaaggagtggtggaccaccagaccgagctcagcaacctggctaaagaagccgaacttcctttattggatctgatgaagctgtatgaaggcgcatttcttccttctagtcaatggcctcgacccaagccagacggggaagacacgtctggggaggaagacgctgatgattgtcccggtgacagagaaagccgcaaagatttggtgctcattgactcactgttcataatggatcagttcaaggccgcggagaggatgaacattggtaaaccaaatgctaaagacatcgctgatgtgacggcagtggccgaggctatcttaccaaagggctccgccagagtaacaacttcagtcaagtttaacgccccatccttgttgtacggagcattgagagactaccaaaagatcgggttggattggcttgccaagctatatcgcaagaacctgaacgggattctggcggacgaggctgggttaggcaagaccgtgcagattatcgcgttcttcgcgcacctggcgtgcaacgaaggcaattggggaccccatctagttgtagtgaggtcatgtaacatcctgaagtgggaacttgaattaaagcgatggtgtccaggtctgaagattctgagctacatcggctcacaccgcgaactgaaggctaagaggcaggaatgggcagaacctaatagctttcatgtctgtatcacttcgtacactcagttctttcgcggccttaccgctttcactcgcgtccggtggaagtgcctggtcatagacgagatgcagcgagtgaaggggatgacagaaaggcactgggaagccgttttcacactgcagtcccagcagcgtttgttgctgatcgatagcccacttcacaacacctttctggaactttggactatggtccactttctggtgcccggcatctctcgcccgtacttgagctccccactgcgcgcaccttccgaagagtcacaggactattaccacaaggttgtgatcagactccacagggtgacacagcctttcattttaaggaggaccaagcgggacgtagaaaagcagttgacaaaaaagtacgagcacgtcctgaaatgccgtctgtccaaccgccaaaaggccctgtacgaagacgtgattctccaaccaggaacccaggaggctctgaagtccggacattttgtgaacgttctaagcattctggtaaggcttcaacggatttgtaatcaccctggactagtggagcctagacatccgggcagtagctatgtggccgggcccctagaatacccttccgcctcgctgattctcaaagcattggaaagagacttctggaaggaagctgacctgtcaatgttcgatttgattggcctcgagaataagataacgaggcacgaggccgaactcctttctaagaagaaaatcccacgcaaattaatggaagaaatctcaacatctgctgcccctgcagcccgccctgccgcagcaaagctaaaagcctctcggcttttccagcccgtgcaatacggacaaaaacctgagggtaggactgtggcatttccctctacacacccccctagaaccgcagcccctactaccgcttcggcagcccctcaaggtccacttagaggaaggccaccaatagccaccttttctgccaaccctgaggcaaaagcagcggccgcccctttccagactagtcaggcgagcgcatccgcaccacgccatcagccggcatcagcgtcatctacggcagcatcccccgcacaccccgctaaactgcgggcacaaaccactgcccaggccagtactcctggccagccaccgccccagccccaggcaccgagtcacgccgctggtcagtctgccctcccacaacggctcgttctgccctcccaagcacaggcaagattgccatccggggaagtcgtgaaaatcgcccaattggcatccatcactgggccacaaagtcgcgttgctcagcccgagactcctgtaacactacagtttcaggggagcaagtttactctgagtcatagtcaactgaggcagttgacagctggacagccactccagctgcaggggtctgtgttgcagatagtgagcgctcctggccagccttacttacgggccccgggacctgtcgttatgcagaccgttagtcaggcaggcgctgtgcatggagcactgggctcaaaacccccagccggcgggcctagtccagccccgcttactccccaggtaggcgtgccaggaagggtggctgtgaacgcactagcagtgggtgagcctggcactgctagcaaacccgcaagcccaatcggcggtccaactcaggaagagaaaacaaggctgctgaaggagcgtttggaccaaatttacttggtgaacgaacggagatgctcgcaagctcccgtgtatggacgtgacctactgcgcatctgcgctctgccctcacacggaagagtgcagtggcggggctcactagacggacgtcggggaaaagaagccggccctgcccactcttacacatcctcctctgagagtcccagtgagctcatgctcaccctgtgcagatgcggggaatccctgcaagatgtgattgaccgggtggcgtttgttatcccacctgtggtcgccgctcccccatccttacgagtgcctcggcccccccccctctactcccatcgtatgaggattctgcgacagggactgagggagcatgccgccccctatttccagcaacttaggcagacgaccgctcccagactgctacagtttccagagctgagactggtgcagtttgattccgggaaactggaagccctggctattttattgcagaagcttaagagtgagggaaggcgcgtcttgattctgagtcagatgatactgatgctcgacatacttgagatgtttctgaattttcattacctcacatacgtgcgcatcgacgagaatgccagtagcgaacagcgacaggaactgatgcgcagtttcaatagggatagaaggattttctgtgcgatactgtctactcacagcagaacaacgggaattaacctggtggaggccgacaccgtggtattctacgataatgacctgaacccagtcatggacgccaaagcccaggagtggtgcgataggattgggcgatgcaaggatatccatatttatcggctagtgtctggtaactcaatcgaggagaagctgctgaagaacgggacgaaagatctgatccgggaagtcgccgcccaaggaaatgactattcaatggccttccttacccagagaacaatccaggagctgtttgaagtttactccccaatggatgatgctggtttccctgttaaagcagaagagttcgtcgtcttgtcccaggaaccatcagttactgagaccattgcccctaagatcgcgcgtccctttatcgaggctctgaaatctatcgaatatttggaggaggatgctcaaaagtccgcacaagaaggcgtgttaggtccccataccgatgcactgtcatccgattcggaaaatatgccctgcgacgaagaacctagccaacttgaggaactggcggattttatggagcagctgactccaatagagaagtacgctcttaattaccttgagttgttccacacaagtatcgaacaggaaaaggagcgaaacagtgaggatgcagtaatgacagcagtgagagcttgggagttttggaatctgaagaccctgcaggagagggaggcaagactgcggctggagcaggaagaggcagagctcctcacgtacacgagagaagatgcatatagtatggaatatgtctacgaggatgtagatggccagactgaggtgatgcccctgtggacgcctccaacccctccccaggacgactccgacatctacctggacagcgtcatgtgtttaatgtatgaggctacacccattcccgaagcgaagcttccacctgtgtatgttagaaaagagagaaagcggcataaaacagatccgagcgctgccggccggaagaagaaacagcggcatggagaggctgtggtgcctccacgctccctgttcgatagggccacacccggccttctgaagatccgaagagagggaaaggaacagaaaaagaacattctactgaaacagcaggtgccatttgcaaaaccattgcccacttttgctaaacctactgcggagcccggccaagacaatccggaatggctcatctccgaggactgggcactcttgcaagcagttaagcagctcttagagcttcccctgaacctgacaattgtgagtccagcccacacccccaactgggacctagtcagtgacgttgtcaacagttgctccagaatctacagatctagcaaacagtgtaggaatagatacgaaaacgtgattatccctagggaggagggaaagtccaagaataaccgccctcttcgcaccagccagatttacgctcaggatgaaaacgcgacacacacacagctgtacactagccactttgatttgatgaagatgacagctgggaagcgctccccaccaatcaagccccttctgggtatgaatccatttcaaaagaacccaaagcacgccagtgttctggccgagtccggcatcaattatgacaaaccactgcctcccattcaggtggccagcctccgggccgagagaatagctaaagaaaagaaagccctggccgatcaacaaaaggctcagcagcctgccgtcgcccagcctcctcccccgcagcctcagccacctccacctccacagcaaccacctccgccgctcccccaaccacaggctgcgggctctcagccccctgcggggccccctgctgtccagccccagccccagcctcagcctcagacccagccacagccagtgcaggccccagctaaggcccagcccgccatcactacgggaggcagcgccgccgtcctggccgggacaataaaaacctctgtgactggcacaagtatgcctaccggagcagtatcaggcaacgtgattgttaacactattgcaggagtaccagcagcaacgttccagtccattaacaagcggttagcctctcccgtggcgccaggcgccctcactacacccggaggctctgccccggcccaggtcgtgcatacccagcctccgccgagggccgtgggcagtcctgctacagccaccccggatcttgtcagcatggccactacacagggagtcagagctgttacttcagtgactgcatctgctgtggtgacaacaaatcttacacctgtccagaccccagcacgaagcctggtcccccaggtctctcaggccacgggcgtccaactgcctgggaaaactatcaccccggcccatttccagttgcttcgccaacaacaacagcaacagcaacagcagcagcagcagcagcagcagcagcagcaacaacaacagcagcagcagcagcagcagcagcagactacaacaactagtcaggtgcaggtgccccagattcaaggccaggcccagagcccagcccaaatcaaggcagtcggcaaactgacaccagaacatctgatcaaaatgcagaagcagaagctgcagatgccaccgcagcccccccctccgcaggctcaatctgccccaccccagccgaccgcccaagtccaggtgcaaacatcccagcccccccagcagcagtctccacagctgactactgtgacagcccctcggcccggggcgttgctcacaggaacaaccgtggccaatctccaggtggctcgcctcaccagagtcccgacaagtcagctccaggctcagggacaaatgcagacacaggccccgcagccagctcaggtagctctggccaagccgcctgttgtttctgtgcctgctgcggttgtttcatcccctggggtgaccactcttccgatgaatgtggccgggattagcgtagcgatcggccaaccgcagaaggctgctggccaaacggtggttgcccagccggttcacatgcagcagctgctgaagctgaagcagcaggctgtacagcagcagaaagccatccaaccgcaggccgcacaggggccggctgctgtccagcagaaaattacagcccaacaaataacaactcctggtgcccaacagaaagtggcctatgctgcccagcccgctttgaaaacccagtttttgactacccctattagtcaggctcagaagctggcaggcgcccagcaagtacagactcaaatccaagtggccaagctcccacaggtggtacagcagcagacacctgttgcgtccattcagcaggtggccagcgcctcgcagcaggcatctccccaaaccgtggccctcacacaggctaccgcagctgggcagcaggtacagatgatcccagctgtgacagccactgctcaagtggtccaacagaaactaatacagcagcaggtggtcaccacggctagcgcacctctgcagacccctggagccccgaaccctgcacaagtacccgccagtagtgactctcccagtcaacagcccaagctgcaaatgcgtgtgcctgccgttcggctaaaaacgcccactaaacctccatgccagtag

SEQ ID NO: 186568 - DNA, 2475 bp, Artificial Sequence
  derived and/or modified sequence
atgcaccacggcaccggcccccagaacgtgcagcaccagctgcagaggtcaagagcctgcccaggctctgaaggcgaagagcaacccgcccatcctaatcccccgccctcccccgccgcccctttcgctccgagcgcttcacctagcgcacctcagagcccttcataccagattcagcagttgatgaacaggagccccgccacaggccagaatgtcaacattaccctgcagagcgtagggcccgttgtgggcgggaaccagcaaataaccttggccccactgccactgccatcaccgacttcaccaggatttcaattctcggcccagccaaggagattcgagcacggctcgccatcttacatccaggttacttctcctctttcccagcaggtccagacccagtcccctacccagcctagccctggccctggacaggcgctgcagaacgttagggctggggcacccgggccaggacttgggctttgttcctccagtcccaccggcggtttcgttgatgctagtgtcctagtcagacagatcagtctatcaccctcctccggcggacattttgtgttccaggacgggagcggcctgacccagattgcccagggcgcacaggtgcagcttcaacaccctgggacacctattactgttagagagcggcggcccagtcaaccccatacccagtccgggggtacgattcaccacttgggcccccaatctccagccgccgcaggcggagctggactccagccattggcctcaccgagtcacattacaaccgccaatctgcccccacagatttccagcatcattcagggccaactggtgcagcaacagcaggtactgcagggcccgcctctgcccagacccttaggattcgagaggacgcctggcgtgctcctgcctggcgcaggtggagcagccggctttggaatgacctcaccgccgccaccaacgtcaccaagccgcactgccgtcccccctggtctttcaagtttgcctttgaccagtgtcggaaatactgggatgaagaaggtccccaaaaagctcgaagaaatcccacccgcgagtcccgaaatggcccagatgagaaagcaatgtctagactatcattatcaggagatgcaggcactgaaggaggtgtttaaggagtacttaattgaactgttctttttgcagcatttccagggtaatatgatggatttcttagcctttaagaagaagcactacgcccctctgcaggcctatctgcggcagaatgatttagacattgaagaggaggaggaggaggaggaggaggaagaagaaaaaagtgaagtgattaacgatgagcaggcactagcaggcagcctcgttgcgggtgccggctcaaccgtggaaacagatctgttcaagagacagcaagccatgccttctaccggaatggccgggggcatgcccccgaccccccaagctgcccagctggccgggcagaggcagagccagcaacaatatgacccttctacaggcccacctgtccagaacgccgcctctctgcacacccctcttcctcagcttcccggcaggttgcctcctgccggcgtgcccacagcagccctgtcctcagcactgcagttcgctcaacagccccaggtggttgaagcccaaacacaactgcagattcccgtgaagactcagcagcctaacgtgcctatcccagctcccccatctagtcagctcccgatcccgccgagtcaaccggcccagctagcgctgcacgtgcctacccccggcaaggtgcaggtgcaggcctcccagctcagctcgcttcctcagatggtcgcttcaaccagacttccagtggacccagccccaccatgcccccgcccactccccactagttcaacttccagtctggcgcccgtaagcggatccgggccgggtcctagccccgcccggagctctccagtgaacagacccagcagtgctacaaacaaggcgctttctcccgtcacttctcgaactcccggcgtcgttgctagtgcccctacgaagcctcagagccctgcacagaatgcaaccagttcacaagactcctcacaggacaccctgacagagcagataactctggagaatcaagtgcatcaaaggatagcggagctgcgcaaagccgggttgtggtctcagaggagactccctaaactgcaagaggctcctcgacctaaatctcactgggattacttgcttgaagagatgcagtggatggccacagactttgctcaggaacggcgatggaaggtggccgccgcaaaaaaattagtgagaacagttgtgcggcatcatgaagagaagcagttacgagaagagagaggaaaaaaggaggaacagagtaggctccgtaggatagcagcctctactgcccgggaaatagaatgcttctggtccaatatcgaacaggttgtggaaatcaaattacgtgtggagttagagtag

SEQ ID NO: 186569 - DNA, 9372 bp, Artificial Sequence
  derived and/or modified sequence
atgcaccacggcaccggcccccagaacgtgcagcaccagctgcagcggtcgagagcatgcccaggcagcgagggagaagaacaaccagcacacccaaatccaccaccaagccccgcagcccccttcgctccctccgccagtccatcagcaccacagagccccagctatcagattcagcagctgatgaaccgcagtccagccaccgggcagaacgtcaacataaccctgcagagcgtgggacctgtggtgggcgggaatcaacagatcacattggctcccctacccctgcccagcccgacaagtccagggttccagttcagcgcccaacctcgcaggttcgaacatggcagcccaagctatattcaggtgacttcccccctgagtcagcaagtacagacacagtctccgacccaaccctctccaggtccagggcaggcgctgcagaacgtccgcgcgggagcccccggacccgggcttggcctgtgttctagctctcccacaggcggattcgttgatgcatctgtgctggtgcgacagatttccctctctccatcatctggaggacactttgtgtttcaggacgggagtgggctgacccaaattgcgcaaggagctcaagtacagctgcagcacccaggaacccctatcacagtgcgggaacgcagaccgagccagccccatacacaatcgggggggaccattcatcacctcggtccacagtcacctgcagcagccggcggagctgggctgcagcctctcgcctctcccagccacatcactactgccaacctgccaccccagatttcaagcatcatacagggacagctggtgcaacagcagcaagtgcttcagggccccccattgccccgccccctgggctttgaacgaacccccggagtactgctgcctggcgctgggggagcggccgggttcggaatgacctcccccccgccccctacatcgccgagccgaaccgctgttcctcctggcctcagctctcttcctctgacgtcagtgggcaatactggtatgaagaaagtgccaaagaagttagaagagatcccccccgcttctccggagatggctcagatgcgaaaacaatgtttggactaccattaccaggagatgcaagcactgaaggaagtatttaaagagtacctgatcgagctgttcttcctccagcactttcagggtaatatgatggacttcttggcctttaagaagaaacactatgccccattgcaagcatacctgcgacaaaacgatcttgacattgaggaggaagaagaggaagaagaggaggaagaagaaaaatctgaggtgatcaacgatgagcagcaggcactggccggatccttggtagctggcgccgggagtactgtggaaacggatctgtttaagcggcagcaggccatgccctcaaccggaatggcggagcaaagtaaaagacctcggctcgaggtgggacaccagggggttgtcttccagcatcctggagctgacgcgggcgtccccctgcagcagcttatgcctactgctcagggtgggatgccaccaacaccacaagctgctcagctggccggacaacgccaatctcaacaacagtatgacccatctactggtcccccagttcagaatgcggcttccctgcatacacccctgcctcagttgcccggaaggctccctccagctggggttcctaccgcagccctgagttcggcattgcaattcgcccagcagccccaggtagtggaagcacagacacagctgcagataccagtgaagactcagcagccgaacgttcccatccctgcccccccatcctctcagctccctatccccccatcacagcctgcccagctcgcccttcacgtgcccactcctggaaaggttcaagtacaagccagccagctgagtagccttcctcaaatggtagcgtcaacccgtcttcctgtcgaccctgcacccccttgccctcggcccctccccacttcctccacttcaagtctggcgcctgtttcgggttccggcccggggcctagtccagctcgttcctcacccgtgaataggcctagttctgctactaacaaagccctaagccccgtgacctccagaacaccgggggtagtagcaagcgccccaacgaaaccacaatccccagctcagaatgcaacttcatcccaggacagctctcaggacactctgaccgaacaaatcaccttggagaaccaggtgcatcagcgcatcgcagagctgagaaaggcaggcctgtggtctcagaggaggcttcccaaactgcaggaggcgccgcgtcctaagagccactgggattacctgctggaggagatgcagtggatggccacagactttgcacaggagaggcgatggaaggtggccgctgccaagaaacttgtacgcacagtcgtgaggcatcacgaagagaaacagttgcgtgaggaaagaggtaagaaggaggaacaatcaaggttacgcagaatcgccgcttctacagcgagggaaatcgaatgcttctggtcgaacatagagcaagtcgtagagataaaacttagggtggagttggaagaaaaacgcaaaaaagcccttaacctgcagaaagtgtctcgaagaggaaaggagctgcgcccgaaggggttcgacgctctgcaggaaagcagtttagactcgggtatgtcaggcaggaaacggaaagccagcatttcactaacagatgatgaggtggatgacgaggaagaaaccattgaggaggaagaggccaacgagggcgtggtggatcaccagacagagctgtcaaatcttgccaaggaagctgagctaccactcctggacttgatgaaactctatgagggagcatttctgcccagttcccagtggccacggccaaagcctgatggcgaagatacaagcggggaggaggatgccgacgattgtccgggagaccgagaatctcgcaaggatctagtcctcatcgacagcttgtttatcatggatcagtttaaagccgcagagcgcatgaatattggaaaacccaatgcgaaagatattgcagatgtgacagccgtggccgaggccattttgcctaaaggcagtgctcgagtgactacctccgtgaaattcaacgccccctccctgctgtatggcgcactcagggattatcaaaaaattggattggattggttagcaaagttatatagaaagaatctgaatgggattcttgcagacgaggccggacttggaaagactgtccagatcatcgcatttttcgctcacttagcttgcaacgagggcaactggggtccacacctggtcgtcgtgaggagctgcaacatcctcaaatgggaattagagctaaaacgctggtgtcccggtctgaaaatcctgtcttatattgggtctcatcgggagcttaaagcgaaacgccaggagtgggcggaacctaactcgttccacgtttgtattacttcgtacacccagttttttaggggcctgacggcttttacccgcgttcgatggaagtgtctcgtgattgacgaaatgcagagggtaaagggaatgacagagaggcactgggaggccgtgttcacactgcagtcccagcaacgactccttctgatcgattcaccactgcataatactttcctcgaactttggaccatggtccacttcctcgtaccaggtatctcgcgaccctacctaagcagtcccctccgagcacctagcgaagagtcacaggattactatcataaagtcgtcatccgtctgcaccgtgtgacacagcctttcatcttacggagaaccaagcgcgatgtggagaaacaactcaccaagaagtatgaacacgtactgaagtgcagactcagcaatagacaaaaggctttatacgaagatgtgatcctccagcctggaacacaggaagccctcaagagtggtcactttgtgaatgttctttcaatacttgtgcggctgcaaagaatttgcaaccaccccggactggtggagccccggcacccaggctcatcctacgtggccggtcccctcgagtacccatctgccagtctgatcctgaaggcccttgaacgcgacttttggaaggaggcagacctttctatgtttgatctgatcgggcttgaaaacaaaattactagacacgaggccgaattgctgtccaagaagaagattccgcggaaattgatggaagagatttcaacttctgccgcacccgctgcccgaccagcagccgccaagctgaaagcctccaggttattccaaccagtgcagtatgggcaaaagcccgagggccggactgtggcctttccaagcacccatccgccaaggaccgcagcccctaccacggcaagcgcagctccacaggggcccctgcgcggaagaccacctatcgccaccttttcagcaaaccccgaagccaaagctgccgcggctccgttccagacgtcccaagcctcggcgagcgcacctcggcatcagccagcttccgcttcaagcactgctgccagcccggcccaccccgcaaaactccgggcccaaactactgcccaggcatcaacccctggccagcccccaccccagcctcaggccccctcccacgcggctgggcagagcgcactgccgcagcgcctagtcctgccctctcaggcgcaggcgcggctcccaagcggcgaggtcgtgaagattgctcagctcgcaagtatcactggccctcagagcagagttgcccagcctgagacccctgtgaccctccagtttcaagggagcaagtttaccttaagtcattcccagctgagacagctcacagctggccaacccttgcaactgcaaggcagcgtcttgcagattgtgagcgcccctggccaaccatatttgagggctccaggccccgtcgtcatgcaaaccgtctctcaggctggtgccgttcacggggccttgggttctaagcctcctgccggaggcccatcccccgcaccacttacccctcaagtaggggttcctggccgagtggctgtgaacgccctcgctgtcggagaaccaggcaccgcctctaaaccggcctcgccaatcggaggccccacccaggaggaaaaaacccgccttcttaaggaacgtttggaccagatatatcttgtgaacgagcgacgctgttcgcaagccccagtgtatggtcgggatttactgcggatctgcgcgcttccgtcccatgggagagtacagtggcggggatccttggacggaagacggggcaaggaagccgggccagcgcatagttacacaagttcttctgagagcccatcagagttgatgttgactctctgccggtgcggggagtctttgcaggatgtaattgaccgcgtggccttcgtcatcccacctgtggtggctgccccgccctcactgagggttccaagacccccacccctttattcgcatcgcatgcgaatcttgagacagggtctgcgcgaacacgcagctccatacttccagcagttaagacagacaacagcccctcgtttactgcagttccccgaactacgcttagtacagttcgatagtggtaaactcgaggccctagctatcctcctgcaaaagttgaagagcgaaggccgccgggtgcttattctgtcccaaatgatcttaatgctcgacatccttgaaatgtttctaaattttcattatctgacatatgtgcgcatagacgaaaatgcatcttcagagcagcgtcaggagctgatgcgttcctttaacagggaccgccggattttctgcgctatcctaagcacccatagtcggactaccggcatcaatcttgtggaagccgataccgtggtgttttacgataacgacctaaacccggtgatggacgccaaagcacaggagtggtgcgatcgcattggccgttgtaaggacattcatatctacagactggtctccggcaattctattgaggaaaagctcttgaagaatggtaccaaggacctgattcgagaggtagcagctcagggaaatgactactcaatggcattcctgactcagcggacaattcaagaactatttgaggtgtattcccccatggatgatgccggattcccagtcaaggctgaagaatttgttgtgctaagccaagaaccaagtgtgactgagaccattgcccctaagattgccaggccttttatcgaagcactcaaaagtatagagtacctggaggaggatgctcagaagtccgctcaagagggggttctaggccctcatactgatgctttgtcatcagacagtgagaatatgccatgcgacgaggaaccaagccagctggaagagctggccgatttcatggagcagcttacccctattgagaaatacgccttgaattacctagagctgttccatacaagtattgaacaggaaaaagagaggaactctgaagacgccgtgatgaccgccgtgcgcgcttgggagttctggaacctgaaaacactacaagagcgggaggcaaggctgcggttggaacaggaagaagccgagctactgacgtacactagagaggatgcttacagtatggaatacgtgtacgaagacgttgacgggcagacagaggtcatgcctctctggacccctcccacccctcctcaggatgatagtgatatttacctggacagtgtcatgtgtctcatgtatgaagcgacacccattcccgaggccaaactgcctcccgtgtatgtcagaaaggaaaggaagcgtcacaagacagatccttccgcagctggaagaaagaagaaacagcgacacggagaggctgtcgtgccgccacggagtctgtttgacagggccacacccggattgttgaagatacggcgcgagggtaaggaacagaagaaaaatattctcctgaagcagcaggtgcccttcgcaaagcccctgcccactttcgcaaagcctaccgctgagcctggccaggataaccccgagtggttgatttctgaggattgggccctgttgcaggccgtgaagcagctgctcgagctccctctaaacttaacaatagtgagtcctgctcatacgcccaactgggacctggtgagcgacgtggtcaacagttgttcccggatctataggtcctcaaaacagtgcaggaaccggtacgagaatgtgattataccaagagaagagggcaagtccaagaataaccggcctttgagaacatcccagatttatgcccaagacgaaaatgctacacacacccaactgtacacgtcgcacttcgacctgatgaagatgacagcaggtaaacgatcaccgcccattaagccgcttttgggtatgaatccattccagaagaatcctaagcacgcgtctgttctcgctgaatcaggcataaattacgataagcccctgccccctattcaggtggcttctcttcgtgcagagcgtatcgcaaaagagaaaaaggctctcgcagatcagcaaaaagcccagcagcctgctgtggcacagccgcccccccctcagcctcagccgccaccacccccccaacagcccccccctccgctgccacagccgcaagccgctgggtctcagcctccagcagggccacccgccgtacagccacagccccagccgcagccccagacacagcctcagcccgtacaagctcccgcgaaggcccagcctgctatcaccactggcggatcggccgccgtcctggcaggcaccatcaaaacctcagtgactggcaccagcatgcccaccggagctgtttcaggaaatgtgattgtgaatacgattgctggcgtccccgccgccacctttcaatcaattaacaagcggctggcatcccccgtcgcgcctggtgcactgactacgcctggggggtctgcaccggcacaggtcgtacatacacaaccaccgccacgggctgtggggtcacctgcaaccgccacacccgacctcgtgtccatggccactacacagggtgttcgcgccgtcacttccgtgaccgcatccgcggtcgtgaccacaaatctcaccccagtgcagacacctgcgagaagtctcgttcctcaggtgtctcaggccaccggcgtgcaattgcctggtaagaccatcaccccagcccattttcaattattgcggcaacaacagcagcagcagcagcagcagcagcaacagcagcagcagcagcagcagcagcagcagcaacagcagcagcagcagcaacagacaaccacaacgagtcaggttcaggtgccacagatacagggccaagcccagtcacccgcccagatcaaggctgtaggcaagctcacccctgagcacctcattaaaatgcaaaagcagaagctgcagatgcccccgcagccacctccaccccaagcgcaaagcgccccccctcagcccaccgcccaggtccaagttcagacttcccagcctccccagcaacagagtcctcaactaactacagtcacagcaccgcgccctggggctctgctgacagggacaaccgtggccaacctgcaggttgctcgtctgaccagggtgcccacctcccagctccaggctcagggccaaatgcagacacaagctccacaaccagcccaggtggcactagctaagcctcctgtggtgagcgtgccagcagccgtagtttcttcgccaggcgtaactacactgcccatgaacgtggcgggcatttcagtcgcaataggccagcctcaaaaggcagccgggcagactgttgtcgcccagcctgtccatatgcaacagcttctcaaactgaagcagcaggctgtgcagcagcagaaagccattcagcctcaagcagcacaagggcctgccgccgtgcagcagaaaatcacagcccagcaaatcaccaccccaggcgcccagcagaaagtggcctacgccgcgcagcctgccttgaaaactcagttcctgactaccccaattagccaggcgcagaagttggctggggcccagcaagttcaaacccaaattcaggtcgctaaactgccccaagtcgtgcaacagcaaacacccgtcgcaagtatccagcaagtcgcatcagcaagtcaacaggccagtccccaaacggtggcactcacgcaggcgactgctgccggtcagcaggtgcaaatgatcccagcagttactgcaaccgctcaggttgttcagcagaaactgatccagcagcaggttgtcacaactgcatccgcgccactgcaaacgcccggagcgccaaacccggcccaggtgccagcatctagcgatagtccttctcaacagccgaagctgcagatgcgcgttcccgcagtccgactgaagacacctacgaagcctccctgtcagtag

SEQ ID NO: 186570 - DNA, 9128 bp, Artificial Sequence
  derived and/or modified sequence
atgcaccatgggaccggtcctcaaaacgtgcagcatcaactccagcgatctagggcttgccctgggtctgaaggtgaggagcagcccgcacatccaaacccgcctcctagtccagccgcacccttcgccccatccgccagcccatctgctccccagagccccagctaccagatccagcagttaatgaacaggtctccagcgacagggcagaacgtcaacattacattacagagcgtggggccagtagtggggggtaaccagcagataacactggccccactgcccctcccttcccccacatccccgggtttccaattttctgctcaacctagacgattcgagcatggaagcccaagttacatacaggtcactagccccctgagccagcaggtgcagacacagtcgccaactcagcctagccctgggcctggccaagccctacagaacgtgcgggctggggcaccaggtcccggtctcgggctatgttcctccagccctacaggcggtttcgttgacgccagcgtgctagtgagacagattagcttaagcccgtccagtggagggcacttcgtgttccaggatggctccggtctaacacaaatcgcccagggggcacaggtacaactgcagcaccccggaacacctataactgtgcgcgaacgtcggccaagccagccccacactcagtctggaggcactatacatcacctggggccacagtcacctgccgcagcaggaggcgcagggctccaaccgctggcatccccatcccacatcaccactgctaacttaccccctcagatctctagcattattcagggccagctggtgcagcagcagcaggtgctgcagggccctccactgcctcggcctttagggttcgaaaggacacccggtgtgttgctgccaggcgctggtggagctgctggctttggaatgacaagcccaccgcctcctacttccccaagcaggaccgctgtacccccaggcttatcatccttgccattaacgagtgtagggaatacaggaatgaaaaaggtccccaaaaaactcgaagagatccccccagcttccccggaaatggcacagatgcggaaacaatgcctggattaccactatcaggagatgcaggctttaaaggaagttttcaaagagtacctcattgaattgttttttctacaacactttcaggggaacatgatggactttctggccttcaaaaaaaagcattatgcccctctccaagcttacctgagacaaaatgacctggacatcgaggaagaagaggaggaggaagaggaggaagaggagaagagtgaagtcatcaacgatgagcaacaggcactagctgggagccttgtcgccggtgccggatcaacagttgagactgatctgttcaagcggcagcaagccatgccatcaacgggcatggccgaacagagtaaacggcctcggctggaagtgggccaccagggggtggtatttcagcaccccggagcggacgcaggagtgcctttacaacagttgatgcctacggcccagggcggaatgccgcctacaccccaggccgctcagctcgctggccagcggcagtcccagcagcagtatgatccctctacaggcccacccgtgcaaaatgcagccagtctgcacaccccgttgccacagctgcccggaaggctcccccctgcaggagtgcccaccgcagctctgagctccgccctgcagtttgctcagcagccacaggttgtggaggcccaaactcaattgcagatccctgtgaaaacacagcaaccaaacgtgccaattcctgcaccgccttcatcccagctgcctatccctcccagccagcccgctcagctggcgctgcacgtccccaccccaggtaaggtccaagtccaagcttctcagttaagcagtttaccacagatggtcgcctccactagacttcctgtggacccagcacccccttgtcctaggcccttgcccactagctccactagtagtttggcaccagtctccgggtctggcccagggccttctccagccaggtctagtcccgttaaccggcctagctcagctactaacaaggccctttcacccgtcacttcccggacccctggcgtggtcgcctctgcccctactaaaccccagtcacccgcacagaatgccacctcctctcaggatagctcccaggacactctgactgaacagataactttggagaatcaggtgcatcaacggattgcagaactgcggaaagccggactttggagtcagcgtcggctgccaaagcttcaagaggcccctagacccaagtcacattgggactatctcctagaagagatgcagtggatggctaccgactttgctcaggaaagacgctggaaggtcgccgcagcaaagaaactagtcagaacagtggtccgacatcatgaggaaaaacagctcagggaggagagaggtaagaaggaggagcagagtcgcctgaggcgcatagccgcaagtactgcacgggagattgaatgcttctggtctaacatcgagcaagtggtagaaatcaagctgcgcgtggagctggaggaaaagaggaaaaaagccttgaacttgcagaaagtttctaggcgtgggaaggagcttcggcctaaaggcttcgacgctctccaggaaagttccctggactccgggatgtccggtagaaagagaaaagcgtcaatttccctcaccgatgatgaggtggatgacgaagaggagacaatagaagaggaggaggccaacgaaggtgtggtagatcaccaaactgagctgagtaacttagctaaagaggccgagctccccctgctggacctcatgaagctctatgagggtgcctttctgccttccagtcaatggcccaggccaaagcctgatggggaagacacgagcggtgaggaggatgctgatgattgtccaggagacagggagtcaaggaaagatttagtgctgatcgactccctgttcattatggaccagtttaaagccgctgagcggatgaatattgggaagcccaacgctaaggatattgcagacgtcaccgcagttgcagaagcgatcctgcccaagggcagcgctcgggtgacaacctcagttaaatttaacgctccatcactgctatacggcgcactgagagattaccagaaaattggtctggactggctggcaaagctctatagaaagaacctaaacggaatcctggcagatgaggctggtctgggaaaaacggtgcagattatcgcattcttcgcccacctcgcgtgcaatgaggggaattgggggccacacctggtggtggtcaggtcctgtaacatactcaagtgggagctggagttgaaaagatggtgtccgggtttaaagatcctctcatatatcggtagtcaccgtgagttgaaggcaaagagacaggaatgggccgaaccgaatagctttcatgtctgtatcactagctacacgcagttctttagaggcctaacagcgtttacaagggtgagatggaagtgtctggtcatagacgaaatgcagagagtgaagggaatgaccgaacgccactgggaggcagtcttcacccttcagtcacaacagaggctgctcctgatcgattctcctttacacaatacattcctggagctgtggactatggtgcatttcttggtgcctggtatctccagaccatacttgagcagcccattacgagcccctagcgaagagagccaagactactaccacaaggtggttattagactgcaccgcgtgacacagccatttattcttagaaggactaaaagggacgtggagaagcaactcaccaaaaagtatgaacatgttctcaaatgtcggctctctaacaggcagaaagcgctgtatgaagatgtcatcttgcaacctggtactcaagaggcgctgaagagtgggcatttcgtcaatgtgctgagtatcctcgttcgtctgcagaggatttgtaaccaccctggcctcgtggaacccagacatcctggaagttcgtatgtggctgggcctctggagtatcccagtgccagcctgatattgaaagccttggagagagatttctggaaggaggcggacctgagcatgttcgaccttataggcttagaaaataaaattaccagacatgaggccgagttgctgagcaagaaaaagatcccacgaaagcttatggaggaaataagcactagtgccgctccagctgcccgacctgctgcagccaagctcaaagcctcaagactcttccaacctgtacaatacggacagaaaccagaaggtcgaactgtcgcctttcccagtacacatccccctcggactgctgccccaaccactgcgtccgccgctccccagggcccattgcgaggcagaccacccattgccaccttttcagcaaaccccgaagctaaaggaggcgaagtcgtgaagatagctcagctggcctcaataaccggtcctcagtcccgagtggctcagccagagactccagttaccctgcaattccaaggctccaaattcacgctcagccactctcagctgcgtcaattgacagccggacagccactgcagctgcaggggagcgtgcttcagatcgtgtctgctccagggcagccttatctgagagcaccaggaccagtagtgatgcagactgtctctcaggcgggagccgtgcacggcgcattgggcagcaaacctccagccggaggacccagtcccgctcctctgacaccacaggtgggtgttcccggtcgcgtcgccgtcaatgcactggcggtcggtgaaccaggcaccgcgagcaaaccagcatcccccattggtggacccacacaggaggaaaagacacgactgctgaaagaacgactggatcagatataccttgtcaacgaaagacgttgctcccaggctccagtgtatggaagagatctgctgagaatatgcgctttacctagccacggaagggtgcagtggagaggttctctggatgggaggagaggcaaagaagcgggtccagcccattcctacacgagtagttcggaatccccctccgaattgatgcttaccctgtgtcgatgcggagagtctttgcaagatgtgattgatagggtggcctttgtgataccccctgtggtagccgctccaccttcactccgggtgccccgaccacccccactgtactcacaccgcatgagaatactgcgccaggggttgagggagcacgccgctccgtacttccaacagttgcgccagactaccgctccgagactcttgcagttccccgagctgcggctcgtgcagttcgactctggcaaattggaggcgctggctatcctcctacaaaagcttaagagcgagggacgtagggttctcatcctcagtcagatgatcctaatgctcgatatcctggagatgtttcttaatttccactacttaacctacgtgcgcatagacgagaacgctagttcggaacagagacaggaactgatgaggagttttaaccgtgatcgcagaatcttctgtgctatcctgagtacgcactcccgaacaacagggatcaacctcgtcgaggccgatacagtcgttttttacgataatgacttgaatccagttatggacgcgaaggcgcaagagtggtgcgaccggatagggaggtgtaaggatattcatatctatcgcttagtcagcggaaattcaatcgaggaaaagctgctgaaaaatgggaccaaggatctgattcgggaagtggctgcacagggcaatgattactcaatggcttttctgacccagcgtactattcaggaactcttcgaggtttacagccccatggacgatgccggattccccgtgaaggcagaagagtttgtggtactgtctcaggagccgtcagttactgaaaccatcgctcctaaaatagccagaccgttcattgaagctctcaaatctatcgagtatctggaagaggatgcacagaaaagtgcccaggaaggagtgttgggacctcacactgacgctcttagctctgatagcgagaatatgccatgtgacgaggagcccagtcagttggaagagctggccgacttcatggaacagctgaccccaattgagaaatatgcactgaattatctggagcttttccatacaagtattgaacaagaaaaggaacggaatagtgaggacgcagtgatgaccgctgtacgcgcttgggagttctggaatttgaaaacattacaagaaagagaggctaggctgcggcttgagcaggaggaagccgagttactcacttatacccgagaggatgcatacagtatggaatacgtgtacgaagacgtcgacgggcagacagaagtcatgcccctgtggacacccccaaccccaccccaagacgacagcgacatttatctagattcagtaatgtgcctgatgtatgaggccaccccaattcctgaggccaagctgcccccagtctacgtgaggaaggagcggaagcggcacaaaactgacccgtccgcggcaggtcgcaagaagaaacaaagacacggagaagctgtggtgccacccagatccttattcgatagggctacgccagggcttctgaaaattcgtagggagggcaaggaacagaagaagaatattttgctgaaacagcaggtgccattcgccaaacccttgcctaccttcgctaagcccacggccgaaccaggtcaagataatccggaatggttgatctctgaagattgggctctcctgcaagccgtgaagcagcttctggagcttcccctcaacctgacgattgttagtcctgcccacacccccaactgggatctcgttagcgacgtggtcaattcatgcagccgtatttataggagcagtaaacagtgccgcaacaggtacgagaatgtgattattcctcgggaagagggtaagtccaaaaataacaggccccttcgaacctcacaaatttacgcccaagatgagaatgctactcacacacagctttacacaagtcacttcgatctgatgaagatgacagctggcaaacggagtccaccaatcaagcccctgctgggcatgaatccttttcagaagaacccaaagcacgctagcgtccttgcagaatccgggatcaattatgataagccattgcctccaattcaggtagcctctttgcgagcagagcgtatcgccaaagaaaagaaagctctggccgatcagcagaaggctcaacagcctgcagtcgcacagccccctccgcctcagccccagccacctccccctccccagcagcccccaccacctcttccacaaccacaggctgcgggttctcaaccaccggcaggaccccctgcggtccagccgcagccacagccccaacctcaaacacagccccaacccgttcaagcgcctgcgaaagctcaacctgctatcaccacgggtggttccgcagcagtcttggcgggaaccataaagacttccgtcactggcacctccatgccgactggggctgtgagcggcaatgtcatcgtgaatacaattgccggtgtgcccgctgcaacttttcagtccattaacaaacgactggcaagccccgtggcaccgggtgcccttactactccaggcggttccgcacctgcccaggtcgtacacacccagcccccaccccgtgccgtgggaagccccgctaccgccaccccggaccttgtttccatggccactactcagggcgtgcgcgcagtcacctctgtaaccgcaagtgctgttgtgacgaccaatctcacaccagtccagactccagctcgttcactcgtcccacaggtgtcacaggctacaggggtgcagcttcccggaaaaaccattactccagcacattttcagctcctgcgacagcaacagcagcagcagcagcagcagcagcagcagcaacagcagcagcagcagcagcagcagcagcagcagcagcagcagcagcaaaccactaccacaagccaagttcaagttccgcaaatacagggccaggcgcagagcccagctcagattaaggccgtcggcaagcttacaccagaacacttaattaaaatgcagaaacagaagctgcaaatgcctcctcaacctcctccccctcaggcccagagcgctcccccacagccaacagcccaggttcaggtgcagacttctcaaccccctcagcagcagagcccccagttaaccaccgtaaccgccccaaggcctggggctttgctgaccgggacaactgtcgcgaacctgcaggtcgctaggctgacacgtgtccctaccagtcaactgcaggcgcaagggcagatgcagacccaagctccacaacctgctcaggtcgctctggctaagccgcctgtggtttcggtcccagcagcggtggtctcctcacctggtgtaacgactctcccgatgaacgtggcgggtatatcagtagccatcgggcagccacaaaaggctgccggtcagaccgtggtcgctcagccagtgcacatgcaacagctgttaaagctcaaacagcaggccgtacagcagcagaaagccatccagcctcaggctgcccagggaccggctgccgtccaacagaagatcacagcacagcaaataacaacccccggagctcagcagaaagtggcgtatgctgctcagccagcgctgaaaactcaatttcttacgacgcccatttcccaggcccagaagcttgcaggggcacagcaagttcaaacacagattcaggtcgctaaactccctcaggtggtgcagcagcaaacccccgttgcctccatccagcaggtagcatccgcttcccagcaggcaagtccgcagactgtagctctcactcaggcaactgccgcaggccagcaggtccagatgatccccgcagtgacagccaccgctcaagttgtacagcagaaactgattcagcagcaggtggtaacaacggcaagtgcacctctacaaacacccggagctcccaatcctgctcaggtaccagcttcctccgattcgccttcccagcagcccaagttgcagatgagagtccctgcggtccgactgaagaccccgacaaagccgccttgtcagta

SEQ ID NO: 186571 - DNA, 9260 bp, Artificial Sequence
  derived and/or modified sequence
atgcaccatggaacggggccacagaacgtccagcaccaactgcaacgcagtagagcctgtcctgggtccgaaggtgaggaacagccagcccaccctaatccgcctccttctcctgctgcacctttcgcaccatcagcttctccgagcgctccccaatcaccctcttatcagattcaacaacttatgaatcgatcccccgctactgggcagaacgtcaacattacgctacagtctgtgggccctgtggtcggaggcaatcagcagatcacgctagctcccctgccactgcctagccccacctcccctggttttcagttcagtgcgcagcctcgaaggttcgagcacggcagtccctcatacatccaggtcacatcaccactttcgcaacaggtccagacccaatctccaactcaaccatctccagggccaggacaggcgttgcagaatgtcagggcgggagcaccaggtcctggcctaggtctctgcagctccagccccaccggcggattcgtcgacgcgagcgtgttggttcgacagatcagcctttccccttccagtgggggacatttcgtgttccaggatggtagcggcctgacacagattgcgcaaggtgcgcaggtgcaactccagcatccgggaacaccgattacagtaagggagaggcggcctagtcaaccgcatacgcagagtggcggtaccattcaccacctagggcctcaatcacccgcagcagccggtggtgccggactgcagccacttgcatcaccttctcatattactacagccaatctgcctccccagatctcatcaattatccagggccagctggtacagcagcagcaggtactacaggggccacccctgccacgtcctcttggattcgagcgcacccccggtgtcctgctacctggggctggcggagcagccggttttggcatgacgagtcctcctccacctacatctcccagccggactgccgtgcctcccggactctcttccctccccctgactagcgtgggaaatacgggtatgaagaaggttcccaaaaagctggaagaaattccccctgcttcacctgagatggcccagatgcgcaagcagtgccttgactaccattaccaagagatgcaggccttaaaggaagtgtttaaagagtatttaatagagcttttctttcttcagcatttccagggtaatatgatggacttcctcgccttcaaaaaaaaacactacgctccactccaggcttatttacggcagaacgatctcgatattgaggaagaggaggaggaagaggaggaggaggaggaaaagtctgaggtgattaatgatgagcaggcccttgccggtagcctggtggctggcgctggcagcacagtggagacagatctgtttaaacggcagcaggcgatgccctctaccggaatggctggaggcatgcctccgactccccaggccgctcagctggctggacagcggcagtcgcaacagcagtacgacccgtccaccggcccacctgtgcagaacgccgcatcactccacaccccactgccacagctgcctgggagactgccccctgccggagtccccacggctgccctgagctctgccctgcaatttgcgcagcagccgcaggttgtggaagctcagactcagctgcagattcccgtcaagactcaacagccaaacgtccccatccctgctccacctagtagccagctacccatccctccaagtcaacctgcccagctggcactccatgtgcctactccaggcaaagtccaagtccaggcaagccagctgtcctctttgccgcaaatggtcgcttcaacccgcttgcctgttgatccagcgcctccctgccccaggcctttacccaccagttcaacaagttccttagcaccagtgagtggatcaggacccggaccgtcacccgcacgtagttcacccgtcaaccgcccttcttccgctactaataaggctcttagccccgtcacaagccgaacccccggtgtagtggcttctgccccaactaagccccagagcccagctcaaaacgccacatcttctcaggacagtagtcaggatacacttacggagcagatcactctggagaatcaagtccaccagcgtatcgctgagctgcgcaaagcaggtctttggtctcagagaagactgcccaaactgcaggaggctccgagacccaaatcccattgggattacctgttggaagagatgcagtggatggccacagactttgcccaggaacgcaggtggaaagtggcggcagcaaagaaactagtgcgcacagtcgttcgtcaccacgaggagaaacagctgagggaggaaagaggtaagaaagaagaacagtctagactgcgacggatcgccgcatcgactgccagggagatcgagtgcttctggagtaatatcgaacaggtggtggagatcaaactcagggtagagttagaggaaaaacgaaaaaaagccctaaacttgcaaaaggtaagtcggagaggaaaggagttgcggcctaaaggctttgacgctctccaggaatcttcattagactccggcatgtccggtcgaaagaggaaggcttcaattagtttgaccgacgacgaggtcgatgacgaggaggagactattgaggaggaggaagccaatgagggagtggtcgaccaccagacagagctgtccaatctcgctaaggaagcagaattgccgcttctggaccttatgaagctgtatgagggggcatttctgccttccagccagtggcctaggcctaaaccagacggcgaggacaccagtggcgaggaggatgccgacgactgccctggggatcgcgaatctcgcaaagatcttgtgctgattgactctttgtttattatggatcagttcaaagctgcggagcggatgaacattggcaagcctaacgccaaagatatcgccgatgtcacagcggtcgccgaagccatactgcccaaagggtccgccagagtcacaacctcagtgaaatttaacgctccctcacttttatatggggcactgcgagactaccagaaaattggactggattggttagccaagctgtaccgcaaaaatctcaacgggattctcgccgatgaggctggattgggcaaaactgtgcagattattgccttctttgctcacctcgcgtgcaatgagggcaactgggggccacacctggtggtcgtgcggtcttgtaatattcttaaatgggagctcgagctgaaacgatggtgcccagggctgaagattctgagttatattggttctcacagagagctcaaagcaaagaggcaagaatgggccgaaccgaacagcttccacgtatgcatcacgtcttacactcagttttttcggggtctcactgccttcaccagggtgcggtggaaatgtctcgtgattgacgaaatgcagagagtgaagggaatgaccgagcgccattgggaagccgttttcactttgcaatcccagcagcggttgctcctgatcgattctcctcttcataataccttcctggaactgtggacaatggttcacttccttgtcccgggaattagtcgcccttacttatcttcaccactgcgcgcaccctccgaggagagccaagattattatcacaaggtggtgattcggctccatagggtgacccagccgtttatcctgcgacggaccaaaagagacgttgagaagcagctgacgaagaagtacgagcatgtgctgaaatgcaggctgagtaaccggcagaaagcactctacgaggatgtcatactgcagccaggaacacaggaggcactgaagagcggacattttgttaatgtactaagcattctggtccggctgcagcgcatatgtaatcatcccggactggtcgagccacgccatccaggtagcagctacgttgccggaccattggaatatccctctgcaagcctcatcctaaaagccctcgaaagggatttctggaaggaggctgacctgagcatgtttgatttaattggactcgaaaataagattactcgccacgaggcagaacttcttagtaaaaagaaaattcctcgcaaactgatggaggaaatctcgacctctgcagcacccgcagcgagacccgctgccgctaagttgaaggcttcacgcctgttccagcccgttcagtacggacagaagccagaggggcgaaccgtggcatttccctccacgcaccctcccagaactgcagcccctactactgcctcggctgctccacaaggcccacttagaggccgtcccccaattgccaccttttctgcaaaccccgaggccaaggctgcagcggcacccttccagacatctcaggcgtctgcatcagcccctaggcaccagccagccagtgcctctagtacagccgcttctcccgctcatcccgctaagcttcgagcccagacgactgctcaggcaagcactcccggtcagccccctcctcagccccaggccccttcccatgcggcagggcagagtgcactcccccaacggctggtcctcccctcccaggctcaggccaggcttccctcaggagaggtcgtaaaaatcgcacagctggcgagcattactggtccccagagccgcgtcgcccaacccgaaaccccagttaccctgcagttccagggcagcaagttcaccctctctcacagccaactacgacagctgaccgccggacaacctctacagctgcagggctccgtactacagatcgtatctgctccagggcagccatacttacgcgctccaggtcctgtcgtgatgcagacagtgtctcaggcaggagctgttcacggtgcccttggcagtaaaccaccagctggagggccatcccctgccccactgactccccaagtaggagtgcctggcagggtcgcggtaaacgctctggccgttggagagcctggcacagcatccaagccggcttcccccataggcggacctacccaggaggaaaaaacacgcctcctgaaggagagactggaccaaatttacctcgtcaacgagcggcgatgcagccaggctccagtgtacggtcgtgatctgctgcggatctgcgctcttccctcccacggcagagtgcagtggcggggatcactcgatggccgacggggaaaagaggccggtcctgctcactcctatacctctagcagtgagagtccttctgaactgatgctaaccctctgcagatgcggtgagtccctgcaggatgtgatagatcgcgtcgccttcgtaattcccccagtcgtggcagcccctccatccctccgggtgcctaggccaccgcctctttatagtcaccgcatgcgcatccttcgtcaaggactccgggaacatgccgctccttacttccagcaactccggcaaaccaccgctcccagactgctgcagtttcccgaacttaggctggttcagtttgacagtggtaagcttgaggcacttgcaattctcttgcagaaactgaaatcagagggacgtagggtcctgatcctgtcgcaaatgatcctgatgcttgacattctcgagatgtttctgaattttcattatctcacttacgtaaggatagacgagaacgcatcctccgagcagaggcaagaattgatgcggtctttcaaccgagatcgccgtattttctgcgctatcctcagcactcatagtcggacaacgggcatcaacttggtggaggcagacactgtcgtgttttacgacaacgacctgaatcccgtcatggatgctaaggcgcaggagtggtgtgataggatcggacggtgtaaggatattcatatttaccgcttagtaagcggcaatagcatcgaagaaaaactgcttaagaatggaacaaaagacctcattcgcgaagtagcagcccaagggaatgactactctatggccttcctcacacaacggaccatacaagagctgtttgaagtttactcacccatggatgatgctggctttccggtcaaagcagaggaattcgtcgtcctgagtcaagaaccctctgttacggaaacaatcgcaccaaaaatcgctcgcccattcatagaggccctgaagagcattgaatatctggaagaggatgcgcagaaaagtgctcaggaaggggtattaggccctcacacagacgccctctcctctgattccgagaacatgccttgtgatgaggagccatcgcagctggaagagcttgccgactttatggagcagctgacacctatcgagaaatatgcattgaactacctggagttattccacacttccatcgaacaggaaaaggaacggaacagtgaggacgccgtaatgaccgctgtgagagcatgggaattctggaatctgaaaacgttacaggagagagaggcccgtttgcgactcgaacaagaagaagcggagctgctcacatacactagggaggacgcttattctatggagtacgtgtacgaggacgtggacggccagaccgaggtcatgcccttgtggacgccacccaccccccctcaagatgactccgatatatatctggactccgtcatgtgtctgatgtatgaggccacaccaatcccagaggccaaactgccccctgtctacgttagaaaggagagaaaaaggcataaaactgatcccagcgccgctgggaggaagaagaagcagcgccacggagaggccgtcgtgccccctaggtctctgtttgacagagcaactcctggtctactgaagattcggcgtgaaggtaaggaacaaaaaaaaaacattttactgaaacaacaagtgccctttgccaaacctctgccaacctttgctaagcctactgccgaacccggacaggataacccagaatggctgatcagtgaggactgggccttactgcaggcggtgaaacagcttctcgagctacccctcaacctcacaatagtgagtcccgctcacacccccaattgggatctggtgagcgatgtcgttaatagttgctctcgcatttatcggagctccaagcagtgccgcaaccgctacgagaatgtgatcatcccacgcgaggaagggaagtctaagaataatcggcctctgagaacctctcagatatacgctcaagacgaaaatgctactcacacccagctttacactagccatttcgacctgatgaagatgacagcaggaaagcgcagcccccctatcaaaccccttttaggaatgaatcctttccagaaaaatcccaagcacgccagcgtgttggcagaaagtggtattaactatgataagccgctgcctcctattcaggtagcatcactgcgagccgaaagaatcgccaaagagaaaaaagccctcgcggaccagcagaaggcccagcaaccagcggtggctcagccacctccacctcaaccccaacctccccctccaccacagcagcctccccctcctctacctcagccacaagcagccggttcccaaccacccgctggcccaccagctgtccagcctcaaccccagccccagccgcagacccagccgcagcccgtacaggccccagctaaagctcaacctgcaattactactggcggttccgcagcggtgctggctgggacgattaaaacctcagtcaccggaacttctatgccaacaggcgctgtgtctgggaacgtgatcgtgaatacaattgcgggagtacccgctgccacctttcaaagtattaacaaaagacttgcatctcctgtggctcctggtgctctgacaactcctggagggtcagcaccagctcaggtggtccatacccagcctcctcccagagccgtgggatcacctgcgacagctacccctgatttagtctcaatggctacaacacagggcgtacgggcagttacctctgttactgcaagcgctgtggtaaccaccaatctgacaccagtccagacccccgctcgctctctggtgcctcaggtcagtcaggcaacaggtgtgcagttacctggaaaaacgattacacccgctcacttccagctgctaagacagcagcaacagcagcagcagcagcagcagcaacagcagcagcagcaacagcagcaacagcagcagcagcagcagcagcagcaacagactacaaccaccagccaggtgcaggtgccccagatccaagggcaggctcagagcccagctcagataaaggccgttggcaaactcacacccgaacacctcataaaaatgcagaagcagaagctgcaaatgccccctcagcccccaccacctcaggcacagtctgccccacctcagccgacagcccaagtccaggtccagacgagccagccaccgcaacagcaaagcccgcagctgaccacggttacagccccaaggcccggagcacttctgaccggaactactgttgccaacctccaggttgcccgactaactcgggtcccgacgagtcaactgcaggcccagggacaaatgcagacgcaggctccgcagcccgctcaggtggcactcgcaaaaccccctgtggtttctgtaccagctgcagttgtaagttcccctggagtgacaactctaccgatgaacgtcgctggcatctcagtcgcgatcggacagccccaaaaggctgccggacagacggtggtggctcagccagtacacatgcaacaactgctcaaactgaagcagcaggcagtgcaacagcagaaagccatccagcctcaggccgcacaggggcctgccgctgtacagcagaaaatcaccgcccaacagattacgactcccggtgcccagcagaaggtagcctatgccgcacaaccagctctcaaaacccagtttctgacaacaccaatttcgcaggcacagaaactggccggtgcacagcaagttcagactcaaattcaggttgcaaaactgcctcaagtggttcaacagcaaacccctgttgcgtcaattcagcaggtggcttccgcctctcagcaggcttctcctcaaacagtggctctcacccaagctacagcggctgggcagcaggtccagatgatccccgctgtgactgcgaccgcccaggtggtgcagcagaaattgattcagcagcaggtcgttacaacggccagtgctcctttgcagaccccaggagcacccaatcctgcccaagtgcccgcttcctctgattccccaagccagcagcctaaactccaaatgcgggtccctgcggtccgcctgaagactcctacaaaacccccttgtcaata

SEQ ID NO: 186572 - DNA, 9479 bp, Artificial Sequence
  derived and/or modified sequence
atgcaccacgggaccggtccacagaatgtgcagcatcaacttcagcgctcccgggcttgtccaggttcggaaggtgaagaacagccagcacaccccaaccctcctcctagcccagccgctcccttcgctccctccgcctccccttctgctcctcagtcaccttcataccagattcagcagctgatgaatcggtctccagcaacagggcagaatgtaaacattacactccagtcagtaggccctgttgtgggagggaatcagcagattactctggcaccattgccactgccctcacctacgtcacctggatttcaattctctgctcaaccacgtcggtttgagcatggctcaccatcatacattcaggtcacatcacccctgtcccagcaggtacaaacccagagtcctacccaaccctcacctggccctggtcaggccctgcagaatgtgcgcgctggagcgcctggcccagggctcggtctgtgctctagtagtcccaccgggggattcgttgacgccagtgttcttgttcgccagatctccctttctccctctagcggtggccacttcgtctttcaagacgggtccgggctgactcagattgcacagggagcccaggtgcagctgcagcatccaggcaccccaataacagttcgtgaacgtaggccatcccagccccatacccagagcggtggcacaattcaccatctggggcctcaaagccccgctgctgccggtggggctggcctccagcccctcgctagtccttcccatattaccaccgccaatctacccccacagatttcctctattattcagggacagttggttcagcagcagcaggttctgcagggtccacctctgccaagaccgttaggcttcgaacggacgcccggagtgctattgcccggagccggaggcgctgccggattcgggatgacaagccccccacctccaaccagcccctctaggaccgccgtacctcccggactgagctctttgccactgacatctgtagggaacactggaatgaagaaagtccctaagaaattggaggaaatacctcctgcctctccagagatggcacaaatgagaaaacaatgtcttgattatcactaccaggaaatgcaagccctgaaagaagtctttaaagagtacttaatcgagctgttctttttgcaacatttccagggaaatatgatggattttctcgcatttaagaagaaacattacgcgcctcttcaggcttacctacggcaaaacgacctggacatcgaggaggaggaagaggaggaggaagaagaggaagagaaatccgaagtaatcaatgatgaagtcaaggtcgtcactgggaaagatgggcagaccggcacaccggtagctatcgccactcagttgcctccgaaagtgtcagccgcatttagctctcagcagcagccatttcaacaggccctcgcagggagcctggttgccggtgcaggaagtacagtggagacagacctttttaaacggcagcaggcaatgccatcaacaggtatggcagaacagtctaaacggcctcgtcttgaagtgggccaccagggtgtggtgttccagcaccctggcgctgatgcaggcgtccccttgcagcaattaatgcccaccgcacagggcggaatgccccctacaccacaggctgctcagctggccggacagcggcagagccagcaacagtatgacccatctacgggccctcctgtgcagaacgccgcttctctgcatacaccactcccccagctccctggcaggcttcccccagccggtgtccctactgctgctctttcatcggcccttcagtttgcccagcagccccaagtcgttgaagctcagactcagttgcaaatacccgtgaaaacacagcagcccaacgttcctatacccgctcctccctcttctcaacttcccatacccccaagccagcccgctcaattggctttgcatgtccctacgccgggtaaggtccaggtacaagccagtcagttgagcagtctgcctcagatggtggcatcaacaagactgccggtagatcccgctccaccctgtcctcgcccattacccacgtcctctaccagttccctggccccagtctcagggtccgggccaggacccagtcccgcacgaagcagtcctgtgaaccggcctagcagcgctacaaacaaagccctgtctcccgttaccagtcgcacacctggagtagtagccagtgccccaactaaaccacagagccccgctcagaatgccacctccagtcaagacagctcccaggacacactcactgagcagatcactttagaaaaccaagtgcatcagagaatcgctgagctccggaaggctggattatggagtcagagacgtctgccaaagctccaagaagctcctaggcccaagagccactgggactatctgttagaggagatgcagtggatggcaacagatttcgcgcaagagcgccgatggaaggttgccgcagctaaaaagctggtcaggacagtggtgaggcaccacgaggagaaacaattacgtgaagaacgcggtaagaaagaagagcagagtcgcctaaggcgcattgctgctagcacagctcgcgaaatcgaatgtttctggtctaatatagagcaagttgtggaaataaaacttcgggtcgagttggaagaaaagaggaaaaaggctctcaatctacagaaggtgagtagaagagggaaggaattgcgtccaaaaggattcgatgccctgcaagaaagctcccttgactcagggatgagcgggagaaagcgaaaagcctcaatctctctcactgacgacgaagtggatgacgaggaggaaaccatcgaggaggaagaagcgaatgaaggagtagtagatcaccagaccgagctttcaaatttggccaaggaagccgaactgcccctgctggacctcatgaagctttatgagggggctttcctgccttcctcccagtggccaaggcccaaaccagacggtgaggataccagcggggaggaggacgcagacgattgtcctggcgaccgtgagtcacgaaaagatctggtgttaatagactcactctttataatggaccagttcaaagccgcagaacggatgaacataggtaagccaaatgctaaagatatcgctgacgtaaccgctgttgccgaggcgattctgccaaagggctctgctcgggtcaccacatctgttaagtttaatgcaccaagcctgttgtatggggcattacgggattaccagaaaatcggccttgattggctggctaaactgtataggaagaacctaaacgggatcctggctgatgaggctggacttggcaagactgtgcaaatcatagccttcttcgctcacctggcatgcaatgaggggaactggggacctcacctcgtcgtggttcgatcctgcaatatcctcaagtgggaactggagcttaaaagatggtgccctgggctgaagattttgagctatattggatcgcaccgtgagcttaaggcgaaacgccaggagtgggccgaacctaattcttttcacgtgtgcattacatcatatacccagttttttagaggcttgaccgcttttacgcgtgtgcgatggaagtgtcttgtcattgacgagatgcagcgggtcaaggggatgactgagagacactgggaagcagttttcaccttacagagccagcagcgcctattactgatcgattctcctctgcacaacactttcctagagctttggacaatggtgcactttctagtccctggaatttctcgaccctacctgagcagccctctgagggctccttcagaggaatctcaggactattaccataaggtggtgattagacttcacagagtcacacagccttttattctgcgaaggacaaaacgggacgtagagaagcagctgaccaagaaatacgagcacgtcttaaagtgtaggctttcaaatcgccagaaagccctgtatgaagacgtgatcctgcaacccggaacccaggaggctctgaaatccgggcactttgtaaatgttttgtctatattggtccgtttacagcgcatctgtaaccaccctggcctagtagagcctagacaccctgggtctagttacgtcgccggtcccctggagtacccgagtgcgagcctcatcctaaaggcactggaacgcgacttctggaaggaggctgatctgtctatgtttgacctaattggcttggagaacaaaatcacgaggcatgaggcggaactgcttagcaagaagaagattcctaggaagctaatggaggaaatctctacttccgccgcacccgctgctaggcccgcagccgctaagctgaaagcgtccagattgttccaacctgttcagtatggccagaagcctgaagggagaacggttgcattcccgtcaacccatccgccacggacagctgccccaacaacagcaagcgccgctccacagggccctctgcgtggcagaccgccaatagccactttcagtgccaatcctgaggccaaggccgcagccgctcctttccagacttctcaggccagcgcgtcggcgcctaggcatcagcctgctagcgcatctagcactgcagcctcaccggcacacccagcaaaactcagggctcagactaccgcgcaagcatctacgcctgggcagcccccaccccaaccacaggctcccagccacgccgctggccaatctgcgctgccccagcgactggttctgcctagccaggcccaggcgaggttgccttctggagaggtagtcaaaattgctcagctcgcgtctattaccgggccacaaagccgggtggcgcaacctgagacacctgtgaccctgcagtttcaaggcagtaagttcaccttgagccatagtcaattacgtcagctgactgctggccagcccctccagcttcagggttcagtcctgcagattgtgtccgctcccggtcaaccctaccttcgcgcacctggccctgtggtgatgcagaccgtttcccaggcaggtgcagttcacggtgctctaggttctaagcccccagcaggcggtccctcccccgcacccctgaccccccaggtcggcgtgccaggcagagtcgccgtgaacgctctcgccgttggggagccgggtaccgcatccaagccggcttcacccatcgggggacctacccaggaagagaaaactagacttctcaaagagcggcttgatcaaatctacctggtcaacgaacggcgttgtagccaggccccagtgtacgggagagatctactgcgtatatgtgcgttgccatctcacggcagggtgcagtggagaggcagccttgacggcaggagaggcaaagaagcgggacctgctcacagctatacctcgtcctccgaatccccatctgagctgatgttgactctgtgtcgatgcggagaaagtcttcaggatgtgatcgatcgcgtagccttcgtgataccacccgttgttgctgctccaccctcactgagggtccctaggcctccgcctctgtattcacacaggatgcggatactgcgacagggactccgagagcacgccgctccgtactttcagcagctgagacaaaccaccgcccctcggctgttgcaattcccggaactgcgcctggtgcagttcgatagcgggaaattagaagccctggccatacttcttcaaaagcttaagagcgaaggacgacgcgtgctgattctcagtcaaatgatcctgatgttggacattcttgagatgtttcttaatttccactatctcacgtatgtgcggattgacgaaaatgcttccagcgagcagcgtcaggaattgatgcgctcctttaatagagatagacggattttctgtgctattctgtcaactcacagtcgaacaactggaatcaacctggtggaggccgacaccgtggttttttatgacaatgaccttaatccggtgatggatgcaaaggctcaggagtggtgtgatagaatcggccgttgcaaagacatccacatttatcgattagtgtccggcaacagcatcgaagagaaattactgaagaatggaaccaaagacctcattcgggaggttgcagcacagggcaacgactactcaatggcatttcttacccagaggaccatccaggaactgtttgaggtgtatagcccaatggacgatgccggttttccagtaaaggccgaggaatttgtagttctctcccaagagccttcagtcacagagactatcgccccaaagatcgcaagacccttcatcgaggcgctgaagagtatcgaatacttggaggaagacgctcagaagtccgcccaggagggcgtgctggggcctcataccgatgcactgagtagcgactctgagaatatgccatgcgacgaggagccatctcagcttgaagaactggccgatttcatggagcagttgacaccaatcgagaaatatgccctgaactatctggaactgttccacacatccattgagcaggagaaagagcgaaacagcgaagacgctgtgatgactgctgtaagggcatgggagttttggaaccttaagaccttgcaagaaagggaggccagattacggttggagcaggaagaagctgagctgctgacgtatacacgcgaggacgcctattcgatggagtatgtgtacgaggacgtggatggccaaacagaagtgatgccgctgtggacaccgcctaccccccctcaagacgactcagatatttatcttgatagcgtaatgtgcttaatgtatgaagctacacccataccagaggccaaattgccacctgtgtacgttcgcaaagaacggaagcgacacaaaaccgacccgtccgcggctggccgaaagaaaaagcagcggcacggggaagccgtggtgcctcctaggtctctcttcgatagggccactccaggcctccttaagattcgtagggagggcaaggaacagaagaagaacattctcctgaagcagcaggtgccgttcgcaaagcccctgcccacctttgctaagcctacggccgagcccggacaagacaacccagagtggcttatctcagaggattgggcacttctgcaggctgtgaagcagttgctggaactgcctttaaatctgactatagtgtcgccagctcacacccctaattgggatctagttagcgatgtggtgaactcttgctcgaggatatataggtcttcaaaacagtgtcgtaataggtacgaaaatgtgatcatcccaagggaggaaggcaaaagcaagaataaccgtccactgcgcacctcccaaatatacgcacaggacgagaatgcaacccatacgcagctctacaccagccatttcgaccttatgaaaatgaccgccggaaaacgctctcccccaattaagcctctgctgggcatgaatccatttcagaaaaaccccaaacatgctagcgttttggcggaatccggcatcaactacgacaaacccctacccccaatccaggtggcctctctgagggctgagagaatcgctaaagagaagaaggcactggccgatcagcagaaagcccagcaacctgcagtggcgcagccacctcctccccagcctcagcctccgccacccccacagcagcccccacctcctctgcctcagccgcaggcggcagggtcccagccccctgcgggaccccctgctgtccaaccacaaccccagcctcagccacagacccaaccacagccagtacaggctcccgctaaggcacagcccgctatcactaccgggggttctgctgccgtgctcgccggaactattaaaactagcgtgacgggcacctctatgccaaccggcgcagtaagcggaaatgtgatcgttaacacaatcgctggggtacccgctgctacattccagagcatcaataagcggcttgcttcacccgtggcccctggcgcactgaccacccctggagggagcgcccctgctcaagtggttcacactcaacctcctcctcgtgcagttggaagccctgccacggccacacccgaccttgtgtccatggccactacacagggtgtgagggccgtcacgagtgtgactgcaagcgccgtcgtgactacaaatctgacaccagtacagacccctgccagatcgctggtgcctcaggttagtcaggctacaggagtgcaattgcctgggaaaacgatcactcccgctcattttcagttgcttcgacagcaacaacagcagcagcagcagcagcagcaacagcagcagcagcagcaacagcaacagcaacaacaacagcagcagcagcagcagacaacgacgaccagtcaggtgcaggtgcctcaaatccagggccaagctcagtcgccagctcagatcaaagctgtgggaaaacttactccggagcacctgataaagatgcaaaaacagaaactccaaatgccaccccagccacccccaccccaggcccagagcgccccacctcaacccacagctcaggtgcaggtgcaaacgtcccagcctcctcagcagcagagtccccaactgactacggtgacggccccaagaccaggcgctcttctgacaggtaccacagtggccaacctacaggtggctaggttgactcgagtccccaccagccagctacaagctcaggggcagatgcagacccaagcaccgcaaccagcccaggtcgctttagccaagcccccagtcgtgagcgtgcccgctgctgttgtctctagccccggagtcactactctgcctatgaacgtggccggaatctccgtagccatcggtcagcctcagaaagccgcaggacagacggtcgtagcgcagcctgtacatatgcagcagctgctgaagctgaaacagcaggcagtgcagcagcaaaaggccatacagcctcaggccgcacaggggcctgcggctgtccagcaaaagattaccgcacagcagattacaacccccggagcacaacaaaaagtcgcctatgctgcacagccagcgctgaaaacacagttcttgaccacccctatttcacaagctcagaaactcgcgggtgctcagcaggttcagactcagattcaggtggccaagctcccccaggtcgtccagcagcagacgccagtggcatccattcagcaggtggccagcgcctctcagcaggcgtctcctcagacggtcgctctgacccaggcgaccgcggctggtcagcaggtacaaatgattcctgccgtgaccgctacggcccaggtggtgcaacagaagttgattcagcagcaggtggttacaaccgcctccgcaccactgcagacacccggagcgcctaatcccgctcaggtgcctgccagtagcgatagtccctcccagcagccaaagcttcagatgagagtgcccgcagtgcggctcaagacccccaccaagccaccctgccaata

SEQ ID NO: 186573 - DNA, 9371 bp, Artificial Sequence
  derived and/or modified sequence
atgcaccacggaactggcccacagaacgtgcagcaccagctgcagcgttctagagcttgtcccggaagtgaaggtgaggaacagccagcacatccaaatcctcccccttcgcccgctgctcccttcgctccctcagcaagcccctcggcaccacagagcccgtcttaccaaatccagcaactaatgaatcggagtcccgctaccggtcagaatgtgaacataacactgcagagcgtaggtccagtagtgggtggtaatcagcagatcactctggctccacttcccttgccatcccctacttcaccaggcttccagttctctgctcaacctagacgttttgagcacggcagccctagctacattcaggtaactagccctctctcccagcaggtgcagacacaaagtcccacacaaccatctccaggccctggtcaggcgctgcagaatgtgcgcgctggtgccccaggacctgggctgggtctgtgttctagctctcccactgggggattcgttgatgcatccgtgctcgtgagacagattagcctcagtccatcaagtggcggacatttcgtgttccaagacgggagtggattgacccagatagcccaaggtgcccaggtgcaactgcagcacccaggaactcccatcactgtgcgtgagagaaggcccagccagccacacactcagtccggcggtactatacatcacctgggaccacagtcgcccgctgctgcaggaggtgctggactgcaaccactcgcctccccctctcacattaccactgccaacttgccccctcagatctccagcattattcagggccaattggttcaacaacaacaagtgcttcaaggaccaccactccctcgccctctggggttcgagcgaacaccaggcgtgctgcttcctggggctgggggagccgctggtttcggcatgacctccccaccgccaccaacgtctccatcgaggaccgctgtacctcctggtctgtccagcctgcctttgacaagcgtgggaaacacaggtatgaaaaaggtgcccaagaagttggaagagatccctccggcttctcccgagatggcccagatgcggaagcaatgccttgattaccattaccaggagatgcaggccctcaaggaggtgttcaaggagtatctgatagagctgttcttcctacagcacttccaaggtaatatgatggattttttggcctttaagaaaaagcactatgccccattacaggcatacctgcggcagaatgacctggatatcgaggaggaggaggaggaggaggaagaggaggaagagaagtccgaagtcataaacgacgaacagcaagctctggctggttctctagttgccggagcaggctctaccgttgagaccgatttattcaaacgccaacaggctatgccttccactggcatggctgaacagtctaagcgccctaggctggaagtgggccaccagggagttgtcttccagcatccgggagcggacgcaggagtgccactccagcagctcatgccaactgctcagggcggaatgccaccgacaccccaagccgctcagttggccggtcagcggcagtctcaacaacaatatgatccttctactggcccaccagttcagaatgcagcaagcttacatacacctcttccacaactgcccggacgcctgcctccagcgggagtgcctacagcggcactcagcagcgctctgcagttcgcccagcagccacaagtcgtcgaagcccagacacaactacaaattccggtcaagacacagcagccaaacgtcccgattcccgctccaccctctagccagctcccaattcctccctctcagcctgcccagctggccctgcatgtccccacccctggcaaggtacaggtacaggccagccaactgtccagtctgccacagatggtcgcctcaacgcgcctgcccgtcgatcccgctcctccttgtcccagaccgctgcccacaagcagcacttcgtccctggcaccagtttcgggatcagggcctgggccttctccggcaaggagcagccccgttaacaggccatcctctgccaccaataaagctctgtcacccgtgacctctagaactcctggtgttgttgcttccgccccaactaaaccccagagtccagctcaaaatgctactagcagtcaggactcctcccaggatactctgacggaacagataactctggagaaccaggtgcaccagagaattgcagagttgaggaaggctggcctgtggtctcagagaaggctgcccaagctgcaggaagccccacggcctaagtcacactgggattatctcctggaggaaatgcagtggatggcgaccgacttcgcccaagaacggagatggaaggtggccgctgccaaaaagcttgtccggaccgttgtgcggcaccatgaggagaagcagctacgggaggagcgtggcaaaaaagaggagcaatctagactgcggcgtattgctgccagcacagcccgagaaattgagtgcttctggtccaacatcgagcaagtcgtggagattaaattgagagtggagttggaggagaagagaaaaaaggccctgaatcttcagaaggtgtcccggcgaggaaaggagttgcggccaaagggttttgatgctcttcaagagtcttctctcgatagcggaatgagtggtcggaagcgcaaagcttctatttcccttacagacgatgaagtcgacgacgaagaggaaaccatcgaagaggaggaagcaaacgaaggagtggtcgatcatcagactgaactcagcaaccttgcaaaagaggctgagctgccgctgctggacctcatgaagctctacgagggagctttccttccctcgtcccagtggcctcgtccgaagcctgacggcgaagacacatccggtgaagaagatgcagacgactgcccgggagatcgggagtcacggaaggacctcgtactgatagatagcctgttcattatggatcagttcaaggccgctgaaaggatgaacattggcaagcccaatgccaaagacatcgccgacgtcactgccgttgccgaagctattctgccaaaaggaagcgcgcgagtgaccacttccgtgaagttcaatgccccaagcctgctctacggggcactcagagattatcagaaaatcgggctggactggctcgccaagctctatcggaaaaacttgaatggcatactagcagacgaagctggcctgggaaagaccgtgcagattatagcatttttcgcccacttagcctgtaatgaaggtaactggggtccacacttggtggtcgtgcgctcttgcaacattctgaagtgggagttggagctgaagcgttggtgcccaggcttaaagattctgagctacattggctctcatcgcgaactcaaggcaaagaggcaggaatgggcagagccaaattcatttcacgtatgtattacctcctatactcagttcttccggggactcaccgcctttactcgggttaggtggaagtgtctggtcatcgacgagatgcaaagggtgaaaggcatgacggagcgacactgggaggccgtgttcaccctccagagtcaacagcggttgctgttgattgacagtcccctgcacaacacttttttagaactgtggacgatggtccacttcttggtgccgggtatctcccgaccctacttgagttccccactgagggcgcctagcgaagaaagtcaggattactatcacaaggtcgtgatcaggcttcacagggtcacacagccatttatcttacgaaggaccaagagggacgtggagaaacagctgaccaagaaatatgaacacgtcctgaaatgccgattgagcaatcggcaaaaagctttatatgaagacgtgatcttgcaacccggtacccaggaggcattgaagagtggccacttcgtcaatgttctgtccatcctagtgcgactccagagaatctgtaaccatcctggactagtggaacctagacatcctgggagctcatacgtggcaggtcccctggaatatcctagcgcttctctcatactgaaggccctggagagggatttttggaaagaggcagacctatccatgttcgacctgattggcctagagaacaagatcacgaggcacgaggctgaattactgtccaagaaaaaaattccacgaaaattgatggaggagatatcaacatcggccgcaccagctgcacgacccgcagccgcaaagcttaaagcgagccggttgttccaacccgttcagtacggccagaagcctgaaggaagaactgtagcctttccatcaacccatcccccacgtaccgccgcacccacgaccgcttctgcagcaccccagggacccctgaggggccgtccccctatcgccacatttagcgccaaccctgaagcaaaagccgctgcggcaccattccaaactagtcaggcaagtgccagcgcaccaagacaccagcctgcctctgcgtcaagcactgctgcgagtcccgctcatccagcaaagctccgggcacaaaccactgcacaggcctctactcctggtcagcctccccctcagccacaggcccctagtcatgctgcgggacagtctgctctgccacaaagattagtgcttcccagccaggctcaggcacggctgccaagcggagaggtggtgaaaattgctcagctcgcatccataaccgggcctcagtcacgggtcgcccaaccagaaacaccagtcacactacagttccagggtagtaagtttacgctttcacactctcaattgagacagctgaccgcgggacagcctctgcaactgcaggggtccgtgctgcaaattgtctcagctcctggacagccttatctgagggcacctggacccgtggttatgcaaacagtgagccaggccggagcggtccacggagctctaggcagcaagcccccagccggagggcctagtccagcccctctaaccccccaggtgggtgtgcctggaagggtagctgtcaacgcacttgccgtgggcgagcctggaaccgcttctaaaccagcatccccaatcggtggaccaacacaggaggaaaaaacccgccttttgaaagaaagactggaccagatctacttggttaatgaaaggcgctgttcacaggccccagtgtatgggagggatctgctccgtatctgcgctctcccgtcccacggccgtgtgcagtggagaggcagtctggatgggagacggggtaaggaagcagggccagcccactcctatacctcctccagcgagagcccaagcgagctgatgttgactctctgccgatgtggcgagagtctccaggatgtcatcgatcgcgttgccttcgtgattcccccagttgtcgccgcacctccaagcctaagggtcccgaggccgcctcctctgtattcacacaggatgagaattctaaggcagggcttacgcgaacatgcagcaccatacttccagcagttgagacagactaccgcgcctcggctcctacaatttccagaactgcgcttagtgcaattcgattcgggtaaactggaggccctcgccatactgttgcagaaacttaaaagcgaaggcaggcgggtcttaatcctaagtcagatgatcttaatgttggacatactcgaaatgtttcttaattttcattatcttacttatgtgagaattgacgagaacgcctcaagcgagcagcgtcaggagctgatgcgatcgtttaatagggatagaaggattttttgcgccatactgagcacacactcccgcactacaggtatcaacctcgtggaggccgacaccgtggtcttttacgacaacgaccttaaccccgtcatggacgcgaaagctcaggaatggtgcgaccgaattggtaggtgtaaagacatacacatctatcgccttgtgtctggtaatagcatcgaagaaaaactcctcaagaatgggactaaagatctgattagggaggtggccgcacaaggcaacgattattctatggcattcctgactcagcgcacaattcaggaactgtttgaggtgtattctcctatggacgatgccggtttcccagtgaaggccgaggaattcgtagtgctgtcccaggaaccgtcagtcaccgaaactatcgctcctaaaattgcgagaccgtttatcgaggcattgaagtccatagaatacctggaggaagatgctcaaaaatccgcccaagagggcgtattgggcccacacacagacgcgttatccagcgacagcgaaaatatgccctgcgacgaagaaccatctcagctggaagagctcgccgatttcatggaacaactgacaccaatagagaaatatgcactaaattacctagaactgttccacacttctattgagcaggagaaagagaggaatagtgaggacgccgtgatgactgcagtccgggcttgggaattttggaatttgaagacactgcaggaacgggaagccaggttgcggctggaacaggaggaggctgagcttttgacatatacccgggaggacgcatactccatggaatatgtctatgaggacgttgatggacagactgaggtcatgcctctctggacccctcctacacctccccaggacgactcggacatttacctggattcggtgatgtgtctgatgtacgaggccacaccaataccagaagctaagttgccacctgtctacgtgcgaaaggaacgtaaacgacataagactgatccctccgccgctgggcgtaaaaagaaacagaggcacggtgaagcagtcgtgcctccgaggtccctcttcgaccgcgctacgcccggactcctcaagatcagacgcgaaggaaaagaacagaaaaagaacatccttctcaaacaacaggtgcctttcgcaaagccactccctacctttgctaagcccactgctgagcctggtcaggataatcctgaatggctgatcagtgaagattgggctctactgcaggccgtaaagcagttgctggagcttccactgaacctcaccatcgtgagccctgcccacacgcctaactgggatctcgtctccgacgtagtgaactcatgcagccgaatatacaggtcctctaagcaatgtagaaataggtacgagaatgtcattatcccgagggaagaaggcaaaagtaaaaacaatagacccttgcggacaagccagatatatgcacaggacgaaaatgctacgcatacacagctctatacatcgcacttcgacttgatgaagatgaccgcagggaagcggtccccacccattaaacccctgctgggaatgaacccatttcagaagaatccaaagcacgcgtccgtgctggcagagtcaggcattaattatgataagcccctccctccaatccaggttgccagtttgagagccgaaagaatcgccaaggaaaagaaagccctcgctgaccaacagaaagcacaacaaccagcagtagcgcagccacctcctccacaaccgcagccgcctccaccaccccagcaacctcctccccctctgcctcagccccaggccgctggctcccagcctccggcagggcctcctgctgtgcagccccaaccacaaccccagcctcagactcagccccagcccgtgcaggcccctgccaaagctcaaccagctattactaccgggggaagtgcagccgtgctggccggaacaatcaagacgtccgtgactggaacttcaatgccgaccggggctgtgtcaggcaatgtcatagttaacaccatagctggagtgccggcagctacgtttcagtctatcaataaaagactggcttcacctgtcgccccaggggctcttacgacccccggtggatctgctcccgcacaagtcgttcacacgcagcctccgcctcgagcagtgggctcccccgcaacagctaccccagatctcgtatccatggccacgactcaaggcgttagagcggtcacatcggtcaccgcgtccgccgtcgtgactaccaatctgaccccggtgcaaactccagcgcgatccctcgtcccccaagtaagccaggccaccggtgtgcagctccccggaaagaccatcacaccagcccacttccagctcttgcgccagcagcagcaacaacagcaacagcagcagcagcagcagcaacagcaacagcagcagcagcaacagcagcagcaacaacagcagcagacgacaactacttctcaggtacaggtccctcaaattcagggtcaggcacaaagccccgcacagattaaagcagtgggtaaacttacccctgagcacctaatcaaaatgcaaaaacaaaaacttcagatgccaccccagcccccacccccacaagcacaatccgctcccccacagccaacagctcaggttcaggttcagacttctcaaccaccacagcagcaatctcctcagcttacaactgtgactgctccacgacctggggcactgctgaccggaaccaccgtggcgaatcttcaggtggcaagactcactcgtgtccctactagtcagctccaggcccagggccagatgcagactcaggcgcctcagccagcacaggtcgcgctcgcaaagccaccagtcgtatctgttccagctgctgtggtatcctctcccggagtgacaaccctgccaatgaacgttgctggtatatcagttgcaatcggacagcctcagaaagcagcaggccagacggtggtggcacagcctgttcacatgcagcagctgcttaaactgaaacaacaggcagtgcagcagcagaaggccatccagcctcaagccgctcagggcccagctgccgtccagcagaaaatcacggcgcaacagattactacccctggtgcgcagcagaaagtcgcctacgcagcccagccggcattaaagacccagtttctgaccacgcctatttcccaggcccagaagttggccggagcccagcaggtgcagactcagatccaggtcgcgaaacttccacaggtggtgcaacaacaaactcctgtcgcctctatccagcaggttgcatctgcttcgcagcaggcctccccgcagacagtggctttaacccaggccactgccgcaggccagcaggtccagatgattccagcagtaaccgcaacggctcaggttgtgcaacagaagctgattcagcagcaggtcgtgactactgcctcagcgccactgcagaccccaggtgctcctaaccccgcacaggttcccgcatcaagtgactccccttcccagcagccaaaacttcaaatgcgcgtgccagccgtacggctcaagaccccgacaaaacccccatgccagta

SEQ ID NO: 186574 - DNA, 9369 bp, Artificial Sequence
  derived and/or modified sequence
atgcaccatggtactggtcctcagaatgtccagcaccaactgcagcgcagtcgcgcatgcccgggatctgaaggcgaggagcagcccgcacatcccaatcccccaccatcccctgcagccccattcgccccatcggcatccccttctgccccacagagcccatcttatcaaatacaacagctgatgaatcgcagcccagctaccgggcaaaacgtcaatataaccttacagtcggtgggccctgtggttggtgggaatcagcagatcacacttgctcctctccctttgccgtcccctacaagccccggattccagttcagcgcccaaccccgtcgctttgagcacggctcaccttcatatatacaagtgaccagccctttgagtcagcaggtgcaaacccagagcccgacacagccgagccctggaccaggccaggctctgcagaatgtgagggccggtgctcctggacccggattgggcctgtgttcgagttcaccaacaggaggcttcgtggacgcctctgtgctggtgaggcagattagtctcagtccttcttccggtggacattttgtgttccaggatggaagcggactcacacagatcgcacagggcgctcaggtgcagctgcaacatcctggtacacctataactgtcagagaacggcgaccatctcagcctcatacgcaaagtggcggtaccattcatcatttagggcctcagtcacccgctgcagccggtggggctggactgcagcctcttgcgagtccttctcacatcaccactgccaacctgcctccccagatttcgtctatcatccagggccagctcgtgcagcagcagcaggtcttgcagggacccccactccctcggcctctgggatttgagagaacacccggtgtactgttgcccggagcagggggtgccgcaggcttcggcatgactagtcctcctcctcccacctctcctagtcgcaccgccgttccccctggactgtccagcctgcctctgacgtctgtggggaacacaggcatgaaaaaagtccccaagaaacttgaggagatccccccagcctcccccgagatggctcagatgcgaaaacagtgcctggactaccattaccaggagatgcaagcattgaaagaggtgtttaaagagtacctgatcgagctttttttcctccagcacttccagggtaacatgatggattttcttgctttcaaaaagaagcattatgcgcctctccaagcatatttacgacagaatgacttagacatcgaagaggaggaggaggaggaagaagaggaagaagaaaagtcggaagttattaacgatgaacaagcgttagccggatctttggtggctggagccggtagtacagtggaaactgatctctttaaacgtcaacaggctatgccctccacaggcatggccgagcaatccaagcggcctaggcttgaagtcggacaccagggagtggtgtttcagcatccaggggctgatgctggtgtccctctgcagcagctgatgcctactgcacaaggaggcatgccccctactcctcaagcggctcagctggcaggtcaacggcagtcccagcaacaatatgacccgagtaccggcccacccgtacagaacgccgcaagcttacatacccctctgccacaattgccagggcgattaccacccgcaggcgtgcctaccgcggcactatccagcgcactacagtttgcccaacagccacaagtcgttgaagcacagactcagttgcagattccagtgaagacccagcagccgaatgttccaatcccagcacccccttcatcccaactgccaattcctcccagccagcccgctcaattggccctgcacgtgcccactcctggcaaagtacaggtgcaggcttctcagctgagttccctcccacagatggtggcttcaactcggttgccagttgatcccgcaccaccatgccctaggcccctgccaacttcttccaccagttctctagcccctgtgtctggtagtggccctggcccttcccccgcacgatccagccccgtgaacaggccttcaagtgctacaaataaggccctttcccccgttacctccagaactccgggagttgtcgcttctgcccctacaaagcctcagtcccctgctcagaacgcgacatcaagccaggacagctcgcaggacacactgaccgagcagatcacattagagaatcaagtgcaccagaggatagcagaactacggaaggcaggattatggtcgcagagacggctgccaaaactgcaagaagctcccagacccaagtctcactgggattacctcttagaagagatgcagtggatggcaaccgattttgcacaggagcggaggtggaaggtggccgctgctaaaaagctggttcgaacagttgtgaggcatcatgaggagaaacagctccgcgaagagagaggtaaaaaggaagagcagtctagattgaggcgtatagcagcgtctactgctcgagagatagagtgcttctggtctaatattgagcaggtggtagaaattaagctccgtgtggaacttgaagagaagcgcaagaaagctcttaatctccaaaaggtgtccaggcgtggcaaggagttacggccaaaggggttcgatgcgctgcaggagtctagcctagactccggcatgagcgggcgtaaacgaaaggccagcatcagccttacggacgatgaggtcgatgacgaagaagaaacaatagaggaggaagaagccaacgaaggcgtggtggatcatcagaccgagctaagcaatctcgcgaaggaagctgagctgcctctgttagacctcatgaaactatacgaaggcgcattcctgccatcatcccaatggccaagaccaaaacctgacggagaagataccagcggagaagaagatgccgatgattgccccggagaccgagaaagcaggaaggatctggtactgattgactccctgttcattatggaccagttcaaagccgcagaacgaatgaacattggaaagccaaacgcgaaggatatcgccgatgtgaccgccgtagcggaggctattctgccaaagggttcagcacgagtcaccacctctgttaaattcaatgcacccagtctcctgtacggggctcttcgggactatcagaagatcggacttgactggctggcgaaattatacaggaaaaaccttaatggtattttagcagatgaggccggacttggaaaaacagtgcagataatcgccttcttcgcccacctggcttgcaacgagggaaattggggtccacacctcgtagtagtgaggtcatgcaatattctgaagtgggagctggagctcaagcggtggtgtccaggcctgaaaatcctgtcctacattggctcacatagggaactcaaggctaaaaggcaggaatgggcggagccaaactcctttcacgtctgtatcacctcctatactcaatttttccggggactcactgcattcaccagagtgaggtggaaatgtttggttattgacgagatgcagagggtcaagggcatgacagagaggcattgggaagctgtctttactctgcagtctcagcagaggctgctcctgatcgacagcccattgcacaatacttttctggaactgtggacgatggtgcacttcttggtccccggtatctctaggccttacttatcctcccccctgagggcacctagcgaggagtcacaggactactatcacaaggtcgtgattcgcctgcatcgggttacccagccctttattctgcgcagaacaaaacgcgatgttgaaaaacaactgaccaagaagtacgaacacgtgctgaagtgtagactaagcaaccgccagaaagccctgtacgaggacgttattctacagcccggtactcaggaagccctaaagagtggacattttgtgaatgtgttatccatcttggtgaggctgcagcgaatatgtaatcatccaggactggttgagccaagacacccagggtcatcttatgtcgccggtccactagaataccctagcgctagcctgatcctgaaggcccttgagagggacttttggaaagaggccgatctgtccatgtttgatctgattggactggagaataagataactcgccatgaggccgagctgctgagcaaaaagaagattccaagaaaactgatggaggaaatctccacgtccgcagcccctgcggctcggcctgctgctgcaaagctgaaagctagtcggctgttccaaccagtgcagtacggccaaaaaccagagggtaggacagtggcctttccatctacccatccaccacgcaccgctgcccctactaccgcctcagctgcgcctcagggacccctcagggggagacctccaatcgctacttttagtgctaaccccgaggccaaagcagcagcggcaccttttcaaacgagccaggccagcgcaagcgctccacgccatcagcctgcatcagcaagcagcaccgccgctagtccggctcatcctgcaaaactcagagctcaaactacagcacaagcaagcacccccggacagccacctccccagccacaagccccttcacatgcggcaggacagtcagctttacctcaacggctggtcctgccttcccaggcccaggccaggttgccgagcggcgaggtggtgaaaatcgcccagctggcctcgattactggcccacagagcagagtggctcagcctgagactcccgtcaccctacagtttcagggatccaagttcaccctgagccattcacagttgcggcagctcacagccggtcagcctcttcagctacaaggctcggtgctgcagatcgtgtctgcccctggacagccttacctgcgggctccgggtcctgtggtgatgcagaccgtgagtcaggctggcgctgttcacggagccctgggaagcaagcctcccgctggcggaccatcaccagccccactgactccacaggtcggtgtgccaggtagagtcgccgtcaacgctctggcggtgggcgagccaggcaccgcctccaagcccgcatccccaatcggcggaccgacgcaggaagaaaagacccgacttctcaaggaacgtcttgaccagatttatctcgtcaatgaaaggcgctgcagccaggccccagtctatggtagagacttgctgagaatatgtgccctcccctcacacggtcgcgtgcagtggcgtggtagtctggacggcaggcgaggtaaggaagccggaccggcacactcgtatacctctagcagcgaatctccctccgagcttatgctgaccttatgccgctgcggagaatcattgcaagacgtcatcgatcgcgtagccttcgtgattcctcctgtggttgccgcacccccttccctccgagtgccaagacctcctcctctgtatagtcaccgcatgaggatacttcgccagggactgagggagcatgccgcaccctactttcagcagctgcgtcagacaacagcccctagactgctacagttcccggagttacgcctggttcagttcgattccggaaagctggaggcactggctatattgctgcagaagctgaaatcagaaggaagaagggtgctgatcttgtctcagatgatcctcatgctggacatcctcgaaatgtttctgaattttcattatctaacctacgtccgcattgatgaaaacgccagctctgaacagaggcaggagctaatgaggagttttaacagggatagacggatattttgtgccattctgagtacccacagccgcaccaccggcatcaatctggtggaggcagatacggtggtgttctacgataacgacttgaacccggtaatggacgccaaggcccaggagtggtgtgatcggatcggccgttgtaaagacatccacatctacaggttggtttcagggaattctatcgaagagaagctgctgaaaaacggaaccaaagacctgatcagggaagtggccgcacagggcaatgattatagtatggctttcctgacacagcgtactattcaggagctttttgaggtgtattcccctatggatgatgctggctttccagtcaaggccgaggagttcgttgtccttagccaggagcccagtgtgaccgagacaatcgcccctaagatagcccgacctttcatcgaggccctgaaatccatcgaatatcttgaggaggacgcccagaaatccgcgcaggagggagtcctggggcctcacaccgatgctctctcttcagattcagagaatatgccgtgtgacgaggagcccagccaacttgaagagcttgccgattttatggagcagctgactccgatcgagaagtatgcattaaattacctggagctcttccacactagcattgagcaagagaaggaaaggaatagcgaggacgctgtcatgacagctgtacgggcttgggaattctggaatcttaaaaccctacaggagagggaggccaggctgaggctggagcaggaagaggcagaacttctaacatacacccgggaggatgcttactccatggagtatgtttatgaagacgtggatgggcagacagaggtgatgcccctgtggacccctcccacccctccccaggacgacagcgacatttatttggacagcgtaatgtgtctgatgtacgaagccacaccaatcccggaagccaagctgcctcctgtttacgtgagaaaggaacgcaagcgtcataaaaccgacccttcagcagcaggtcggaaaaaaaagcaacggcatggagaagctgtggtccccccaagatccctgttcgatcgcgctacgccagggttgctgaagatccggcgagaaggcaaggagcagaagaagaatattctactcaaacagcaagtgccgttcgctaaaccgctgccaacttttgccaagccaacggcagagcctggtcaggacaatccggaatggttgatcagcgaggattgggcgcttctacaagccgttaagcagcttctggagctacctttaaacctcactatcgtgtcccctgcccacacccctaactgggacctcgtctccgacgtggtgaatagctgctctcgtatctatcgatcgtctaagcagtgccgtaacagatacgagaatgtaattattcccagggaagaggggaagtctaaaaataacaggcctctacgtaccagccagatttatgctcaggatgagaacgcgacgcatacccagctgtacacttctcacttcgacctgatgaagatgaccgccggaaagcgatccccgcctatcaagcctcttctcggcatgaatcctttccagaagaacccaaagcacgcttccgtgcttgccgagtccggtatcaattatgataagcccctccccccaatacaagttgcatcccttagagctgagcgcatcgctaaggaaaagaaggccttggccgatcagcagaaagcccagcagccagcggtggcccagcctcccccacctcaaccccagccgccaccacccccacagcaaccacctcctccgctaccccagcctcaagcagcaggcagccagcccccagctggccctccggctgttcaaccgcagcctcagccacagccgcaaacccagccccagccagtccaggcccctgccaaggcacagcccgctattaccactggagggtcggcagctgtactggcgggaaccatcaaaacctctgtgacagggacttctatgcctactggagcagttagcggcaacgtgatagtaaacactattgccggagtgcccgcagcaaccttccagtcaatcaataagcggctcgcatcacccgtggcccctggcgctctcacaactccaggtggctccgcccctgcacaggtggtgcacacgcagccacctcctagggcagtgggatcaccggctactgcaacccccgatttggttagcatggccaccacgcaaggcgtgagagcagtgacgtcagtgacagccagcgccgtcgtgactaccaacctaaccccagtgcaaacgcctgcacgctcactagtgccccaggtgtctcaagccacgggggtgcaattgcctggaaaaaccatcactcctgcccactttcaactcctgcgccagcagcaacagcagcaacaacagcagcagcagcagcagcagcagcaacagcaacagcagcaacagcagcagcagcagcaacagcagactacaacaacttcccaagttcaggtaccacagatccagggtcaggcacagtcccccgctcagatcaaggccgtcggcaagctgactccagagcacctaattaagatgcaaaagcagaagctgcagatgcccccacaaccccctcctccacaggctcagtccgccccacctcagccaacagcccaggtgcaggtacagacgagccagcccccacagcagcagagcccccaactgacgacagtgacggcccctcgtcccggagccctcttgactggcactactgtcgccaacttgcaagtcgccagactgacccgggtcccgacctcacaactgcaggcacaggggcagatgcagacgcaggcaccccagccggctcaggtggccctcgctaaacctccagtcgttagcgtccccgctgctgttgtctcaagcccaggggtcacaaccctgcctatgaacgttgctggcatctcagtcgctattggccagccacagaaagccgcaggccagacggttgtcgcccagccagtccacatgcagcagctattgaaactgaaacagcaagcagttcaacagcagaaggccatccagccccaggccgctcagggtccagcagccgtccagcagaaaattactgctcagcagatcactacaccaggagcacaacagaaagtggcgtacgccgcacaacccgcactgaagacacaattcctgaccacacctatctctcaggcacaaaagctggccggtgctcaacaggtgcaaacccaaattcaggtcgcaaagctcccccaggtcgtgcagcagcagacacccgtagccagcattcagcaggttgcttccgctagtcagcaagcctctccccagactgttgctctgacacaggccacagctgcaggccagcaagtacagatgattcccgctgtgacggccaccgctcaggtggtacagcagaaactaatccagcagcaggtggtgacaaccgcttcagcaccattacagacccccggtgccccaaacccagcccaggtccccgcttcctccgattctccgagccagcagccgaaactgcaaatgagagttcctgccgtgagactgaagacgcctacaaaacctccttgccaatac

SEQ ID NO: 186575 - DNA, 2475 bp, Artificial Sequence
  derived and/or modified sequence
atgcaccatggtaccgggcctcagaacgtccaacaccaactccaacggtcccgggcttgtcccggttccgagggagaggagcagccagcacaccccaatcctcctccttctcccgctgctccttttgccccaagcgcaagtccatctgcgccacagagccctagctatcagatccagcaattaatgaaccggagccccgctactgggcagaacgtcaacattacgctccagtccgtgggaccagtggtgggcggaaaccagcagatcacccttgcccctctccctctcccttccccgacaagtccgggattccagtttagcgcacaacctcgtagattcgagcatggcagtcccagctacatccaagtgacctcccctctgtcacagcaggtccagacccagagcccgacccaaccaagtccaggacccggtcaggcactccagaatgttcgcgctggcgctcccggaccgggactcgggctgtgtagctcctctccaaccggtggttttgttgatgcctctgtcctggttcgccagatcagcctctccccatctagtgggggtcacttcgtgttccaggacggtagcggacttacacagattgcccaaggcgctcaggtgcagctacaacacccgggtacgccaatcacagtccgcgagagacgaccctctcagccccacacacaatctggcggtacaatccatcacttaggtcctcagagtcctgctgctgcagggggagctgggttgcagcccctggcctctccaagccacataactaccgctaacctccctccccagatctcttctatcatccagggccagctggtgcagcaacagcaggtcctgcaggggcctcccctcccccgaccactcggctttgagaggacacccggagttctgctccctggggctgggggtgcagcaggcttcggaatgactagcccccctccacccacctccccatctaggacagcagtgccaccaggtctctcctccctaccgctgacatctgtcggtaacacaggaatgaaaaaagtcccgaaaaagctggaagagataccgcctgccagccccgagatggcccagatgcgaaagcagtgccttgattaccactaccaagaaatgcaagcgctgaaagaggtgtttaaggagtatctgatcgaacttttctttctgcagcatttccagggaaatatgatggacttcctggcttttaagaagaaacattacgctcccttgcaggcctaccttaggcagaacgatttggatatcgaggaggaagaagaggaggaggaagaggaagaagagaaaagcgaggtaattaacgatgagcaggctctcgctggttctctggtcgccggtgccggtagtactgttgaaaccgacctgttcaagagacaacaggcaatgccctcgacggggatggccggagggatgccacctaccccccaggccgctcagctcgccggacaacgccagtcccagcaacaatacgatcccagtaccggccctccggtgcagaatgcagcctcccttcacacacccttgcctcagctgccagggagactgccaccagcaggagtaccgaccgccgcactcagctcagcactccagtttgcacaacaaccccaggttgtggaggcacagacccagctccagattcctgtaaagactcagcagcccaacgtccctatccccgcacctcctagcagtcagctgcccatccctccctcacaaccggctcagctggcccttcacgtcccaaccccaggtaaggtgcaagtgcaagccagccaactgtctagtctcccacagatggttgcaagcacccgtttgccagtggaccccgctcccccttgccccaggccactgccaacctcctccacgtcaagtctggcacctgtgtctggaagcgggcctggtccatcaccagccaggtccagcccagttaatcgccctagctcagcaaccaataaggcgctgagccccgtcacatccagaacccccggtgtagttgcaagtgcacccactaaacctcagagcccagctcagaatgcaacttcgtcccaagacagcagtcaagataccttaacggaacagataacactggagaaccaggtccaccagcgaatcgctgagttacgtaaggctgggctctggtcccagaggcgtctacctaagctgcaggaggcccctaggccgaagtctcattgggactacctgctggaggaaatgcagtggatggctactgacttcgcacaagaaagaaggtggaaggttgcggctgcgaaaaagctggtgcggactgtggtacgacatcatgaggagaagcagcttagggaagaacggggaaaaaaggaggagcaatctcgcttgcggaggatagccgcttcgaccgcccgagagatcgagtgtttctggagtaatattgagcaggttgtcgagatcaaactgcgagtggaactggaatag

SEQ ID NO: 186576 - DNA, 9371 bp, Artificial Sequence
  derived and/or modified sequence
atgcaccatggtaccggacctcagaatgtgcagcaccagctacaaaggtctagagcatgtcccggatccgagggcgaagagcaacctgcacatcccaaccccccaccctcgcccgcagccccttttgccccttccgcttccccatcagcccctcagtccccgtcttatcagatacaacaactgatgaataggtcccctgcgaccggtcaaaacgtgaatattacattgcagagcgtcggtccagtagtcggtggtaatcaacagatcaccttggccccacttcccctgccaagtcctactagccccggattccagttttcggctcagccacgacggttcgagcacgggagtcccagctacattcaggtgaccagtcccctgtcacagcaggtccagacgcaaagtcccactcagcctagtccaggcccaggacaggctcttcagaatgtccgggctggagcgcctgggcctggcctggggctctgtagttctagtcccaccggaggcttcgtggacgcctcggtgctcgtgcgacagatctcactatctccatctagtggaggccactttgtgtttcaggatggtagcggccttacccagatcgctcagggggcacaggtgcagctacagcaccccggtaccccaatcactgtcagagagcgtcgccctagtcagcctcacacccaatctggagggactatacaccacctcgggcctcagagccccgcagccgctgggggagccggtctccaaccattggctagccccagccacatcaccacggctaatctgccacctcaaatttccagcattatccagggacaactcgtgcaacagcaacaagtgctccagggtcctcccctgccacgaccactgggatttgaaagaaccccaggggtgctgcttcctggagccggtggagcagccggatttggcatgacaagcccaccccctccaacatccccatcacggacagccgttccgcctggattatcctccctcccccttacaagcgtggggaatactggcatgaagaaggtcccaaagaaactggaggaaatacctccagcctccccagagatggcccagatgcgaaagcaatgcctggattaccattatcaagagatgcaggccctcaaggaagttttcaaggagtatctcatagagctgttttttctgcagcatttccagggcaacatgatggatttcttagcttttaaaaaaaagcactacgctccccttcaagcatacttgaggcagaacgacctggacatagaggaagaggaggaggaagaggaggaagaagaggagaagagcgaggtgatcaacgacgaacagcaagcactagcagggagcctggtcgccggagccggttcaacagttgaaaccgacttgttcaagagacaacaggctatgccctcgactggaatggccgagcagtcgaagagacccaggctcgaagtgggccaccagggcgtggtgttccagcaccctggcgctgatgctggagtgcctctgcagcaacttatgccaacggctcagggaggaatgcctcctaccccacaagctgcccaactagccggtcagcgccaatcccaacaacaatacgacccctccactgggcctcccgtccagaacgcagcctctcttcataccccactcccccagctgcccggtagactccctcccgctggagtcccaacagccgcactgtcctcggcactgcagttcgcccaacagcctcaggtcgtggaggctcagacgcagctccagatccctgtcaaaacccagcaaccaaatgtccccatcccagctcctccctcatcccaactgcccatccccccttcccagccagcccaactggctctccatgtgccaactcctggcaaggtgcaagtgcaagcctctcagctgtcctcattgcctcaaatggtggcttcaactcggctgcccgtagatcctgccccaccttgcccacgtcccctccctacgtcttcaacaagctcactcgcccctgtgtctggctctggccctgggccatccccggcacggagctcccctgtgaacaggcccagttctgctacaaataaagctttgtcacctgtgacctccagaacccccggtgttgtggcctccgcaccaaccaagccccagtctcctgcccagaatgcaactagttcccaggactcctcccaggacacactgactgaacagattactcttgaaaaccaggtccatcagcgcattgctgaattgcggaaggcgggtttatggagccagcgcaggctgccaaaattacaggaggctccgcgaccaaaatcacactgggactatctgctcgaagaaatgcaatggatggcaacggatttcgcccaggagcgccgttggaaagtggccgcagctaagaagctggtgagaactgtcgttcgtcatcacgaggaaaaacagctgcgtgaggagagaggtaagaaggaggaacagtcgaggctgaggcgaattgccgctagtacagcgagggagatcgagtgtttctggagtaatattgagcaggtcgtggagatcaagctgcgcgttgagcttgaggagaagcgcaagaaggctttaaatctccaaaaggtttcccggaggggcaaggagctccgccctaaagggttcgatgcgttacaggaaagctctctggattccggaatgagtggcaggaagagaaaagcttccatttccctgacagacgacgaggtggacgacgaggaggagactatagaggaagaagaggctaacgagggcgtggtggaccatcagacagagctaagtaatctggcaaaagaagccgagctgcctcttctggacttaatgaagttgtacgaaggggctttccttccttctagccagtggccccgtcctaaaccagacggggaagatacatccggggaggaggacgccgatgattgtcctggggatcgggaaagtaggaaggatttagtcttgatagactccctgttcatcatggaccagtttaaggctgctgagagaatgaacatcgggaaaccaaacgccaaagatatcgcggatgtcacagccgttgccgaagctatcctgccgaaaggctccgcacgcgttacaacttccgtgaaattcaacgcaccatctttactgtacggagcgctgagggattatcagaagattggtctggactggctggccaagctgtacaggaagaacctgaacggaattctggccgacgaggctggattggggaagaccgttcaaatcatagcgttttttgcgcatcttgcatgtaacgaggggaattgggggcctcacctggttgtagttagatcttgcaatatactgaaatgggaattggagctgaaaagatggtgtcccggtttgaaaattctgagttacattggctcccatagggagctgaaagccaaacggcaggagtgggcagagcccaattctttccacgtgtgcattacgtcctatactcaatttttccggggtttgaccgctttcacgagagtgcgctggaaatgccttgtgatcgacgaaatgcagagggtgaaaggaatgacagaaagacactgggaagccgtgtttacactgcagtctcagcagagactgctgctcatcgattccccccttcataataccttcctggaattatggaccatggtccacttcttagtccctggtatatcccggccatatctgtctagcccattaagggctccaagcgaagaaagccaggattactatcacaaggtcgtcattcgcttacatcgagtgacccaacccttcatcctcagacgcactaaaagagacgtggaaaaacaactgaccaaaaaatatgaacatgtcttaaaatgcaggctctcaaaccgacagaaagctctgtatgaagatgtgatcctgcagcctggaacccaggaggccttgaaatccgggcattttgtgaacgttctcagcatcctggttcgcttgcagagaatctgcaatcaccctggtctggtggagccaaggcatcctgggagctcatatgtggccggtccactagagtacccgtccgcgtccctaatattgaaggccctggaacgggacttttggaaagaggccgaccttagtatgtttgacctgataggattggaaaataagatcactcgacatgaggcagaactcctgtctaaaaagaagatacctcgaaaactgatggaggagatctcaacatcagcagccccagcggctcgccctgctgccgcaaaactcaaagcatcgcgtctgtttcaaccagtgcaatacgggcagaaacctgaggggcgaacagtcgcctttcccagcacccaccccccaaggactgcagccccaacaacagctagcgccgcacctcaggggccattacgagggagacccccaatcgcaacgtttagcgccaatcccgaggctaaggcggctgccgctccgttccagacaagtcaggccagtgcatcagcacccagacatcagccagccagtgcaagctccactgcggcatcccccgctcatccagcaaagctaagagcacaaacaacggctcaagctagtaccccagggcagcctcctccgcagccgcaagccccaagccacgcggcaggtcagtctgcccttccacaaagactggtgttacccagccaggcccaagccagactcccatccggcgaagttgttaaaatcgcgcagctcgcttctattactggccctcaatcaagagtggcacagcctgagactcccgttacgcttcaattccagggatccaagtttactttgagccacagccaacttcgtcagctgacagctggtcagccactgcaactgcagggatccgttcttcagatcgtctcagcccctgggcagccatacctgcgcgcaccgggacctgtggtaatgcaaaccgtgagtcaggctggagccgttcatggggcactgggtagtaagcctcccgcaggagggcctagccccgctcccctcaccccacaggtgggtgtccctggacgggtcgctgtgaacgccctcgcggtcggggagccagggacagccagtaagcctgccagcccaataggcggtccgacccaggaagagaagaccagattgctgaaagagaggctagatcagatctatttggtgaacgagcgacggtgttcccaggcgccagtatacggacgggatctcctccggatctgcgcgctgccaagccacggtcgggttcagtggagaggatccctggatgggagaagaggcaaggaagcagggcctgcgcattcctataccagctcgtccgagtcgcctagcgaactcatgctgactctttgtaggtgcggggaaagtctgcaagacgtgatcgaccgggtcgcatttgtcattccccctgttgtggccgcacccccttcgcttagggttccccgtcctccacctctgtatagtcatcgcatgagaattcttagacaggggctgcgcgagcacgccgcaccttatttccaacagctccggcaaacgaccgctcctcgcctcctgcagtttcctgagctacggctggtgcagttcgactctggaaagttggaagcactggctatactcctgcagaaactaaaaagcgagggtagacgagtcctaatcctgtctcagatgatcctcatgctggatatcttggagatgtttctgaacttccactatctgacctatgtcaggattgatgagaatgcttccagcgagcagaggcaggaactgatgcgatcctttaatagagaccgcaggatcttttgtgcgattttgagcacacactcacggacgactgggattaacctcgtggaagccgatactgttgtgttctatgataacgatctgaatccagttatggatgccaaagcccaggagtggtgcgatcggattgggagatgcaaggacatccacatatatcggttagtctctggtaattcaatcgaggaaaaactgttgaagaacgggacaaaggatttgatcagagaagtagcagcccagggcaatgactattccatggcatttctgacgcagcggacaatccaagaattgttcgaggtgtactccccaatggacgacgccggttttccagttaaagccgaagagtttgtggtcctgtcacaggaaccaagcgttaccgaaactatcgccccaaagattgccaggccctttatcgaagcgctgaagagcattgaatacctcgaggaggacgcccaaaaatctgctcaagagggagtgcttggtccccatactgatgcccttagcagtgattctgagaacatgccttgcgacgaggagccgtcacagctggaggagctggcggacttcatggaacaactgacaccgatcgaaaagtatgccctgaactacttggagctcttccacactagcattgaacaagagaaagagcggaactccgaggacgctgtaatgaccgcagttagggcttgggaattttggaaccttaaaacactgcaggagagagaagcacgcctgaggctggagcaagaggaggcggagctgttaacgtacacaagagaggacgcttactccatggagtatgtgtacgaagatgtcgatggccagacagaggtaatgcctctctggacccctcccacacctccccaggatgactccgacatttatctggattccgtaatgtgcctcatgtatgaggcaacaccgatcccagaagcaaaattgccaccggtgtatgtgagaaaggagcggaaaagacataaaacggacccctccgcagctggacgtaagaaaaaacagcgtcatggggaggcggtagtgcctcccaggtcgctttttgaccgtgctacgcccggtcttctgaaaattaggcgagaaggtaaggagcagaaaaagaatatcctcctcaaacagcaggtgcctttcgcgaagcctctccctaccttcgccaaacccaccgccgagcctggccaagacaaccccgagtggctcatttcagaggactgggcactactgcaggctgtaaaacagctgttagaactgccgttgaacttaactattgtatctccagcgcacactcccaactgggatcttgttagtgatgttgtgaattcttgtagcaggatctacagaagttccaagcagtgtcgcaatagatatgaaaacgttatcatccctagggaggagggaaagagtaagaataatcggccactgcgtaccagtcagatctacgcacaggacgaaaatgcaacccacacacaattgtatactagccattttgacctcatgaagatgacagcaggcaaacgtagtccccctattaaaccactgctgggtatgaaccccttccagaagaatcctaaacacgcaagcgtactcgctgaatcaggtatcaactacgataaacccttaccacctatacaagtggcaagcctccgagctgaacgcattgcaaaggagaagaaggcattagctgaccagcagaaggctcagcaaccagctgttgctcaacccccaccgccacaaccgcaacctccccctccgcctcagcagcccccacccccactgccacagccccaggctgcgggaagccagcctccagcaggccctcccgctgtccaacctcagccacaaccccagcctcagacccagcctcagcccgtccaagccccagccaaagcccaacccgctatcacaacgggtggttctgctgcagtactcgctggcaccatcaagaccagtgtcaccggtacctctatgcccacaggagccgtttccggcaatgtgatcgtaaacactattgccggtgtccccgcagccacctttcagagcatcaacaaacggctggcaagccctgtggcgcctggtgcacttaccacacctggcggttccgctccagcccaagtcgtgcatacgcagccccctcccagggcagttggttctcctgctacagctacacccgacttagtgtcgatggccacgactcagggggttcgggcagtcaccagcgtcacagcttctgccgtggtcaccaccaacctcaccccggttcagacccctgcgcgttctctcgtccctcaggtgagtcaagcgaccggggttcagcttcctgggaaaacaatcacacccgcacacttccaactactcagacaacagcagcaacagcagcagcagcagcagcagcagcaacagcagcagcagcaacagcagcaacagcaacagcagcagcagcagcagacaactacaacatctcaggtgcaggtgccacaaattcaaggtcaagcccagtcaccagctcagattaaggccgtgggaaaattgactcctgaacatctgattaagatgcagaagcagaaactacagatgcccccacaacctccgcctccgcaggcacagtccgctcctccacaaccaacagcccaggtgcaggtccaaactagtcagccacctcagcagcagtctccgcagctgacgacagtcacggcaccaaggccgggagctctcctgaccggcaccacagtggcgaatttgcaggtcgcaaggctgacacgagtgcccacttctcagcttcaagcccagggacaaatgcagactcaggcccctcagcccgctcaggtggctttagccaaacctcccgtggtcagcgtgccggctgccgtagtcagtagccccggagttactactttgcccatgaacgtcgcaggcatatctgtggcgattggacaaccacagaaagcagcaggtcagaccgtggtagcccagcctgtccacatgcaacagctgctgaagctgaagcaacaagcagttcaacaacaaaaggccatacagccgcaggcggctcagggccctgccgcagtccagcagaaaatcacagctcagcaaatcactacacctggcgcacagcaaaaggtggcatacgccgctcagccagctcttaaaacccagtttttgaccaccccaatctctcaggcgcagaaacttgccggagcacagcaagtccagacacagattcaggttgccaaactgccccaagtagtgcagcagcagactcccgttgcttccattcagcaggttgcatccgcgtctcagcaggcaagcccccagacagttgctttaactcaggccaccgccgcaggccagcaggttcagatgatcccagctgtgacggccacagctcaggttgttcagcagaaactcatccagcaacaagtggttactaccgcttcagctccactccagacaccaggggctcctaaccccgctcaggttccggcatcatccgatagtcctagtcaacaaccgaaattgcagatgagggtccctgctgtgaggctgaaaacaccaaccaaaccaccttgtcagta

SEQ ID NO: 186577 - DNA, 9129 bp, Artificial Sequence
  derived and/or modified sequence
atgcaccacggcaccggcccccagaacgtgcagcaccagctgcagagaagcagagcctgccccggcagcgagggcgaggagcagcccgcccaccccaaccccccccccagccccgccgcccccttcgcccccagcgccagccccagcgccccccagagccccagctaccagatccagcagctgatgaacagaagccccgccaccggccagaacgtgaacatcaccctgcagagcgtgggccccgtggtgggcggcaaccagcagatcaccctggcccccctgcccctgcccagccccaccagccccggcttccagttcagcgcccagcccagaagattcgagcacggcagccccagctacatccaggtgaccagccccctgagccagcaggtgcagacccagagccccacccagcccagccccggccccggccaggccctgcagaacgtgagagccggcgcccccggccccggcctgggcctgtgcagcagcagccccaccggcggcttcgtggacgccagcgtgctggtgagacagatcagcctgagccccagcagcggcggccacttcgtgttccaggacggcagcggcctgacccagatcgcccagggcgcccaggtgcagctgcagcaccccggcacccccatcaccgtgagagagagaagacccagccagccccacacccagagcggcggcaccatccaccacctgggcccccagagccccgccgccgccggcggcgccggcctgcagcccctggccagccccagccacatcaccaccgccaacctgcccccccagatcagcagcatcatccagggccagctggtgcagcagcagcaggtgctgcagggcccccccctgcccagacccctgggcttcgagagaacccccggcgtgctgctgcccggcgccggcggcgccgccggcttcggcatgaccagcccccccccccccaccagccccagcagaaccgccgtgccccccggcctgagcagcctgcccctgaccagcgtgggcaacaccggcatgaagaaggtgcccaagaagctggaggagatcccccccgccagccccgagatggcccagatgagaaagcagtgcctggactaccactaccaggagatgcaggccctgaaggaggtgttcaaggagtacctgatcgagctgttcttcctgcagcacttccagggcaacatgatggacttcctggccttcaagaagaagcactacgcccccctgcaggcctacctgagacagaacgacctggacatcgaggaggaggaggaggaggaggaggaggaggaggagaagagcgaggtgatcaacgacgagcagcaggccctggccggcagcctggtggccggcgccggcagcaccgtggagaccgacctgttcaagagacagcaggccatgcccagcaccggcatggccgagcagagcaagagacccagactggaggtgggccaccagggcgtggtgttccagcaccccggcgccgacgccggcgtgcccctgcagcagctgatgcccaccgcccagggcggcatgccccccaccccccaggccgcccagctggccggccagagacagagccagcagcagtacgaccccagcaccggcccccccgtgcagaacgccgccagcctgcacacccccctgccccagctgcccggcagactgccccccgccggcgtgcccaccgccgccctgagcagcgccctgcagttcgcccagcagccccaggtggtggaggcccagacccagctgcagatccccgtgaagacccagcagcccaacgtgcccatccccgccccccccagcagccagctgcccatcccccccagccagcccgcccagctggccctgcacgtgcccacccccggcaaggtgcaggtgcaggccagccagctgagcagcctgccccagatggtggccagcaccagactgcccgtggaccccgcccccccctgccccagacccctgcccaccagcagcaccagcagcctggcccccgtgagcggcagcggccccggccccagccccgccagaagcagccccgtgaacagacccagcagcgccaccaacaaggccctgagccccgtgaccagcagaacccccggcgtggtggccagcgcccccaccaagccccagagccccgcccagaacgccaccagcagccaggacagcagccaggacaccctgaccgagcagatcaccctggagaaccaggtgcaccagagaatcgccgagctgagaaaggccggcctgtggagccagagaagactgcccaagctgcaggaggcccccagacccaagagccactgggactacctgctggaggagatgcagtggatggccaccgacttcgcccaggagagaagatggaaggtggccgccgccaagaagctggtgagaaccgtggtgagacaccacgaggagaagcagctgagagaggagagaggcaagaaggaggagcagagcagactgagaagaatcgccgccagcaccgccagagagatcgagtgcttctggagcaacatcgagcaggtggtggagatcaagctgagagtggagctggaggagaagagaaagaaggccctgaacctgcagaaggtgagcagaagaggcaaggagctgagacccaagggcttcgacgccctgcaggagagcagcctggacagcggcatgagcggcagaaagagaaaggccagcatcagcctgaccgacgacgaggtggacgacgaggaggagaccatcgaggaggaggaggccaacgagggcgtggtggaccaccagaccgagctgagcaacctggccaaggaggccgagctgcccctgctggacctgatgaagctgtacgagggcgccttcctgcccagcagccagtggcccagacccaagcccgacggcgaggacaccagcggcgaggaggacgccgacgactgccccggcgacagagagagcagaaaggacctggtgctgatcgacagcctgttcatcatggaccagttcaaggccgccgagagaatgaacatcggcaagcccaacgccaaggacatcgccgacgtgaccgccgtggccgaggccatcctgcccaagggcagcgccagagtgaccaccagcgtgaagttcaacgcccccagcctgctgtacggcgccctgagagactaccagaagatcggcctggactggctggccaagctgtacagaaagaacctgaacggcatcctggccgacgaggccggcctgggcaagaccgtgcagatcatcgccttcttcgcccacctggcctgcaacgagggcaactggggcccccacctggtggtggtgagaagctgcaacatcctgaagtgggagctggagctgaagagatggtgccccggcctgaagatcctgagctacatcggcagccacagagagctgaaggccaagagacaggagtgggccgagcccaacagcttccacgtgtgcatcaccagctacacccagttcttcagaggcctgaccgccttcaccagagtgagatggaagtgcctggtgatcgacgagatgcagagagtgaagggcatgaccgagagacactgggaggccgtgttcaccctgcagagccagcagagactgctgctgatcgacagccccctgcacaacaccttcctggagctgtggaccatggtgcacttcctggtgcccggcatcagcagaccctacctgagcagccccctgagagcccccagcgaggagagccaggactactaccacaaggtggtgatcagactgcacagagtgacccagcccttcatcctgagaagaaccaagagagacgtggagaagcagctgaccaagaagtacgagcacgtgctgaagtgcagactgagcaacagacagaaggccctgtacgaggacgtgatcctgcagcccggcacccaggaggccctgaagagcggccacttcgtgaacgtgctgagcatcctggtgagactgcagagaatctgcaaccaccccggcctggtggagcccagacaccccggcagcagctacgtggccggccccctggagtaccccagcgccagcctgatcctgaaggccctggagagagacttctggaaggaggccgacctgagcatgttcgacctgatcggcctggagaacaagatcaccagacacgaggccgagctgctgagcaagaagaagatccccagaaagctgatggaggagatcagcaccagcgccgcccccgccgccagacccgccgccgccaagctgaaggccagcagactgttccagcccgtgcagtacggccagaagcccgagggcagaaccgtggccttccccagcacccacccccccagaaccgccgcccccaccaccgccagcgccgccccccagggccccctgagaggcagaccccccatcgccaccttcagcgccaaccccgaggccaagggcggcgaggtggtgaagatcgcccagctggccagcatcaccggcccccagagcagagtggcccagcccgagacccccgtgaccctgcagttccagggcagcaagttcaccctgagccacagccagctgagacagctgaccgccggccagcccctgcagctgcagggcagcgtgctgcagatcgtgagcgcccccggccagccctacctgagagcccccggccccgtggtgatgcagaccgtgagccaggccggcgccgtgcacggcgccctgggcagcaagccccccgccggcggccccagccccgcccccctgaccccccaggtgggcgtgcccggcagagtggccgtgaacgccctggccgtgggcgagcccggcaccgccagcaagcccgccagccccatcggcggccccacccaggaggagaagaccagactgctgaaggagagactggaccagatctacctggtgaacgagagaagatgcagccaggcccccgtgtacggcagagacctgctgagaatctgcgccctgcccagccacggcagagtgcagtggagaggcagcctggacggcagaagaggcaaggaggccggccccgcccacagctacaccagcagcagcgagagccccagcgagctgatgctgaccctgtgcagatgcggcgagagcctgcaggacgtgatcgacagagtggccttcgtgatcccccccgtggtggccgccccccccagcctgagagtgcccagacccccccccctgtacagccacagaatgagaatcctgagacagggcctgagagagcacgccgccccctacttccagcagctgagacagaccaccgcccccagactgctgcagttccccgagctgagactggtgcagttcgacagcggcaagctggaggccctggccatcctgctgcagaagctgaagagcgagggcagaagagtgctgatcctgagccagatgatcctgatgctggacatcctggagatgttcctgaacttccactacctgacctacgtgagaatcgacgagaacgccagcagcgagcagagacaggagctgatgagaagcttcaacagagacagaagaatcttctgcgccatcctgagcacccacagcagaaccaccggcatcaacctggtggaggccgacaccgtggtgttctacgacaacgacctgaaccccgtgatggacgccaaggcccaggagtggtgcgacagaatcggcagatgcaaggacatccacatctacagactggtgagcggcaacagcatcgaggagaagctgctgaagaacggcaccaaggacctgatcagagaggtggccgcccagggcaacgactacagcatggccttcctgacccagagaaccatccaggagctgttcgaggtgtacagccccatggacgacgccggcttccccgtgaaggccgaggagttcgtggtgctgagccaggagcccagcgtgaccgagaccatcgcccccaagatcgccagacccttcatcgaggccctgaagagcatcgagtacctggaggaggacgcccagaagagcgcccaggagggcgtgctgggcccccacaccgacgccctgagcagcgacagcgagaacatgccctgcgacgaggagcccagccagctggaggagctggccgacttcatggagcagctgacccccatcgagaagtacgccctgaactacctggagctgttccacaccagcatcgagcaggagaaggagagaaacagcgaggacgccgtgatgaccgccgtgagagcctgggagttctggaacctgaagaccctgcaggagagagaggccagactgagactggagcaggaggaggccgagctgctgacctacaccagagaggacgcctacagcatggagtacgtgtacgaggacgtggacggccagaccgaggtgatgcccctgtggaccccccccacccccccccaggacgacagcgacatctacctggacagcgtgatgtgcctgatgtacgaggccacccccatccccgaggccaagctgccccccgtgtacgtgagaaaggagagaaagagacacaagaccgaccccagcgccgccggcagaaagaagaagcagagacacggcgaggccgtggtgccccccagaagcctgttcgacagagccacccccggcctgctgaagatcagaagagagggcaaggagcagaagaagaacatcctgctgaagcagcaggtgcccttcgccaagcccctgcccaccttcgccaagcccaccgccgagcccggccaggacaaccccgagtggctgatcagcgaggactgggccctgctgcaggccgtgaagcagctgctggagctgcccctgaacctgaccatcgtgagccccgcccacacccccaactgggacctggtgagcgacgtggtgaacagctgcagcagaatctacagaagcagcaagcagtgcagaaacagatacgagaacgtgatcatccccagagaggagggcaagagcaagaacaacagacccctgagaaccagccagatctacgcccaggacgagaacgccacccacacccagctgtacaccagccacttcgacctgatgaagatgaccgccggcaagagaagcccccccatcaagcccctgctgggcatgaaccccttccagaagaaccccaagcacgccagcgtgctggccgagagcggcatcaactacgacaagcccctgccccccatccaggtggccagcctgagagccgagagaatcgccaaggagaagaaggccctggccgaccagcagaaggcccagcagcccgccgtggcccagcccccccccccccagccccagccccccccccccccccagcagccccccccccccctgccccagccccaggccgccggcagccagccccccgccggcccccccgccgtgcagccccagccccagccccagccccagacccagccccagcccgtgcaggcccccgccaaggcccagcccgccatcaccaccggcggcagcgccgccgtgctggccggcaccatcaagaccagcgtgaccggcaccagcatgcccaccggcgccgtgagcggcaacgtgatcgtgaacaccatcgccggcgtgcccgccgccaccttccagagcatcaacaagagactggccagccccgtggcccccggcgccctgaccacccccggcggcagcgcccccgcccaggtggtgcacacccagcccccccccagagccgtgggcagccccgccaccgccacccccgacctggtgagcatggccaccacccagggcgtgagagccgtgaccagcgtgaccgccagcgccgtggtgaccaccaacctgacccccgtgcagacccccgccagaagcctggtgccccaggtgagccaggccaccggcgtgcagctgcccggcaagaccatcacccccgcccacttccagctgctgagacagcagcagcagcagcagcagcagcagcagcagcagcagcagcagcagcagcagcagcagcagcagcagcagcagcagcagcagcagaccaccaccaccagccaggtgcaggtgccccagatccagggccaggcccagagccccgcccagatcaaggccgtgggcaagctgacccccgagcacctgatcaagatgcagaagcagaagctgcagatgcccccccagcccccccccccccaggcccagagcgcccccccccagcccaccgcccaggtgcaggtgcagaccagccagcccccccagcagcagagcccccagctgaccaccgtgaccgcccccagacccggcgccctgctgaccggcaccaccgtggccaacctgcaggtggccagactgaccagagtgcccaccagccagctgcaggcccagggccagatgcagacccaggccccccagcccgcccaggtggccctggccaagccccccgtggtgagcgtgcccgccgccgtggtgagcagccccggcgtgaccaccctgcccatgaacgtggccggcatcagcgtggccatcggccagccccagaaggccgccggccagaccgtggtggcccagcccgtgcacatgcagcagctgctgaagctgaagcagcaggccgtgcagcagcagaaggccatccagccccaggccgcccagggccccgccgccgtgcagcagaagatcaccgcccagcagatcaccacccccggcgcccagcagaaggtggcctacgccgcccagcccgccctgaagacccagttcctgaccacccccatcagccaggcccagaagctggccggcgcccagcaggtgcagacccagatccaggtggccaagctgccccaggtggtgcagcagcagacccccgtggccagcatccagcaggtggccagcgccagccagcaggccagcccccagaccgtggccctgacccaggccaccgccgccggccagcaggtgcagatgatccccgccgtgaccgccaccgcccaggtggtgcagcagaagctgatccagcagcaggtggtgaccaccgccagcgcccccctgcagacccccggcgcccccaaccccgcccaggtgcccgccagcagcgacagccccagccagcagcccaagctgcagatgagagtgcccgccgtgagactgaagacccccaccaagcccccctgccagtag

SEQ ID NO: 186578 - DNA, 9261 bp, Artificial Sequence
  derived and/or modified sequence
atgcaccacggcaccggcccccagaacgtgcagcaccagctgcagagaagcagagcctgccccggcagcgagggcgaggagcagcccgcccaccccaaccccccccccagccccgccgcccccttcgcccccagcgccagccccagcgccccccagagccccagctaccagatccagcagctgatgaacagaagccccgccaccggccagaacgtgaacatcaccctgcagagcgtgggccccgtggtgggcggcaaccagcagatcaccctggcccccctgcccctgcccagccccaccagccccggcttccagttcagcgcccagcccagaagattcgagcacggcagccccagctacatccaggtgaccagccccctgagccagcaggtgcagacccagagccccacccagcccagccccggccccggccaggccctgcagaacgtgagagccggcgcccccggccccggcctgggcctgtgcagcagcagccccaccggcggcttcgtggacgccagcgtgctggtgagacagatcagcctgagccccagcagcggcggccacttcgtgttccaggacggcagcggcctgacccagatcgcccagggcgcccaggtgcagctgcagcaccccggcacccccatcaccgtgagagagagaagacccagccagccccacacccagagcggcggcaccatccaccacctgggcccccagagccccgccgccgccggcggcgccggcctgcagcccctggccagccccagccacatcaccaccgccaacctgcccccccagatcagcagcatcatccagggccagctggtgcagcagcagcaggtgctgcagggcccccccctgcccagacccctgggcttcgagagaacccccggcgtgctgctgcccggcgccggcggcgccgccggcttcggcatgaccagcccccccccccccaccagccccagcagaaccgccgtgccccccggcctgagcagcctgcccctgaccagcgtgggcaacaccggcatgaagaaggtgcccaagaagctggaggagatcccccccgccagccccgagatggcccagatgagaaagcagtgcctggactaccactaccaggagatgcaggccctgaaggaggtgttcaaggagtacctgatcgagctgttcttcctgcagcacttccagggcaacatgatggacttcctggccttcaagaagaagcactacgcccccctgcaggcctacctgagacagaacgacctggacatcgaggaggaggaggaggaggaggaggaggaggaggagaagagcgaggtgatcaacgacgagcaggccctggccggcagcctggtggccggcgccggcagcaccgtggagaccgacctgttcaagagacagcaggccatgcccagcaccggcatggccggcggcatgccccccaccccccaggccgcccagctggccggccagagacagagccagcagcagtacgaccccagcaccggcccccccgtgcagaacgccgccagcctgcacacccccctgccccagctgcccggcagactgccccccgccggcgtgcccaccgccgccctgagcagcgccctgcagttcgcccagcagccccaggtggtggaggcccagacccagctgcagatccccgtgaagacccagcagcccaacgtgcccatccccgccccccccagcagccagctgcccatcccccccagccagcccgcccagctggccctgcacgtgcccacccccggcaaggtgcaggtgcaggccagccagctgagcagcctgccccagatggtggccagcaccagactgcccgtggaccccgcccccccctgccccagacccctgcccaccagcagcaccagcagcctggcccccgtgagcggcagcggccccggccccagccccgccagaagcagccccgtgaacagacccagcagcgccaccaacaaggccctgagccccgtgaccagcagaacccccggcgtggtggccagcgcccccaccaagccccagagccccgcccagaacgccaccagcagccaggacagcagccaggacaccctgaccgagcagatcaccctggagaaccaggtgcaccagagaatcgccgagctgagaaaggccggcctgtggagccagagaagactgcccaagctgcaggaggcccccagacccaagagccactgggactacctgctggaggagatgcagtggatggccaccgacttcgcccaggagagaagatggaaggtggccgccgccaagaagctggtgagaaccgtggtgagacaccacgaggagaagcagctgagagaggagagaggcaagaaggaggagcagagcagactgagaagaatcgccgccagcaccgccagagagatcgagtgcttctggagcaacatcgagcaggtggtggagatcaagctgagagtggagctggaggagaagagaaagaaggccctgaacctgcagaaggtgagcagaagaggcaaggagctgagacccaagggcttcgacgccctgcaggagagcagcctggacagcggcatgagcggcagaaagagaaaggccagcatcagcctgaccgacgacgaggtggacgacgaggaggagaccatcgaggaggaggaggccaacgagggcgtggtggaccaccagaccgagctgagcaacctggccaaggaggccgagctgcccctgctggacctgatgaagctgtacgagggcgccttcctgcccagcagccagtggcccagacccaagcccgacggcgaggacaccagcggcgaggaggacgccgacgactgccccggcgacagagagagcagaaaggacctggtgctgatcgacagcctgttcatcatggaccagttcaaggccgccgagagaatgaacatcggcaagcccaacgccaaggacatcgccgacgtgaccgccgtggccgaggccatcctgcccaagggcagcgccagagtgaccaccagcgtgaagttcaacgcccccagcctgctgtacggcgccctgagagactaccagaagatcggcctggactggctggccaagctgtacagaaagaacctgaacggcatcctggccgacgaggccggcctgggcaagaccgtgcagatcatcgccttcttcgcccacctggcctgcaacgagggcaactggggcccccacctggtggtggtgagaagctgcaacatcctgaagtgggagctggagctgaagagatggtgccccggcctgaagatcctgagctacatcggcagccacagagagctgaaggccaagagacaggagtgggccgagcccaacagcttccacgtgtgcatcaccagctacacccagttcttcagaggcctgaccgccttcaccagagtgagatggaagtgcctggtgatcgacgagatgcagagagtgaagggcatgaccgagagacactgggaggccgtgttcaccctgcagagccagcagagactgctgctgatcgacagccccctgcacaacaccttcctggagctgtggaccatggtgcacttcctggtgcccggcatcagcagaccctacctgagcagccccctgagagcccccagcgaggagagccaggactactaccacaaggtggtgatcagactgcacagagtgacccagcccttcatcctgagaagaaccaagagagacgtggagaagcagctgaccaagaagtacgagcacgtgctgaagtgcagactgagcaacagacagaaggccctgtacgaggacgtgatcctgcagcccggcacccaggaggccctgaagagcggccacttcgtgaacgtgctgagcatcctggtgagactgcagagaatctgcaaccaccccggcctggtggagcccagacaccccggcagcagctacgtggccggccccctggagtaccccagcgccagcctgatcctgaaggccctggagagagacttctggaaggaggccgacctgagcatgttcgacctgatcggcctggagaacaagatcaccagacacgaggccgagctgctgagcaagaagaagatccccagaaagctgatggaggagatcagcaccagcgccgcccccgccgccagacccgccgccgccaagctgaaggccagcagactgttccagcccgtgcagtacggccagaagcccgagggcagaaccgtggccttccccagcacccacccccccagaaccgccgcccccaccaccgccagcgccgccccccagggccccctgagaggcagaccccccatcgccaccttcagcgccaaccccgaggccaaggccgccgccgcccccttccagaccagccaggccagcgccagcgcccccagacaccagcccgccagcgccagcagcaccgccgccagccccgcccaccccgccaagctgagagcccagaccaccgcccaggccagcacccccggccagccccccccccagccccaggcccccagccacgccgccggccagagcgccctgccccagagactggtgctgcccagccaggcccaggccagactgcccagcggcgaggtggtgaagatcgcccagctggccagcatcaccggcccccagagcagagtggcccagcccgagacccccgtgaccctgcagttccagggcagcaagttcaccctgagccacagccagctgagacagctgaccgccggccagcccctgcagctgcagggcagcgtgctgcagatcgtgagcgcccccggccagccctacctgagagcccccggccccgtggtgatgcagaccgtgagccaggccggcgccgtgcacggcgccctgggcagcaagccccccgccggcggccccagccccgcccccctgaccccccaggtgggcgtgcccggcagagtggccgtgaacgccctggccgtgggcgagcccggcaccgccagcaagcccgccagccccatcggcggccccacccaggaggagaagaccagactgctgaaggagagactggaccagatctacctggtgaacgagagaagatgcagccaggcccccgtgtacggcagagacctgctgagaatctgcgccctgcccagccacggcagagtgcagtggagaggcagcctggacggcagaagaggcaaggaggccggccccgcccacagctacaccagcagcagcgagagccccagcgagctgatgctgaccctgtgcagatgcggcgagagcctgcaggacgtgatcgacagagtggccttcgtgatcccccccgtggtggccgccccccccagcctgagagtgcccagacccccccccctgtacagccacagaatgagaatcctgagacagggcctgagagagcacgccgccccctacttccagcagctgagacagaccaccgcccccagactgctgcagttccccgagctgagactggtgcagttcgacagcggcaagctggaggccctggccatcctgctgcagaagctgaagagcgagggcagaagagtgctgatcctgagccagatgatcctgatgctggacatcctggagatgttcctgaacttccactacctgacctacgtgagaatcgacgagaacgccagcagcgagcagagacaggagctgatgagaagcttcaacagagacagaagaatcttctgcgccatcctgagcacccacagcagaaccaccggcatcaacctggtggaggccgacaccgtggtgttctacgacaacgacctgaaccccgtgatggacgccaaggcccaggagtggtgcgacagaatcggcagatgcaaggacatccacatctacagactggtgagcggcaacagcatcgaggagaagctgctgaagaacggcaccaaggacctgatcagagaggtggccgcccagggcaacgactacagcatggccttcctgacccagagaaccatccaggagctgttcgaggtgtacagccccatggacgacgccggcttccccgtgaaggccgaggagttcgtggtgctgagccaggagcccagcgtgaccgagaccatcgcccccaagatcgccagacccttcatcgaggccctgaagagcatcgagtacctggaggaggacgcccagaagagcgcccaggagggcgtgctgggcccccacaccgacgccctgagcagcgacagcgagaacatgccctgcgacgaggagcccagccagctggaggagctggccgacttcatggagcagctgacccccatcgagaagtacgccctgaactacctggagctgttccacaccagcatcgagcaggagaaggagagaaacagcgaggacgccgtgatgaccgccgtgagagcctgggagttctggaacctgaagaccctgcaggagagagaggccagactgagactggagcaggaggaggccgagctgctgacctacaccagagaggacgcctacagcatggagtacgtgtacgaggacgtggacggccagaccgaggtgatgcccctgtggaccccccccacccccccccaggacgacagcgacatctacctggacagcgtgatgtgcctgatgtacgaggccacccccatccccgaggccaagctgccccccgtgtacgtgagaaaggagagaaagagacacaagaccgaccccagcgccgccggcagaaagaagaagcagagacacggcgaggccgtggtgccccccagaagcctgttcgacagagccacccccggcctgctgaagatcagaagagagggcaaggagcagaagaagaacatcctgctgaagcagcaggtgcccttcgccaagcccctgcccaccttcgccaagcccaccgccgagcccggccaggacaaccccgagtggctgatcagcgaggactgggccctgctgcaggccgtgaagcagctgctggagctgcccctgaacctgaccatcgtgagccccgcccacacccccaactgggacctggtgagcgacgtggtgaacagctgcagcagaatctacagaagcagcaagcagtgcagaaacagatacgagaacgtgatcatccccagagaggagggcaagagcaagaacaacagacccctgagaaccagccagatctacgcccaggacgagaacgccacccacacccagctgtacaccagccacttcgacctgatgaagatgaccgccggcaagagaagcccccccatcaagcccctgctgggcatgaaccccttccagaagaaccccaagcacgccagcgtgctggccgagagcggcatcaactacgacaagcccctgccccccatccaggtggccagcctgagagccgagagaatcgccaaggagaagaaggccctggccgaccagcagaaggcccagcagcccgccgtggcccagcccccccccccccagccccagccccccccccccccccagcagccccccccccccctgccccagccccaggccgccggcagccagccccccgccggcccccccgccgtgcagccccagccccagccccagccccagacccagccccagcccgtgcaggcccccgccaaggcccagcccgccatcaccaccggcggcagcgccgccgtgctggccggcaccatcaagaccagcgtgaccggcaccagcatgcccaccggcgccgtgagcggcaacgtgatcgtgaacaccatcgccggcgtgcccgccgccaccttccagagcatcaacaagagactggccagccccgtggcccccggcgccctgaccacccccggcggcagcgcccccgcccaggtggtgcacacccagcccccccccagagccgtgggcagccccgccaccgccacccccgacctggtgagcatggccaccacccagggcgtgagagccgtgaccagcgtgaccgccagcgccgtggtgaccaccaacctgacccccgtgcagacccccgccagaagcctggtgccccaggtgagccaggccaccggcgtgcagctgcccggcaagaccatcacccccgcccacttccagctgctgagacagcagcagcagcagcagcagcagcagcagcagcagcagcagcagcagcagcagcagcagcagcagcagcagcagcagcagcagcagaccaccaccaccagccaggtgcaggtgccccagatccagggccaggcccagagccccgcccagatcaaggccgtgggcaagctgacccccgagcacctgatcaagatgcagaagcagaagctgcagatgcccccccagcccccccccccccaggcccagagcgcccccccccagcccaccgcccaggtgcaggtgcagaccagccagcccccccagcagcagagcccccagctgaccaccgtgaccgcccccagacccggcgccctgctgaccggcaccaccgtggccaacctgcaggtggccagactgaccagagtgcccaccagccagctgcaggcccagggccagatgcagacccaggccccccagcccgcccaggtggccctggccaagccccccgtggtgagcgtgcccgccgccgtggtgagcagccccggcgtgaccaccctgcccatgaacgtggccggcatcagcgtggccatcggccagccccagaaggccgccggccagaccgtggtggcccagcccgtgcacatgcagcagctgctgaagctgaagcagcaggccgtgcagcagcagaaggccatccagccccaggccgcccagggccccgccgccgtgcagcagaagatcaccgcccagcagatcaccacccccggcgcccagcagaaggtggcctacgccgcccagcccgccctgaagacccagttcctgaccacccccatcagccaggcccagaagctggccggcgcccagcaggtgcagacccagatccaggtggccaagctgccccaggtggtgcagcagcagacccccgtggccagcatccagcaggtggccagcgccagccagcaggccagcccccagaccgtggccctgacccaggccaccgccgccggccagcaggtgcagatgatccccgccgtgaccgccaccgcccaggtggtgcagcagaagctgatccagcagcaggtggtgaccaccgccagcgcccccctgcagacccccggcgcccccaaccccgcccaggtgcccgccagcagcgacagccccagccagcagcccaagctgcagatgagagtgcccgccgtgagactgaagacccccaccaagcccccctgccagtag

SEQ ID NO: 186579 - DNA, 9480 bp, Artificial Sequence
  derived and/or modified sequence
atgcaccacggcaccggcccccagaacgtgcagcaccagctgcagagaagcagagcctgccccggcagcgagggcgaggagcagcccgcccaccccaaccccccccccagccccgccgcccccttcgcccccagcgccagccccagcgccccccagagccccagctaccagatccagcagctgatgaacagaagccccgccaccggccagaacgtgaacatcaccctgcagagcgtgggccccgtggtgggcggcaaccagcagatcaccctggcccccctgcccctgcccagccccaccagccccggcttccagttcagcgcccagcccagaagattcgagcacggcagccccagctacatccaggtgaccagccccctgagccagcaggtgcagacccagagccccacccagcccagccccggccccggccaggccctgcagaacgtgagagccggcgcccccggccccggcctgggcctgtgcagcagcagccccaccggcggcttcgtggacgccagcgtgctggtgagacagatcagcctgagccccagcagcggcggccacttcgtgttccaggacggcagcggcctgacccagatcgcccagggcgcccaggtgcagctgcagcaccccggcacccccatcaccgtgagagagagaagacccagccagccccacacccagagcggcggcaccatccaccacctgggcccccagagccccgccgccgccggcggcgccggcctgcagcccctggccagccccagccacatcaccaccgccaacctgcccccccagatcagcagcatcatccagggccagctggtgcagcagcagcaggtgctgcagggcccccccctgcccagacccctgggcttcgagagaacccccggcgtgctgctgcccggcgccggcggcgccgccggcttcggcatgaccagcccccccccccccaccagccccagcagaaccgccgtgccccccggcctgagcagcctgcccctgaccagcgtgggcaacaccggcatgaagaaggtgcccaagaagctggaggagatcccccccgccagccccgagatggcccagatgagaaagcagtgcctggactaccactaccaggagatgcaggccctgaaggaggtgttcaaggagtacctgatcgagctgttcttcctgcagcacttccagggcaacatgatggacttcctggccttcaagaagaagcactacgcccccctgcaggcctacctgagacagaacgacctggacatcgaggaggaggaggaggaggaggaggaggaggaggagaagagcgaggtgatcaacgacgaggtgaaggtggtgaccggcaaggacggccagaccggcacccccgtggccatcgccacccagctgccccccaaggtgagcgccgccttcagcagccagcagcagcccttccagcaggccctggccggcagcctggtggccggcgccggcagcaccgtggagaccgacctgttcaagagacagcaggccatgcccagcaccggcatggccgagcagagcaagagacccagactggaggtgggccaccagggcgtggtgttccagcaccccggcgccgacgccggcgtgcccctgcagcagctgatgcccaccgcccagggcggcatgccccccaccccccaggccgcccagctggccggccagagacagagccagcagcagtacgaccccagcaccggcccccccgtgcagaacgccgccagcctgcacacccccctgccccagctgcccggcagactgccccccgccggcgtgcccaccgccgccctgagcagcgccctgcagttcgcccagcagccccaggtggtggaggcccagacccagctgcagatccccgtgaagacccagcagcccaacgtgcccatccccgccccccccagcagccagctgcccatcccccccagccagcccgcccagctggccctgcacgtgcccacccccggcaaggtgcaggtgcaggccagccagctgagcagcctgccccagatggtggccagcaccagactgcccgtggaccccgcccccccctgccccagacccctgcccaccagcagcaccagcagcctggcccccgtgagcggcagcggccccggccccagccccgccagaagcagccccgtgaacagacccagcagcgccaccaacaaggccctgagccccgtgaccagcagaacccccggcgtggtggccagcgcccccaccaagccccagagccccgcccagaacgccaccagcagccaggacagcagccaggacaccctgaccgagcagatcaccctggagaaccaggtgcaccagagaatcgccgagctgagaaaggccggcctgtggagccagagaagactgcccaagctgcaggaggcccccagacccaagagccactgggactacctgctggaggagatgcagtggatggccaccgacttcgcccaggagagaagatggaaggtggccgccgccaagaagctggtgagaaccgtggtgagacaccacgaggagaagcagctgagagaggagagaggcaagaaggaggagcagagcagactgagaagaatcgccgccagcaccgccagagagatcgagtgcttctggagcaacatcgagcaggtggtggagatcaagctgagagtggagctggaggagaagagaaagaaggccctgaacctgcagaaggtgagcagaagaggcaaggagctgagacccaagggcttcgacgccctgcaggagagcagcctggacagcggcatgagcggcagaaagagaaaggccagcatcagcctgaccgacgacgaggtggacgacgaggaggagaccatcgaggaggaggaggccaacgagggcgtggtggaccaccagaccgagctgagcaacctggccaaggaggccgagctgcccctgctggacctgatgaagctgtacgagggcgccttcctgcccagcagccagtggcccagacccaagcccgacggcgaggacaccagcggcgaggaggacgccgacgactgccccggcgacagagagagcagaaaggacctggtgctgatcgacagcctgttcatcatggaccagttcaaggccgccgagagaatgaacatcggcaagcccaacgccaaggacatcgccgacgtgaccgccgtggccgaggccatcctgcccaagggcagcgccagagtgaccaccagcgtgaagttcaacgcccccagcctgctgtacggcgccctgagagactaccagaagatcggcctggactggctggccaagctgtacagaaagaacctgaacggcatcctggccgacgaggccggcctgggcaagaccgtgcagatcatcgccttcttcgcccacctggcctgcaacgagggcaactggggcccccacctggtggtggtgagaagctgcaacatcctgaagtgggagctggagctgaagagatggtgccccggcctgaagatcctgagctacatcggcagccacagagagctgaaggccaagagacaggagtgggccgagcccaacagcttccacgtgtgcatcaccagctacacccagttcttcagaggcctgaccgccttcaccagagtgagatggaagtgcctggtgatcgacgagatgcagagagtgaagggcatgaccgagagacactgggaggccgtgttcaccctgcagagccagcagagactgctgctgatcgacagccccctgcacaacaccttcctggagctgtggaccatggtgcacttcctggtgcccggcatcagcagaccctacctgagcagccccctgagagcccccagcgaggagagccaggactactaccacaaggtggtgatcagactgcacagagtgacccagcccttcatcctgagaagaaccaagagagacgtggagaagcagctgaccaagaagtacgagcacgtgctgaagtgcagactgagcaacagacagaaggccctgtacgaggacgtgatcctgcagcccggcacccaggaggccctgaagagcggccacttcgtgaacgtgctgagcatcctggtgagactgcagagaatctgcaaccaccccggcctggtggagcccagacaccccggcagcagctacgtggccggccccctggagtaccccagcgccagcctgatcctgaaggccctggagagagacttctggaaggaggccgacctgagcatgttcgacctgatcggcctggagaacaagatcaccagacacgaggccgagctgctgagcaagaagaagatccccagaaagctgatggaggagatcagcaccagcgccgcccccgccgccagacccgccgccgccaagctgaaggccagcagactgttccagcccgtgcagtacggccagaagcccgagggcagaaccgtggccttccccagcacccacccccccagaaccgccgcccccaccaccgccagcgccgccccccagggccccctgagaggcagaccccccatcgccaccttcagcgccaaccccgaggccaaggccgccgccgcccccttccagaccagccaggccagcgccagcgcccccagacaccagcccgccagcgccagcagcaccgccgccagccccgcccaccccgccaagctgagagcccagaccaccgcccaggccagcacccccggccagccccccccccagccccaggcccccagccacgccgccggccagagcgccctgccccagagactggtgctgcccagccaggcccaggccagactgcccagcggcgaggtggtgaagatcgcccagctggccagcatcaccggcccccagagcagagtggcccagcccgagacccccgtgaccctgcagttccagggcagcaagttcaccctgagccacagccagctgagacagctgaccgccggccagcccctgcagctgcagggcagcgtgctgcagatcgtgagcgcccccggccagccctacctgagagcccccggccccgtggtgatgcagaccgtgagccaggccggcgccgtgcacggcgccctgggcagcaagccccccgccggcggccccagccccgcccccctgaccccccaggtgggcgtgcccggcagagtggccgtgaacgccctggccgtgggcgagcccggcaccgccagcaagcccgccagccccatcggcggccccacccaggaggagaagaccagactgctgaaggagagactggaccagatctacctggtgaacgagagaagatgcagccaggcccccgtgtacggcagagacctgctgagaatctgcgccctgcccagccacggcagagtgcagtggagaggcagcctggacggcagaagaggcaaggaggccggccccgcccacagctacaccagcagcagcgagagccccagcgagctgatgctgaccctgtgcagatgcggcgagagcctgcaggacgtgatcgacagagtggccttcgtgatcccccccgtggtggccgccccccccagcctgagagtgcccagacccccccccctgtacagccacagaatgagaatcctgagacagggcctgagagagcacgccgccccctacttccagcagctgagacagaccaccgcccccagactgctgcagttccccgagctgagactggtgcagttcgacagcggcaagctggaggccctggccatcctgctgcagaagctgaagagcgagggcagaagagtgctgatcctgagccagatgatcctgatgctggacatcctggagatgttcctgaacttccactacctgacctacgtgagaatcgacgagaacgccagcagcgagcagagacaggagctgatgagaagcttcaacagagacagaagaatcttctgcgccatcctgagcacccacagcagaaccaccggcatcaacctggtggaggccgacaccgtggtgttctacgacaacgacctgaaccccgtgatggacgccaaggcccaggagtggtgcgacagaatcggcagatgcaaggacatccacatctacagactggtgagcggcaacagcatcgaggagaagctgctgaagaacggcaccaaggacctgatcagagaggtggccgcccagggcaacgactacagcatggccttcctgacccagagaaccatccaggagctgttcgaggtgtacagccccatggacgacgccggcttccccgtgaaggccgaggagttcgtggtgctgagccaggagcccagcgtgaccgagaccatcgcccccaagatcgccagacccttcatcgaggccctgaagagcatcgagtacctggaggaggacgcccagaagagcgcccaggagggcgtgctgggcccccacaccgacgccctgagcagcgacagcgagaacatgccctgcgacgaggagcccagccagctggaggagctggccgacttcatggagcagctgacccccatcgagaagtacgccctgaactacctggagctgttccacaccagcatcgagcaggagaaggagagaaacagcgaggacgccgtgatgaccgccgtgagagcctgggagttctggaacctgaagaccctgcaggagagagaggccagactgagactggagcaggaggaggccgagctgctgacctacaccagagaggacgcctacagcatggagtacgtgtacgaggacgtggacggccagaccgaggtgatgcccctgtggaccccccccacccccccccaggacgacagcgacatctacctggacagcgtgatgtgcctgatgtacgaggccacccccatccccgaggccaagctgccccccgtgtacgtgagaaaggagagaaagagacacaagaccgaccccagcgccgccggcagaaagaagaagcagagacacggcgaggccgtggtgccccccagaagcctgttcgacagagccacccccggcctgctgaagatcagaagagagggcaaggagcagaagaagaacatcctgctgaagcagcaggtgcccttcgccaagcccctgcccaccttcgccaagcccaccgccgagcccggccaggacaaccccgagtggctgatcagcgaggactgggccctgctgcaggccgtgaagcagctgctggagctgcccctgaacctgaccatcgtgagccccgcccacacccccaactgggacctggtgagcgacgtggtgaacagctgcagcagaatctacagaagcagcaagcagtgcagaaacagatacgagaacgtgatcatccccagagaggagggcaagagcaagaacaacagacccctgagaaccagccagatctacgcccaggacgagaacgccacccacacccagctgtacaccagccacttcgacctgatgaagatgaccgccggcaagagaagcccccccatcaagcccctgctgggcatgaaccccttccagaagaaccccaagcacgccagcgtgctggccgagagcggcatcaactacgacaagcccctgccccccatccaggtggccagcctgagagccgagagaatcgccaaggagaagaaggccctggccgaccagcagaaggcccagcagcccgccgtggcccagcccccccccccccagccccagccccccccccccccccagcagccccccccccccctgccccagccccaggccgccggcagccagccccccgccggcccccccgccgtgcagccccagccccagccccagccccagacccagccccagcccgtgcaggcccccgccaaggcccagcccgccatcaccaccggcggcagcgccgccgtgctggccggcaccatcaagaccagcgtgaccggcaccagcatgcccaccggcgccgtgagcggcaacgtgatcgtgaacaccatcgccggcgtgcccgccgccaccttccagagcatcaacaagagactggccagccccgtggcccccggcgccctgaccacccccggcggcagcgcccccgcccaggtggtgcacacccagcccccccccagagccgtgggcagccccgccaccgccacccccgacctggtgagcatggccaccacccagggcgtgagagccgtgaccagcgtgaccgccagcgccgtggtgaccaccaacctgacccccgtgcagacccccgccagaagcctggtgccccaggtgagccaggccaccggcgtgcagctgcccggcaagaccatcacccccgcccacttccagctgctgagacagcagcagcagcagcagcagcagcagcagcagcagcagcagcagcagcagcagcagcagcagcagcagcagcagcagcagcagcagaccaccaccaccagccaggtgcaggtgccccagatccagggccaggcccagagccccgcccagatcaaggccgtgggcaagctgacccccgagcacctgatcaagatgcagaagcagaagctgcagatgcccccccagcccccccccccccaggcccagagcgcccccccccagcccaccgcccaggtgcaggtgcagaccagccagcccccccagcagcagagcccccagctgaccaccgtgaccgcccccagacccggcgccctgctgaccggcaccaccgtggccaacctgcaggtggccagactgaccagagtgcccaccagccagctgcaggcccagggccagatgcagacccaggccccccagcccgcccaggtggccctggccaagccccccgtggtgagcgtgcccgccgccgtggtgagcagccccggcgtgaccaccctgcccatgaacgtggccggcatcagcgtggccatcggccagccccagaaggccgccggccagaccgtggtggcccagcccgtgcacatgcagcagctgctgaagctgaagcagcaggccgtgcagcagcagaaggccatccagccccaggccgcccagggccccgccgccgtgcagcagaagatcaccgcccagcagatcaccacccccggcgcccagcagaaggtggcctacgccgcccagcccgccctgaagacccagttcctgaccacccccatcagccaggcccagaagctggccggcgcccagcaggtgcagacccagatccaggtggccaagctgccccaggtggtgcagcagcagacccccgtggccagcatccagcaggtggccagcgccagccagcaggccagcccccagaccgtggccctgacccaggccaccgccgccggccagcaggtgcagatgatccccgccgtgaccgccaccgcccaggtggtgcagcagaagctgatccagcagcaggtggtgaccaccgccagcgcccccctgcagacccccggcgcccccaaccccgcccaggtgcccgccagcagcgacagccccagccagcagcccaagctgcagatgagagtgcccgccgtgagactgaagacccccaccaagcccccctgccagtag

SEQ ID NO: 186580 - DNA, 9372 bp, Artificial Sequence
  derived and/or modified sequence
atgcaccacggcaccggcccccagaacgtgcagcaccagctgcagagaagcagagcctgccccggcagcgagggcgaggagcagcccgcccaccccaaccccccccccagccccgccgcccccttcgcccccagcgccagccccagcgccccccagagccccagctaccagatccagcagctgatgaacagaagccccgccaccggccagaacgtgaacatcaccctgcagagcgtgggccccgtggtgggcggcaaccagcagatcaccctggcccccctgcccctgcccagccccaccagccccggcttccagttcagcgcccagcccagaagattcgagcacggcagccccagctacatccaggtgaccagccccctgagccagcaggtgcagacccagagccccacccagcccagccccggccccggccaggccctgcagaacgtgagagccggcgcccccggccccggcctgggcctgtgcagcagcagccccaccggcggcttcgtggacgccagcgtgctggtgagacagatcagcctgagccccagcagcggcggccacttcgtgttccaggacggcagcggcctgacccagatcgcccagggcgcccaggtgcagctgcagcaccccggcacccccatcaccgtgagagagagaagacccagccagccccacacccagagcggcggcaccatccaccacctgggcccccagagccccgccgccgccggcggcgccggcctgcagcccctggccagccccagccacatcaccaccgccaacctgcccccccagatcagcagcatcatccagggccagctggtgcagcagcagcaggtgctgcagggcccccccctgcccagacccctgggcttcgagagaacccccggcgtgctgctgcccggcgccggcggcgccgccggcttcggcatgaccagcccccccccccccaccagccccagcagaaccgccgtgccccccggcctgagcagcctgcccctgaccagcgtgggcaacaccggcatgaagaaggtgcccaagaagctggaggagatcccccccgccagccccgagatggcccagatgagaaagcagtgcctggactaccactaccaggagatgcaggccctgaaggaggtgttcaaggagtacctgatcgagctgttcttcctgcagcacttccagggcaacatgatggacttcctggccttcaagaagaagcactacgcccccctgcaggcctacctgagacagaacgacctggacatcgaggaggaggaggaggaggaggaggaggaggaggagaagagcgaggtgatcaacgacgagcagcaggccctggccggcagcctggtggccggcgccggcagcaccgtggagaccgacctgttcaagagacagcaggccatgcccagcaccggcatggccgagcagagcaagagacccagactggaggtgggccaccagggcgtggtgttccagcaccccggcgccgacgccggcgtgcccctgcagcagctgatgcccaccgcccagggcggcatgccccccaccccccaggccgcccagctggccggccagagacagagccagcagcagtacgaccccagcaccggcccccccgtgcagaacgccgccagcctgcacacccccctgccccagctgcccggcagactgccccccgccggcgtgcccaccgccgccctgagcagcgccctgcagttcgcccagcagccccaggtggtggaggcccagacccagctgcagatccccgtgaagacccagcagcccaacgtgcccatccccgccccccccagcagccagctgcccatcccccccagccagcccgcccagctggccctgcacgtgcccacccccggcaaggtgcaggtgcaggccagccagctgagcagcctgccccagatggtggccagcaccagactgcccgtggaccccgcccccccctgccccagacccctgcccaccagcagcaccagcagcctggcccccgtgagcggcagcggccccggccccagccccgccagaagcagccccgtgaacagacccagcagcgccaccaacaaggccctgagccccgtgaccagcagaacccccggcgtggtggccagcgcccccaccaagccccagagccccgcccagaacgccaccagcagccaggacagcagccaggacaccctgaccgagcagatcaccctggagaaccaggtgcaccagagaatcgccgagctgagaaaggccggcctgtggagccagagaagactgcccaagctgcaggaggcccccagacccaagagccactgggactacctgctggaggagatgcagtggatggccaccgacttcgcccaggagagaagatggaaggtggccgccgccaagaagctggtgagaaccgtggtgagacaccacgaggagaagcagctgagagaggagagaggcaagaaggaggagcagagcagactgagaagaatcgccgccagcaccgccagagagatcgagtgcttctggagcaacatcgagcaggtggtggagatcaagctgagagtggagctggaggagaagagaaagaaggccctgaacctgcagaaggtgagcagaagaggcaaggagctgagacccaagggcttcgacgccctgcaggagagcagcctggacagcggcatgagcggcagaaagagaaaggccagcatcagcctgaccgacgacgaggtggacgacgaggaggagaccatcgaggaggaggaggccaacgagggcgtggtggaccaccagaccgagctgagcaacctggccaaggaggccgagctgcccctgctggacctgatgaagctgtacgagggcgccttcctgcccagcagccagtggcccagacccaagcccgacggcgaggacaccagcggcgaggaggacgccgacgactgccccggcgacagagagagcagaaaggacctggtgctgatcgacagcctgttcatcatggaccagttcaaggccgccgagagaatgaacatcggcaagcccaacgccaaggacatcgccgacgtgaccgccgtggccgaggccatcctgcccaagggcagcgccagagtgaccaccagcgtgaagttcaacgcccccagcctgctgtacggcgccctgagagactaccagaagatcggcctggactggctggccaagctgtacagaaagaacctgaacggcatcctggccgacgaggccggcctgggcaagaccgtgcagatcatcgccttcttcgcccacctggcctgcaacgagggcaactggggcccccacctggtggtggtgagaagctgcaacatcctgaagtgggagctggagctgaagagatggtgccccggcctgaagatcctgagctacatcggcagccacagagagctgaaggccaagagacaggagtgggccgagcccaacagcttccacgtgtgcatcaccagctacacccagttcttcagaggcctgaccgccttcaccagagtgagatggaagtgcctggtgatcgacgagatgcagagagtgaagggcatgaccgagagacactgggaggccgtgttcaccctgcagagccagcagagactgctgctgatcgacagccccctgcacaacaccttcctggagctgtggaccatggtgcacttcctggtgcccggcatcagcagaccctacctgagcagccccctgagagcccccagcgaggagagccaggactactaccacaaggtggtgatcagactgcacagagtgacccagcccttcatcctgagaagaaccaagagagacgtggagaagcagctgaccaagaagtacgagcacgtgctgaagtgcagactgagcaacagacagaaggccctgtacgaggacgtgatcctgcagcccggcacccaggaggccctgaagagcggccacttcgtgaacgtgctgagcatcctggtgagactgcagagaatctgcaaccaccccggcctggtggagcccagacaccccggcagcagctacgtggccggccccctggagtaccccagcgccagcctgatcctgaaggccctggagagagacttctggaaggaggccgacctgagcatgttcgacctgatcggcctggagaacaagatcaccagacacgaggccgagctgctgagcaagaagaagatccccagaaagctgatggaggagatcagcaccagcgccgcccccgccgccagacccgccgccgccaagctgaaggccagcagactgttccagcccgtgcagtacggccagaagcccgagggcagaaccgtggccttccccagcacccacccccccagaaccgccgcccccaccaccgccagcgccgccccccagggccccctgagaggcagaccccccatcgccaccttcagcgccaaccccgaggccaaggccgccgccgcccccttccagaccagccaggccagcgccagcgcccccagacaccagcccgccagcgccagcagcaccgccgccagccccgcccaccccgccaagctgagagcccagaccaccgcccaggccagcacccccggccagccccccccccagccccaggcccccagccacgccgccggccagagcgccctgccccagagactggtgctgcccagccaggcccaggccagactgcccagcggcgaggtggtgaagatcgcccagctggccagcatcaccggcccccagagcagagtggcccagcccgagacccccgtgaccctgcagttccagggcagcaagttcaccctgagccacagccagctgagacagctgaccgccggccagcccctgcagctgcagggcagcgtgctgcagatcgtgagcgcccccggccagccctacctgagagcccccggccccgtggtgatgcagaccgtgagccaggccggcgccgtgcacggcgccctgggcagcaagccccccgccggcggccccagccccgcccccctgaccccccaggtgggcgtgcccggcagagtggccgtgaacgccctggccgtgggcgagcccggcaccgccagcaagcccgccagccccatcggcggccccacccaggaggagaagaccagactgctgaaggagagactggaccagatctacctggtgaacgagagaagatgcagccaggcccccgtgtacggcagagacctgctgagaatctgcgccctgcccagccacggcagagtgcagtggagaggcagcctggacggcagaagaggcaaggaggccggccccgcccacagctacaccagcagcagcgagagccccagcgagctgatgctgaccctgtgcagatgcggcgagagcctgcaggacgtgatcgacagagtggccttcgtgatcccccccgtggtggccgccccccccagcctgagagtgcccagacccccccccctgtacagccacagaatgagaatcctgagacagggcctgagagagcacgccgccccctacttccagcagctgagacagaccaccgcccccagactgctgcagttccccgagctgagactggtgcagttcgacagcggcaagctggaggccctggccatcctgctgcagaagctgaagagcgagggcagaagagtgctgatcctgagccagatgatcctgatgctggacatcctggagatgttcctgaacttccactacctgacctacgtgagaatcgacgagaacgccagcagcgagcagagacaggagctgatgagaagcttcaacagagacagaagaatcttctgcgccatcctgagcacccacagcagaaccaccggcatcaacctggtggaggccgacaccgtggtgttctacgacaacgacctgaaccccgtgatggacgccaaggcccaggagtggtgcgacagaatcggcagatgcaaggacatccacatctacagactggtgagcggcaacagcatcgaggagaagctgctgaagaacggcaccaaggacctgatcagagaggtggccgcccagggcaacgactacagcatggccttcctgacccagagaaccatccaggagctgttcgaggtgtacagccccatggacgacgccggcttccccgtgaaggccgaggagttcgtggtgctgagccaggagcccagcgtgaccgagaccatcgcccccaagatcgccagacccttcatcgaggccctgaagagcatcgagtacctggaggaggacgcccagaagagcgcccaggagggcgtgctgggcccccacaccgacgccctgagcagcgacagcgagaacatgccctgcgacgaggagcccagccagctggaggagctggccgacttcatggagcagctgacccccatcgagaagtacgccctgaactacctggagctgttccacaccagcatcgagcaggagaaggagagaaacagcgaggacgccgtgatgaccgccgtgagagcctgggagttctggaacctgaagaccctgcaggagagagaggccagactgagactggagcaggaggaggccgagctgctgacctacaccagagaggacgcctacagcatggagtacgtgtacgaggacgtggacggccagaccgaggtgatgcccctgtggaccccccccacccccccccaggacgacagcgacatctacctggacagcgtgatgtgcctgatgtacgaggccacccccatccccgaggccaagctgccccccgtgtacgtgagaaaggagagaaagagacacaagaccgaccccagcgccgccggcagaaagaagaagcagagacacggcgaggccgtggtgccccccagaagcctgttcgacagagccacccccggcctgctgaagatcagaagagagggcaaggagcagaagaagaacatcctgctgaagcagcaggtgcccttcgccaagcccctgcccaccttcgccaagcccaccgccgagcccggccaggacaaccccgagtggctgatcagcgaggactgggccctgctgcaggccgtgaagcagctgctggagctgcccctgaacctgaccatcgtgagccccgcccacacccccaactgggacctggtgagcgacgtggtgaacagctgcagcagaatctacagaagcagcaagcagtgcagaaacagatacgagaacgtgatcatccccagagaggagggcaagagcaagaacaacagacccctgagaaccagccagatctacgcccaggacgagaacgccacccacacccagctgtacaccagccacttcgacctgatgaagatgaccgccggcaagagaagcccccccatcaagcccctgctgggcatgaaccccttccagaagaaccccaagcacgccagcgtgctggccgagagcggcatcaactacgacaagcccctgccccccatccaggtggccagcctgagagccgagagaatcgccaaggagaagaaggccctggccgaccagcagaaggcccagcagcccgccgtggcccagcccccccccccccagccccagccccccccccccccccagcagccccccccccccctgccccagccccaggccgccggcagccagccccccgccggcccccccgccgtgcagccccagccccagccccagccccagacccagccccagcccgtgcaggcccccgccaaggcccagcccgccatcaccaccggcggcagcgccgccgtgctggccggcaccatcaagaccagcgtgaccggcaccagcatgcccaccggcgccgtgagcggcaacgtgatcgtgaacaccatcgccggcgtgcccgccgccaccttccagagcatcaacaagagactggccagccccgtggcccccggcgccctgaccacccccggcggcagcgcccccgcccaggtggtgcacacccagcccccccccagagccgtgggcagccccgccaccgccacccccgacctggtgagcatggccaccacccagggcgtgagagccgtgaccagcgtgaccgccagcgccgtggtgaccaccaacctgacccccgtgcagacccccgccagaagcctggtgccccaggtgagccaggccaccggcgtgcagctgcccggcaagaccatcacccccgcccacttccagctgctgagacagcagcagcagcagcagcagcagcagcagcagcagcagcagcagcagcagcagcagcagcagcagcagcagcagcagcagcagcagaccaccaccaccagccaggtgcaggtgccccagatccagggccaggcccagagccccgcccagatcaaggccgtgggcaagctgacccccgagcacctgatcaagatgcagaagcagaagctgcagatgcccccccagcccccccccccccaggcccagagcgcccccccccagcccaccgcccaggtgcaggtgcagaccagccagcccccccagcagcagagcccccagctgaccaccgtgaccgcccccagacccggcgccctgctgaccggcaccaccgtggccaacctgcaggtggccagactgaccagagtgcccaccagccagctgcaggcccagggccagatgcagacccaggccccccagcccgcccaggtggccctggccaagccccccgtggtgagcgtgcccgccgccgtggtgagcagccccggcgtgaccaccctgcccatgaacgtggccggcatcagcgtggccatcggccagccccagaaggccgccggccagaccgtggtggcccagcccgtgcacatgcagcagctgctgaagctgaagcagcaggccgtgcagcagcagaaggccatccagccccaggccgcccagggccccgccgccgtgcagcagaagatcaccgcccagcagatcaccacccccggcgcccagcagaaggtggcctacgccgcccagcccgccctgaagacccagttcctgaccacccccatcagccaggcccagaagctggccggcgcccagcaggtgcagacccagatccaggtggccaagctgccccaggtggtgcagcagcagacccccgtggccagcatccagcaggtggccagcgccagccagcaggccagcccccagaccgtggccctgacccaggccaccgccgccggccagcaggtgcagatgatccccgccgtgaccgccaccgcccaggtggtgcagcagaagctgatccagcagcaggtggtgaccaccgccagcgcccccctgcagacccccggcgcccccaaccccgcccaggtgcccgccagcagcgacagccccagccagcagcccaagctgcagatgagagtgcccgccgtgagactgaagacccccaccaagcccccctgccagtag

SEQ ID NO: 186581 - DNA, 9369 bp, Artificial Sequence
  derived and/or modified sequence
atgcaccacggcaccggcccccagaacgtgcagcaccagctgcagagaagcagagcctgccccggcagcgagggcgaggagcagcccgcccaccccaaccccccccccagccccgccgcccccttcgcccccagcgccagccccagcgccccccagagccccagctaccagatccagcagctgatgaacagaagccccgccaccggccagaacgtgaacatcaccctgcagagcgtgggccccgtggtgggcggcaaccagcagatcaccctggcccccctgcccctgcccagccccaccagccccggcttccagttcagcgcccagcccagaagattcgagcacggcagccccagctacatccaggtgaccagccccctgagccagcaggtgcagacccagagccccacccagcccagccccggccccggccaggccctgcagaacgtgagagccggcgcccccggccccggcctgggcctgtgcagcagcagccccaccggcggcttcgtggacgccagcgtgctggtgagacagatcagcctgagccccagcagcggcggccacttcgtgttccaggacggcagcggcctgacccagatcgcccagggcgcccaggtgcagctgcagcaccccggcacccccatcaccgtgagagagagaagacccagccagccccacacccagagcggcggcaccatccaccacctgggcccccagagccccgccgccgccggcggcgccggcctgcagcccctggccagccccagccacatcaccaccgccaacctgcccccccagatcagcagcatcatccagggccagctggtgcagcagcagcaggtgctgcagggcccccccctgcccagacccctgggcttcgagagaacccccggcgtgctgctgcccggcgccggcggcgccgccggcttcggcatgaccagcccccccccccccaccagccccagcagaaccgccgtgccccccggcctgagcagcctgcccctgaccagcgtgggcaacaccggcatgaagaaggtgcccaagaagctggaggagatcccccccgccagccccgagatggcccagatgagaaagcagtgcctggactaccactaccaggagatgcaggccctgaaggaggtgttcaaggagtacctgatcgagctgttcttcctgcagcacttccagggcaacatgatggacttcctggccttcaagaagaagcactacgcccccctgcaggcctacctgagacagaacgacctggacatcgaggaggaggaggaggaggaggaggaggaggaggagaagagcgaggtgatcaacgacgagcaggccctggccggcagcctggtggccggcgccggcagcaccgtggagaccgacctgttcaagagacagcaggccatgcccagcaccggcatggccgagcagagcaagagacccagactggaggtgggccaccagggcgtggtgttccagcaccccggcgccgacgccggcgtgcccctgcagcagctgatgcccaccgcccagggcggcatgccccccaccccccaggccgcccagctggccggccagagacagagccagcagcagtacgaccccagcaccggcccccccgtgcagaacgccgccagcctgcacacccccctgccccagctgcccggcagactgccccccgccggcgtgcccaccgccgccctgagcagcgccctgcagttcgcccagcagccccaggtggtggaggcccagacccagctgcagatccccgtgaagacccagcagcccaacgtgcccatccccgccccccccagcagccagctgcccatcccccccagccagcccgcccagctggccctgcacgtgcccacccccggcaaggtgcaggtgcaggccagccagctgagcagcctgccccagatggtggccagcaccagactgcccgtggaccccgcccccccctgccccagacccctgcccaccagcagcaccagcagcctggcccccgtgagcggcagcggccccggccccagccccgccagaagcagccccgtgaacagacccagcagcgccaccaacaaggccctgagccccgtgaccagcagaacccccggcgtggtggccagcgcccccaccaagccccagagccccgcccagaacgccaccagcagccaggacagcagccaggacaccctgaccgagcagatcaccctggagaaccaggtgcaccagagaatcgccgagctgagaaaggccggcctgtggagccagagaagactgcccaagctgcaggaggcccccagacccaagagccactgggactacctgctggaggagatgcagtggatggccaccgacttcgcccaggagagaagatggaaggtggccgccgccaagaagctggtgagaaccgtggtgagacaccacgaggagaagcagctgagagaggagagaggcaagaaggaggagcagagcagactgagaagaatcgccgccagcaccgccagagagatcgagtgcttctggagcaacatcgagcaggtggtggagatcaagctgagagtggagctggaggagaagagaaagaaggccctgaacctgcagaaggtgagcagaagaggcaaggagctgagacccaagggcttcgacgccctgcaggagagcagcctggacagcggcatgagcggcagaaagagaaaggccagcatcagcctgaccgacgacgaggtggacgacgaggaggagaccatcgaggaggaggaggccaacgagggcgtggtggaccaccagaccgagctgagcaacctggccaaggaggccgagctgcccctgctggacctgatgaagctgtacgagggcgccttcctgcccagcagccagtggcccagacccaagcccgacggcgaggacaccagcggcgaggaggacgccgacgactgccccggcgacagagagagcagaaaggacctggtgctgatcgacagcctgttcatcatggaccagttcaaggccgccgagagaatgaacatcggcaagcccaacgccaaggacatcgccgacgtgaccgccgtggccgaggccatcctgcccaagggcagcgccagagtgaccaccagcgtgaagttcaacgcccccagcctgctgtacggcgccctgagagactaccagaagatcggcctggactggctggccaagctgtacagaaagaacctgaacggcatcctggccgacgaggccggcctgggcaagaccgtgcagatcatcgccttcttcgcccacctggcctgcaacgagggcaactggggcccccacctggtggtggtgagaagctgcaacatcctgaagtgggagctggagctgaagagatggtgccccggcctgaagatcctgagctacatcggcagccacagagagctgaaggccaagagacaggagtgggccgagcccaacagcttccacgtgtgcatcaccagctacacccagttcttcagaggcctgaccgccttcaccagagtgagatggaagtgcctggtgatcgacgagatgcagagagtgaagggcatgaccgagagacactgggaggccgtgttcaccctgcagagccagcagagactgctgctgatcgacagccccctgcacaacaccttcctggagctgtggaccatggtgcacttcctggtgcccggcatcagcagaccctacctgagcagccccctgagagcccccagcgaggagagccaggactactaccacaaggtggtgatcagactgcacagagtgacccagcccttcatcctgagaagaaccaagagagacgtggagaagcagctgaccaagaagtacgagcacgtgctgaagtgcagactgagcaacagacagaaggccctgtacgaggacgtgatcctgcagcccggcacccaggaggccctgaagagcggccacttcgtgaacgtgctgagcatcctggtgagactgcagagaatctgcaaccaccccggcctggtggagcccagacaccccggcagcagctacgtggccggccccctggagtaccccagcgccagcctgatcctgaaggccctggagagagacttctggaaggaggccgacctgagcatgttcgacctgatcggcctggagaacaagatcaccagacacgaggccgagctgctgagcaagaagaagatccccagaaagctgatggaggagatcagcaccagcgccgcccccgccgccagacccgccgccgccaagctgaaggccagcagactgttccagcccgtgcagtacggccagaagcccgagggcagaaccgtggccttccccagcacccacccccccagaaccgccgcccccaccaccgccagcgccgccccccagggccccctgagaggcagaccccccatcgccaccttcagcgccaaccccgaggccaaggccgccgccgcccccttccagaccagccaggccagcgccagcgcccccagacaccagcccgccagcgccagcagcaccgccgccagccccgcccaccccgccaagctgagagcccagaccaccgcccaggccagcacccccggccagccccccccccagccccaggcccccagccacgccgccggccagagcgccctgccccagagactggtgctgcccagccaggcccaggccagactgcccagcggcgaggtggtgaagatcgcccagctggccagcatcaccggcccccagagcagagtggcccagcccgagacccccgtgaccctgcagttccagggcagcaagttcaccctgagccacagccagctgagacagctgaccgccggccagcccctgcagctgcagggcagcgtgctgcagatcgtgagcgcccccggccagccctacctgagagcccccggccccgtggtgatgcagaccgtgagccaggccggcgccgtgcacggcgccctgggcagcaagccccccgccggcggccccagccccgcccccctgaccccccaggtgggcgtgcccggcagagtggccgtgaacgccctggccgtgggcgagcccggcaccgccagcaagcccgccagccccatcggcggccccacccaggaggagaagaccagactgctgaaggagagactggaccagatctacctggtgaacgagagaagatgcagccaggcccccgtgtacggcagagacctgctgagaatctgcgccctgcccagccacggcagagtgcagtggagaggcagcctggacggcagaagaggcaaggaggccggccccgcccacagctacaccagcagcagcgagagccccagcgagctgatgctgaccctgtgcagatgcggcgagagcctgcaggacgtgatcgacagagtggccttcgtgatcccccccgtggtggccgccccccccagcctgagagtgcccagacccccccccctgtacagccacagaatgagaatcctgagacagggcctgagagagcacgccgccccctacttccagcagctgagacagaccaccgcccccagactgctgcagttccccgagctgagactggtgcagttcgacagcggcaagctggaggccctggccatcctgctgcagaagctgaagagcgagggcagaagagtgctgatcctgagccagatgatcctgatgctggacatcctggagatgttcctgaacttccactacctgacctacgtgagaatcgacgagaacgccagcagcgagcagagacaggagctgatgagaagcttcaacagagacagaagaatcttctgcgccatcctgagcacccacagcagaaccaccggcatcaacctggtggaggccgacaccgtggtgttctacgacaacgacctgaaccccgtgatggacgccaaggcccaggagtggtgcgacagaatcggcagatgcaaggacatccacatctacagactggtgagcggcaacagcatcgaggagaagctgctgaagaacggcaccaaggacctgatcagagaggtggccgcccagggcaacgactacagcatggccttcctgacccagagaaccatccaggagctgttcgaggtgtacagccccatggacgacgccggcttccccgtgaaggccgaggagttcgtggtgctgagccaggagcccagcgtgaccgagaccatcgcccccaagatcgccagacccttcatcgaggccctgaagagcatcgagtacctggaggaggacgcccagaagagcgcccaggagggcgtgctgggcccccacaccgacgccctgagcagcgacagcgagaacatgccctgcgacgaggagcccagccagctggaggagctggccgacttcatggagcagctgacccccatcgagaagtacgccctgaactacctggagctgttccacaccagcatcgagcaggagaaggagagaaacagcgaggacgccgtgatgaccgccgtgagagcctgggagttctggaacctgaagaccctgcaggagagagaggccagactgagactggagcaggaggaggccgagctgctgacctacaccagagaggacgcctacagcatggagtacgtgtacgaggacgtggacggccagaccgaggtgatgcccctgtggaccccccccacccccccccaggacgacagcgacatctacctggacagcgtgatgtgcctgatgtacgaggccacccccatccccgaggccaagctgccccccgtgtacgtgagaaaggagagaaagagacacaagaccgaccccagcgccgccggcagaaagaagaagcagagacacggcgaggccgtggtgccccccagaagcctgttcgacagagccacccccggcctgctgaagatcagaagagagggcaaggagcagaagaagaacatcctgctgaagcagcaggtgcccttcgccaagcccctgcccaccttcgccaagcccaccgccgagcccggccaggacaaccccgagtggctgatcagcgaggactgggccctgctgcaggccgtgaagcagctgctggagctgcccctgaacctgaccatcgtgagccccgcccacacccccaactgggacctggtgagcgacgtggtgaacagctgcagcagaatctacagaagcagcaagcagtgcagaaacagatacgagaacgtgatcatccccagagaggagggcaagagcaagaacaacagacccctgagaaccagccagatctacgcccaggacgagaacgccacccacacccagctgtacaccagccacttcgacctgatgaagatgaccgccggcaagagaagcccccccatcaagcccctgctgggcatgaaccccttccagaagaaccccaagcacgccagcgtgctggccgagagcggcatcaactacgacaagcccctgccccccatccaggtggccagcctgagagccgagagaatcgccaaggagaagaaggccctggccgaccagcagaaggcccagcagcccgccgtggcccagcccccccccccccagccccagccccccccccccccccagcagccccccccccccctgccccagccccaggccgccggcagccagccccccgccggcccccccgccgtgcagccccagccccagccccagccccagacccagccccagcccgtgcaggcccccgccaaggcccagcccgccatcaccaccggcggcagcgccgccgtgctggccggcaccatcaagaccagcgtgaccggcaccagcatgcccaccggcgccgtgagcggcaacgtgatcgtgaacaccatcgccggcgtgcccgccgccaccttccagagcatcaacaagagactggccagccccgtggcccccggcgccctgaccacccccggcggcagcgcccccgcccaggtggtgcacacccagcccccccccagagccgtgggcagccccgccaccgccacccccgacctggtgagcatggccaccacccagggcgtgagagccgtgaccagcgtgaccgccagcgccgtggtgaccaccaacctgacccccgtgcagacccccgccagaagcctggtgccccaggtgagccaggccaccggcgtgcagctgcccggcaagaccatcacccccgcccacttccagctgctgagacagcagcagcagcagcagcagcagcagcagcagcagcagcagcagcagcagcagcagcagcagcagcagcagcagcagcagcagcagaccaccaccaccagccaggtgcaggtgccccagatccagggccaggcccagagccccgcccagatcaaggccgtgggcaagctgacccccgagcacctgatcaagatgcagaagcagaagctgcagatgcccccccagcccccccccccccaggcccagagcgcccccccccagcccaccgcccaggtgcaggtgcagaccagccagcccccccagcagcagagcccccagctgaccaccgtgaccgcccccagacccggcgccctgctgaccggcaccaccgtggccaacctgcaggtggccagactgaccagagtgcccaccagccagctgcaggcccagggccagatgcagacccaggccccccagcccgcccaggtggccctggccaagccccccgtggtgagcgtgcccgccgccgtggtgagcagccccggcgtgaccaccctgcccatgaacgtggccggcatcagcgtggccatcggccagccccagaaggccgccggccagaccgtggtggcccagcccgtgcacatgcagcagctgctgaagctgaagcagcaggccgtgcagcagcagaaggccatccagccccaggccgcccagggccccgccgccgtgcagcagaagatcaccgcccagcagatcaccacccccggcgcccagcagaaggtggcctacgccgcccagcccgccctgaagacccagttcctgaccacccccatcagccaggcccagaagctggccggcgcccagcaggtgcagacccagatccaggtggccaagctgccccaggtggtgcagcagcagacccccgtggccagcatccagcaggtggccagcgccagccagcaggccagcccccagaccgtggccctgacccaggccaccgccgccggccagcaggtgcagatgatccccgccgtgaccgccaccgcccaggtggtgcagcagaagctgatccagcagcaggtggtgaccaccgccagcgcccccctgcagacccccggcgcccccaaccccgcccaggtgcccgccagcagcgacagccccagccagcagcccaagctgcagatgagagtgcccgccgtgagactgaagacccccaccaagcccccctgccagtag

SEQ ID NO: 186582 - DNA, 2475 bp, Artificial Sequence
  derived and/or modified sequence
atgcaccacggcaccggcccccagaacgtgcagcaccagctgcagagaagcagagcctgccccggcagcgagggcgaggagcagcccgcccaccccaaccccccccccagccccgccgcccccttcgcccccagcgccagccccagcgccccccagagccccagctaccagatccagcagctgatgaacagaagccccgccaccggccagaacgtgaacatcaccctgcagagcgtgggccccgtggtgggcggcaaccagcagatcaccctggcccccctgcccctgcccagccccaccagccccggcttccagttcagcgcccagcccagaagattcgagcacggcagccccagctacatccaggtgaccagccccctgagccagcaggtgcagacccagagccccacccagcccagccccggccccggccaggccctgcagaacgtgagagccggcgcccccggccccggcctgggcctgtgcagcagcagccccaccggcggcttcgtggacgccagcgtgctggtgagacagatcagcctgagccccagcagcggcggccacttcgtgttccaggacggcagcggcctgacccagatcgcccagggcgcccaggtgcagctgcagcaccccggcacccccatcaccgtgagagagagaagacccagccagccccacacccagagcggcggcaccatccaccacctgggcccccagagccccgccgccgccggcggcgccggcctgcagcccctggccagccccagccacatcaccaccgccaacctgcccccccagatcagcagcatcatccagggccagctggtgcagcagcagcaggtgctgcagggcccccccctgcccagacccctgggcttcgagagaacccccggcgtgctgctgcccggcgccggcggcgccgccggcttcggcatgaccagcccccccccccccaccagccccagcagaaccgccgtgccccccggcctgagcagcctgcccctgaccagcgtgggcaacaccggcatgaagaaggtgcccaagaagctggaggagatcccccccgccagccccgagatggcccagatgagaaagcagtgcctggactaccactaccaggagatgcaggccctgaaggaggtgttcaaggagtacctgatcgagctgttcttcctgcagcacttccagggcaacatgatggacttcctggccttcaagaagaagcactacgcccccctgcaggcctacctgagacagaacgacctggacatcgaggaggaggaggaggaggaggaggaggaggaggagaagagcgaggtgatcaacgacgagcaggccctggccggcagcctggtggccggcgccggcagcaccgtggagaccgacctgttcaagagacagcaggccatgcccagcaccggcatggccggcggcatgccccccaccccccaggccgcccagctggccggccagagacagagccagcagcagtacgaccccagcaccggcccccccgtgcagaacgccgccagcctgcacacccccctgccccagctgcccggcagactgccccccgccggcgtgcccaccgccgccctgagcagcgccctgcagttcgcccagcagccccaggtggtggaggcccagacccagctgcagatccccgtgaagacccagcagcccaacgtgcccatccccgccccccccagcagccagctgcccatcccccccagccagcccgcccagctggccctgcacgtgcccacccccggcaaggtgcaggtgcaggccagccagctgagcagcctgccccagatggtggccagcaccagactgcccgtggaccccgcccccccctgccccagacccctgcccaccagcagcaccagcagcctggcccccgtgagcggcagcggccccggccccagccccgccagaagcagccccgtgaacagacccagcagcgccaccaacaaggccctgagccccgtgaccagcagaacccccggcgtggtggccagcgcccccaccaagccccagagccccgcccagaacgccaccagcagccaggacagcagccaggacaccctgaccgagcagatcaccctggagaaccaggtgcaccagagaatcgccgagctgagaaaggccggcctgtggagccagagaagactgcccaagctgcaggaggcccccagacccaagagccactgggactacctgctggaggagatgcagtggatggccaccgacttcgcccaggagagaagatggaaggtggccgccgccaagaagctggtgagaaccgtggtgagacaccacgaggagaagcagctgagagaggagagaggcaagaaggaggagcagagcagactgagaagaatcgccgccagcaccgccagagagatcgagtgcttctggagcaacatcgagcaggtggtggagatcaagctgagagtggagctggagtag

SEQ ID NO: 186583 - DNA, 12025 bp, Artificial Sequence
  derived and/or modified sequence
cactgagcggctgcggcgcggcttccatcctcccgccctcctgacgcggccggagcgcagccctgaggcccagggagaacgacacattggatacagaagggaggtgatcatgcaccatggcactggcccccagaacgtccagcatcagctgcagaggtccagggcctgccctggcagcgagggtgaggagcagccggcccaccccaacccacccccgtcccccgcagctcccttcgctccctcagcaagcccgtcggcaccccagtctcccagttatcaaatacagcagctgatgaataggagccctgcaaccgggcagaacgtgaacatcaccctgcagagcgtgggccctgtcgtcgggggaaaccagcagatcacactggccccactgccgctccccagccccacctctccaggcttccagttcagcgctcagcctcggcggtttgagcatgggtctccatcatacattcaggtcacgtcccccttgtcccagcaggtccagacccagagtcccacgcagcccagtccggggccggggcaggccttgcagaatgtgcgtgcaggtgcccctggccctgggctgggcctctgcagcagcagccctacagggggcttcgtggatgccagcgtgctggtgaggcagatcagcttgagcccctccagtggtggacactttgtgtttcaggatgggtcagggctcacccagatcgcccagggagcccaggttcagctccagcacccgggtacgcccatcacagtccgagagcggagaccctcccagccccacacacagtcagggggcaccatccaccacctgggaccccagagccctgcagccgcgggtggggccggcctgcagcccctggccagcccaagccacatcaccacggctaacttgccaccgcagatcagcagcatcatccagggccagctggttcagcagcagcaggtgctgcaggggccgccgctgccccggcccctgggcttcgagaggacacccggcgtgctgctccccggggctgggggcgcagcggggtttgggatgacgtccccacccccgcccaccagcccttccaggactgccgtgcccccaggcctttccagcctcccactcacgtctgtggggaacacgggaatgaagaaggttcccaagaagttagaggagattcccccagcctctccggagatggcacagatgaggaagcagtgcctggactatcattaccaggagatgcaggctctgaaggaggtcttcaaggagtatttgattgaactgtttttcttgcaacactttcaagggaacatgatggatttcttagctttcaagaagaaacattatgccccattacaagcatatcttaggcagaatgatttggacattgaagaagaggaggaggaggaggaagaggaggaagaaaaatctgaggttatcaatgacgagcagcaagccctcgcagggagcctggtagcaggggccggaagcacagtagagacggacctgtttaagaggcagcaggcgatgccctccacaggtatggcagagcagtctaagaggcctcgccttgaagtgggtcaccaaggggtagttttccagcacccaggggcggacgcaggcgttcctctccagcaactaatgccgaccgcacaaggaggaatgccccccacgccgcaggccgcgcagctcgctggacagaggcagagtcagcagcagtatgacccctccacggggcctcccgtgcagaacgctgccagcttgcacaccccactgccgcagctgcccgggaggctgcccccagccggtgttcccactgcagccctctcctctgcgctgcagtttgcacagcagccgcaagtggtagaggcccagacacagctccaaatcccggtgaagactcagcagcccaatgttcccatccctgcaccgcccagcagccaactccccatccctccctcgcagcctgcacagctggccctccacgttcccacacctggaaaggtgcaggtgcaggcctctcagctttcctccctgccacagatggtagcatcgacaaggctccctgtggaccctgccccgccctgcccacggcctctgcccacctcttctacctcgtccctcgcgcctgtgagtggctccggcccaggaccctcccctgctcgatcctctccagtaaatagaccttcctcagccaccaataaggcactatctccagtcacttcccggaccccaggggtggtggcatctgcccccaccaaaccacagagtcctgctcagaatgccacctcgtcccaagacagttctcaggatacgctgacagaacaaataactctggagaaccaggtgcatcagcgcattgcggagctgaggaaagcaggtctgtggtcccagaggcgtctgccaaagctgcaggaggccccacgccccaagtcccactgggactatctgctggaggagatgcagtggatggccacagactttgcccaggagaggaggtggaaggtggctgctgcgaagaagctcgttagaactgtggtgcgccatcacgaggagaagcagctccgtgaagaaagggggaagaaggaagagcagagcagactgaggcggatagccgcctccacggcccgggagatagagtgcttttggtcgaatattgaacaggttgtggaaataaaactacgagtagaattagaagaaaaaaggaagaaggccttaaatttacagaaagtttccaggagagggaaagaattgagacctaaaggatttgacgcattacaggaaagttctctggattcaggaatgtctggaagaaaaagaaaagctagcatatctttgactgatgacgaagtggacgatgaagaggaaacaattgaagaggaggaagcaaatgaaggcgttgtggaccaccaaacagaactttctaatttagccaaggaagctgagctgcccctcctggacctgatgaagctgtacgaaggcgccttcctgccgagttctcagtggccccggccgaagcctgatggggaggacacaagcggagaggaagatgcagatgactgtccaggcgacagggagagtcgcaaggacttggttctcatcgactcgcttttcatcatggatcagttcaaagctgccgagaggatgaatatcgggaagccaaacgccaaggacattgcggacgtcactgcggtggctgaagccatcctgccgaagggcagtgctcgggtcacaacctcggtcaagtttaatgctccatctttgttgtatggggctctcagagattatcagaagattggcctggactggctggccaaactttacaggaagaatctcaatggcatattggcagatgaagctgggctgggtaaaacagtgcagatcattgctttttttgcccacctagcttgtaacgaaggtaattggggcccccatcttgttgttgtgagaagttgtaacatactcaagtgggagcttgaattgaaacgttggtgtcccggactcaaaatcctctcatatattggcagccacagagaactcaaagcaaagagacaggagtgggccgaacccaacagcttccacgtctgcatcacgtcctacactcagttcttccggggcctcaccgccttcacacgagtgcgctggaagtgcctggtcattgatgagatgcagcgcgtgaagggcatgaccgagaggcactgggaagcggttttcaccctgcagagccaacaacgtctgcttctgatcgactcgccgctgcacaataccttcctggagctctggaccatggtgcacttcctggtcccagggatctccaggccctacctgagctcccctctgagggcccccagtgaagagagccaggattactaccataaagtggtcataaggttacacagggtgacacagccatttattttgaggagaactaagagagatgtggaaaagcaactaacaaagaaatatgagcatgttttgaagtgtcgcctttctaaccgacaaaaagccttatacgaggacgttatcctgcaacctggcactcaggaggccttgaagagcgggcactttgtcaacgtcctgagcatccttgtgcggctgcagcgcatctgcaaccaccctgggctcgtcgagccccggcacccaggctcttcctacgtggcggggccactggagtatccgtccgcatctctaatcctgaaggcactggagagagatttctggaaggaagcagatctttctatgtttgatctcatcggcttagaaaataaaatcactcgtcacgaggcagagttgctgtctaagaaaaagataccgcggaaactcatggaggaaatctccacttcagcagccccagcagcccgaccagcagcagcaaagctgaaggccagcaggttgtttcagcctgtgcagtatggccagaagcccgagggtcgcaccgtggctttccccagcactcacccgccccggacggcagcccccaccacggcctctgctgctccacagggcccgcttcgaggacggccgcccatcgccacgttctctgccaatccggaggcaaaaggtggagaggtagtgaaaatagctcagctggcatccatcacaggaccacagagccgcgtggctcagccagagacgccggtgacactgcagttccagggcagcaagttcaccctgtcacacagccagctccggcagctcacagcgggccagccgctgcagctgcaaggcagcgtcctccagatcgtgtccgcccccgggcagccctaccttcgagcccctggccctgtggtgatgcagaccgtgtctcaggcgggcgctgtgcacggcgccctgggaagcaagcccccggccggcggtcccagccctgcacccttgaccccacaagttggcgttccgggccgcgtggcggtgaatgccttggctgtaggagaacccggaacggcctccaaaccagcttctcccattggagggccgacccaggaggaaaagaccagactcttgaaagagcgcctggatcagatttatttagtcaacgagcggcgctgttctcaagctccagtctatggcagagacttgctaaggatttgtgccctgcctagccatggaagggtacagtggcgtgggtccctggatggccgtcgtgggaaggaggccgggccagcgcacagttacacttcatcctcagaaagtccaagtgagctgatgttgacgctttgtcggtgtggagagtctctgcaggatgttattgacagggtggcctttgtgattcctccggtggtggcagcacccccgtccctacgggtgccgcggccgccacccctgtacagccacagaatgaggatcttgaggcagggcctgagagagcacgctgcgccgtacttccagcagctgcggcagaccacggctccacgcctgctgcagttccctgagctgaggctggtgcagttcgactcagggaagttggaagctttagctatcttgcttcagaaattgaaatctgaaggacgtcgggtgctgattttatcacagatgattcttatgttggacattttagagatgttcttgaacttccattacctcacctatgtaagaatcgatgaaaatgccagcagtgagcaacggcaggaactgatgaggagtttcaacagagacaggcggattttttgtgccattctctccactcacagccgtaccacaggtataaaccttgtagaggcggacaccgtcgtgttttatgacaatgacctgaatccagtgatggatgccaaagctcaggagtggtgcgataggatcgggagatgcaaagacatccacatatacaggcttgtgagtggcaattccattgaagagaaattgttgaaaaatggaactaaagatctgatccgagaagtggctgctcagggaaatgactactccatggctttcttaactcagcgaaccatccaggagctgtttgaagtttattctcccatggatgatgctggcttcccggtcaaagctgaggagtttgtggtgctttctcaggaaccttctgtcacggaaaccattgcacccaaaattgcaagacctttcatagaggccctcaagagtattgagtatctggaggaggatgcccagaagtccgcacaggagggggtgctgggaccacacactgatgctctgtcatcagactctgagaacatgccgtgtgatgaagaaccatcccaattagaggagctagctgacttcatggagcagcttacaccaattgaaaaatatgctttaaattacctggaattattccatacttctattgagcaagaaaaggagagaaacagtgaggacgcagtgatgactgcagtgagggcatgggagttctggaacctgaagaccctgcaggagagggaggcccggctgcggctggagcaggaggaggcggagctcctgacctacacgcgagaggatgcctacagcatggagtatgtctacgaagatgtcgatgggcagacagaagtcatgccgctctggaccccacccaccccgccgcaggacgacagcgacatctacctcgactcggtcatgtgtctcatgtatgaagccactcccatcccagaggctaagctgccccctgtgtacgtgaggaaggagcggaagcgacacaaaacagacccctcagctgcaggcaggaagaagaagcagcgtcacggggaggcggtcgtccctcctcggtccctgtttgaccgcgcaacaccaggacttctgaaaattcgcagagagggcaaggagcagaagaagaatattctgctgaagcagcaggtgccattcgccaagcccctgccaacttttgccaaacccacagctgagcctggtcaagacaaccccgagtggctcatcagtgaggactgggcgctgctgcaggctgtaaagcagttactggagctgcctttgaacctcacaatcgtgtcacctgctcacacacctaattgggatcttgtcagtgacgttgttaactcctgtagccgaatctaccgctcttccaaacagtgccggaatcgctacgagaatgtcatcattccacgagaggaggggaagagtaaaaacaaccgtcctctccgtacgagccagatctatgcccaggatgagaatgccacacacacccagctgtacacgagccactttgacttaatgaaaatgactgctggcaagaggagtcccccaatcaaacctctgcttggcatgaatccctttcagaagaaccccaagcacgcgtctgtgttggcagaaagtggaatcaactatgacaagccgctgcctcccatccaggtggcatctctccgtgcagagcgaatcgcaaaagagaaaaaggctctggctgatcagcagaaggcacagcagccggccgtggcccagccacccccgccccagccgcagcccccaccacccccgcagcagccaccgccaccgctgccacaaccacaggcagcgggcagccagccgccagcagggccaccagctgtccagccccaaccccagccacagccccagacccagccacagcctgtgcaggccccagcgaaggcgcagcccgcaatcacgacggggggcagtgcagccgtactggcaggaaccattaaaacatcagttactgggacgagcatgcccactggtgccgtgagtggaaatgtgatcgtgaacaccatcgcaggggtcccagctgccaccttccagtccatcaacaagcgcctggcgtcgccagtggctcctggggccttgactacgccgggaggctctgctcccgcccaggtggtgcacacccagcccccgccacgggcagtcggctccccagccacggcgacccctgacctggtgtccatggcaacgactcagggtgttcgagcggtcacttctgtgacagcctcggccgtggtcactaccaacctgaccccagtgcagaccccggcacggtctttggtgccccaagtgtcccaagccacaggagttcagctccctggaaaaaccatcacacctgcacatttccagcttctcaggcagcagcagcagcagcagcaacaacagcagcagcagcagcagcagcagcagcagcagcagcagcagcaacagcagcagcagcaacagacgacgacgacctctcaggtgcaagttccacagatccagggccaggcccagtccccagcacagatcaaagctgtgggcaagctgacgccggaacacctcatcaaaatgcagaagcagaaactgcagatgcccccgcagcccccaccgccacaggcccagtctgcgcccccgcagccaacagcccaagtgcaagtgcagacctcgcagccgccgcagcagcagagcccccagctcacgacggtcacggccccaaggcctggtgccctgctgacgggcaccaccgtggccaacctccaggtggcccggctcacccgggttcccacttctcagctgcaggcgcaagggcagatgcagacccaggcaccccagccagcccaggtggccttggcgaagcctccggtggtgtccgtcccggcagctgtggtctcctcaccgggagtcaccaccctgcccatgaacgtcgcggggatcagcgtggcgatcggtcagccacagaaggcagcaggacagaccgtggtggcccagcccgtgcacatgcagcagctgctgaagctgaagcagcaggccgtccagcagcagaaggccatccagccccaggctgcacagggcccggcagccgtccagcagaagatcaccgcacagcagatcaccacccctggcgcgcagcagaaggttgcctacgccgcgcagccggcccttaagacccagtttcttaccacacccatctcccaggcccagaaactggccggggcccagcaagtgcagacccagatccaggttgcaaaacttcctcaagttgttcaacagcaaacacccgtggccagcatccagcaagttgcctctgcttcccagcaggcttctccacagactgtggcgctcacgcaggcgacggcggccgggcagcaggtgcagatgatccctgcagtgaccgcgactgcccaggtggttcagcagaaactcattcagcagcaggtggtgaccacggcgtcggccccgctccagactccaggcgctcccaacccagcccaggtgcccgccagctccgacagcccaagccagcagcccaagttacagatgagggtccctgctgtcaggctaaagacacctactaagcctccgtgccagtagtcagggcagcagggctgcctctcatctaaagcaaaactaccttcctcacagaaaacgctttattagtgaaccttgggaccatgtcacgcaagagattcagcactgggaaagatataattgaaacaaaatagtgtaatcattttattaaaatgcatcccacactgcaggacaaatggtccttatggagtgccgcgttctctgtactacgtggctcatggaaaaagtgacaacatggcttcctctaaatcatttcacctttcagtccccacccgcacccgtcccctagagccatagtactgtgttctgaaagccatttagaatttctttgtgagcatgtagtgctttgcacgccacagaagccgtctgccgtgtgtgaggagcatacaatggactttctaaagataaggcgtgggcttccacagtgtctgccagagtttagttctttataccttactgaaaaatgcctcgtggtcttcgcagaggggaaggcctgtctaaagtcaatcatccgagatgggttttccattccaaagaaaggcaatatggttccttccttccctcctaaaatatgacttaacttttaagagaaatgttctgacacccacctaaacacacaaggcacgttcctggcctgtgttcaagggaaatgatcagtcattgcattgttattccaaagagcagccaacagtggcctcccccaggccctaccctgcaatgggattcgctttcatttaatggaaacttctgggactgatgcccaactcagtgcactcaagacgcatctccagttttcgggggaagctggtatttgacatagtgtgttaaacagctcctgagaacctttgggacactctgccatggctggcgtgaggcccagaggaccacgcagaggcaatggtagtacagatgtcacagctgagggtacgatgaggcctgggctcagtgagccaggacgaatgtgacagacaccccttgctgccacagtcagccctttgacgaaggtgggctggtgattctggaagtattggctatagcggtgggcccagtcaactcttccttgtggacttacgacagcagattttctctaggataagcttgtgtggttctgccagtgaagcagagaaccacctgtgctgttgtggaaggcgtgccgttgagggggaaaacgaagcccagtatttgctactgtttttcctttttttactatgacaggaaaataaatgcaattttagtggaattgattgacagtgtctccttactttgaagttttcaccaaagcaaaaaggtccatatccaatagtatcctttgtgctgtggcttgattttggcctattttacattatttggtccaggaaattaggttatattaggttttttgtatactaaaaatcagttatggcacaataaagattttctgtttttaaattgtatttcatctgcttcctccccattctctcactttaagtgacattgaggaaggtattctgtcccacaggtttctgtggacagcgatacagcaggagtcagtgaaatcaactggggagctcacttgagctcttgataagaaatgtggagaaaagtaaaaaccaagctttgaagaaacagaagaaattaatcttttagttagttgaacataccaaagcagaggactggaatctgtttgttctaaccaacccgttctccctggcttggcacgtgccgtgagagcgcagcttgccggagggagggccgctgtgtgcgcctcacatctggctcccagtggaaacttttactcctcctcatccgcagatgtgatagaactgaagtatctaggaattctgcctttgtcatttgttttaatttgtgtgccctgttcattttttttgtctttcccaaatcttggtagtctccttatagttgaagataaaatgttgagtgcacttattttagaatatcctagacataactgtctaagtaaaagcgctctattaatctaaaacactacaagagaatttaacaccatctctcaaatgcttttttggagagcttaatgggattctgaatatttgcaatgtggagtttccgccccgatctcacgtcagtgagggtctcctgtctctcaagtgtgtttcctttggctgttccctaatacaaaacacggacatatttttactcgtagcactcaatttagtaacttctagatgctaccgttgacctgagttaaattcatttagtcgtgtacgtaaaaactctccttttagtgtgttattttcttggccttcccttttaaaggttaaagtttctaacctaagaattaagtacgcgttcaggaagctgttgtctaggccttccccttgtgaatctgggttcattccaatacggcaagtaagagttggaaactttgagaacacagactataaaggcagcagcccgaacactgtcagactctaattggcgaccctgggaaacagttgccctgctattctttaaagaaagacgtttattctgatgataaaaacagttagccagactgtttttaaagcacctggcgggaagcagaaggttggatccaagcccttgttcagatttggtgcctgataagacaggggtttctctttttgtgacctttattattattattttgttaactgttgtaaccagttagctgttgtgttttaagatagaaaggaacaagactaaaattgtaaatactttgtaaacatcagcatttgtacttgaatagtaggattttaaagggcattgatagcataccaaacaaaaggcaaaataaagtgacctttttatata

SEQ ID NO: 186584 - DNA, 12157 bp, Artificial Sequence
  derived and/or modified sequence
cactgagcggctgcggcgcggcttccatcctcccgccctcctgacgcggccggagcgcagccctgaggcccagggagaacgacacattggatacagaagggaggtgatcatgcaccatggcactggcccccagaacgtccagcatcagctgcagaggtccagggcctgccctggcagcgagggtgaggagcagccggcccaccccaacccacccccgtcccccgcagctcccttcgctccctcagcaagcccgtcggcaccccagtctcccagttatcaaatacagcagctgatgaataggagccctgcaaccgggcagaacgtgaacatcaccctgcagagcgtgggccctgtcgtcgggggaaaccagcagatcacactggccccactgccgctccccagccccacctctccaggcttccagttcagcgctcagcctcggcggtttgagcatgggtctccatcatacattcaggtcacgtcccccttgtcccagcaggtccagacccagagtcccacgcagcccagtccggggccggggcaggccttgcagaatgtgcgtgcaggtgcccctggccctgggctgggcctctgcagcagcagccctacagggggcttcgtggatgccagcgtgctggtgaggcagatcagcttgagcccctccagtggtggacactttgtgtttcaggatgggtcagggctcacccagatcgcccagggagcccaggttcagctccagcacccgggtacgcccatcacagtccgagagcggagaccctcccagccccacacacagtcagggggcaccatccaccacctgggaccccagagccctgcagccgcgggtggggccggcctgcagcccctggccagcccaagccacatcaccacggctaacttgccaccgcagatcagcagcatcatccagggccagctggttcagcagcagcaggtgctgcaggggccgccgctgccccggcccctgggcttcgagaggacacccggcgtgctgctccccggggctgggggcgcagcggggtttgggatgacgtccccacccccgcccaccagcccttccaggactgccgtgcccccaggcctttccagcctcccactcacgtctgtggggaacacgggaatgaagaaggttcccaagaagttagaggagattcccccagcctctccggagatggcacagatgaggaagcagtgcctggactatcattaccaggagatgcaggctctgaaggaggtcttcaaggagtatttgattgaactgtttttcttgcaacactttcaagggaacatgatggatttcttagctttcaagaagaaacattatgccccattacaagcatatcttaggcagaatgatttggacattgaagaagaggaggaggaggaggaagaggaggaagaaaaatctgaggttatcaatgacgagcaagccctcgcagggagcctggtagcaggggccggaagcacagtagagacggacctgtttaagaggcagcaggcgatgccctccacaggtatggcaggaggaatgccccccacgccgcaggccgcgcagctcgctggacagaggcagagtcagcagcagtatgacccctccacggggcctcccgtgcagaacgctgccagcttgcacaccccactgccgcagctgcccgggaggctgcccccagccggtgttcccactgcagccctctcctctgcgctgcagtttgcacagcagccgcaagtggtagaggcccagacacagctccaaatcccggtgaagactcagcagcccaatgttcccatccctgcaccgcccagcagccaactccccatccctccctcgcagcctgcacagctggccctccacgttcccacacctggaaaggtgcaggtgcaggcctctcagctttcctccctgccacagatggtagcatcgacaaggctccctgtggaccctgccccgccctgcccacggcctctgcccacctcttctacctcgtccctcgcgcctgtgagtggctccggcccaggaccctcccctgctcgatcctctccagtaaatagaccttcctcagccaccaataaggcactatctccagtcacttcccggaccccaggggtggtggcatctgcccccaccaaaccacagagtcctgctcagaatgccacctcgtcccaagacagttctcaggatacgctgacagaacaaataactctggagaaccaggtgcatcagcgcattgcggagctgaggaaagcaggtctgtggtcccagaggcgtctgccaaagctgcaggaggccccacgccccaagtcccactgggactatctgctggaggagatgcagtggatggccacagactttgcccaggagaggaggtggaaggtggctgctgcgaagaagctcgttagaactgtggtgcgccatcacgaggagaagcagctccgtgaagaaagggggaagaaggaagagcagagcagactgaggcggatagccgcctccacggcccgggagatagagtgcttttggtcgaatattgaacaggttgtggaaataaaactacgagtagaattagaagaaaaaaggaagaaggccttaaatttacagaaagtttccaggagagggaaagaattgagacctaaaggatttgacgcattacaggaaagttctctggattcaggaatgtctggaagaaaaagaaaagctagcatatctttgactgatgacgaagtggacgatgaagaggaaacaattgaagaggaggaagcaaatgaaggcgttgtggaccaccaaacagaactttctaatttagccaaggaagctgagctgcccctcctggacctgatgaagctgtacgaaggcgccttcctgccgagttctcagtggccccggccgaagcctgatggggaggacacaagcggagaggaagatgcagatgactgtccaggcgacagggagagtcgcaaggacttggttctcatcgactcgcttttcatcatggatcagttcaaagctgccgagaggatgaatatcgggaagccaaacgccaaggacattgcggacgtcactgcggtggctgaagccatcctgccgaagggcagtgctcgggtcacaacctcggtcaagtttaatgctccatctttgttgtatggggctctcagagattatcagaagattggcctggactggctggccaaactttacaggaagaatctcaatggcatattggcagatgaagctgggctgggtaaaacagtgcagatcattgctttttttgcccacctagcttgtaacgaaggtaattggggcccccatcttgttgttgtgagaagttgtaacatactcaagtgggagcttgaattgaaacgttggtgtcccggactcaaaatcctctcatatattggcagccacagagaactcaaagcaaagagacaggagtgggccgaacccaacagcttccacgtctgcatcacgtcctacactcagttcttccggggcctcaccgccttcacacgagtgcgctggaagtgcctggtcattgatgagatgcagcgcgtgaagggcatgaccgagaggcactgggaagcggttttcaccctgcagagccaacaacgtctgcttctgatcgactcgccgctgcacaataccttcctggagctctggaccatggtgcacttcctggtcccagggatctccaggccctacctgagctcccctctgagggcccccagtgaagagagccaggattactaccataaagtggtcataaggttacacagggtgacacagccatttattttgaggagaactaagagagatgtggaaaagcaactaacaaagaaatatgagcatgttttgaagtgtcgcctttctaaccgacaaaaagccttatacgaggacgttatcctgcaacctggcactcaggaggccttgaagagcgggcactttgtcaacgtcctgagcatccttgtgcggctgcagcgcatctgcaaccaccctgggctcgtcgagccccggcacccaggctcttcctacgtggcggggccactggagtatccgtccgcatctctaatcctgaaggcactggagagagatttctggaaggaagcagatctttctatgtttgatctcatcggcttagaaaataaaatcactcgtcacgaggcagagttgctgtctaagaaaaagataccgcggaaactcatggaggaaatctccacttcagcagccccagcagcccgaccagcagcagcaaagctgaaggccagcaggttgtttcagcctgtgcagtatggccagaagcccgagggtcgcaccgtggctttccccagcactcacccgccccggacggcagcccccaccacggcctctgctgctccacagggcccgcttcgaggacggccgcccatcgccacgttctctgccaatccggaggcaaaagcagcagcagccccgtttcagacctctcaggcttccgccagtgctccacgacaccagcccgcctcggcctccagcacagccgctagcccggcccatcctgcgaaactgcgggcccagaccacagcacaggcctccaccccaggccagcccccgccccagccccaggccccctcgcacgcggccgggcagagcgcgctgcctcagaggctggtgctcccctcgcaggcccaggcccgcttgcccagtggagaggtagtgaaaatagctcagctggcatccatcacaggaccacagagccgcgtggctcagccagagacgccggtgacactgcagttccagggcagcaagttcaccctgtcacacagccagctccggcagctcacagcgggccagccgctgcagctgcaaggcagcgtcctccagatcgtgtccgcccccgggcagccctaccttcgagcccctggccctgtggtgatgcagaccgtgtctcaggcgggcgctgtgcacggcgccctgggaagcaagcccccggccggcggtcccagccctgcacccttgaccccacaagttggcgttccgggccgcgtggcggtgaatgccttggctgtaggagaacccggaacggcctccaaaccagcttctcccattggagggccgacccaggaggaaaagaccagactcttgaaagagcgcctggatcagatttatttagtcaacgagcggcgctgttctcaagctccagtctatggcagagacttgctaaggatttgtgccctgcctagccatggaagggtacagtggcgtgggtccctggatggccgtcgtgggaaggaggccgggccagcgcacagttacacttcatcctcagaaagtccaagtgagctgatgttgacgctttgtcggtgtggagagtctctgcaggatgttattgacagggtggcctttgtgattcctccggtggtggcagcacccccgtccctacgggtgccgcggccgccacccctgtacagccacagaatgaggatcttgaggcagggcctgagagagcacgctgcgccgtacttccagcagctgcggcagaccacggctccacgcctgctgcagttccctgagctgaggctggtgcagttcgactcagggaagttggaagctttagctatcttgcttcagaaattgaaatctgaaggacgtcgggtgctgattttatcacagatgattcttatgttggacattttagagatgttcttgaacttccattacctcacctatgtaagaatcgatgaaaatgccagcagtgagcaacggcaggaactgatgaggagtttcaacagagacaggcggattttttgtgccattctctccactcacagccgtaccacaggtataaaccttgtagaggcggacaccgtcgtgttttatgacaatgacctgaatccagtgatggatgccaaagctcaggagtggtgcgataggatcgggagatgcaaagacatccacatatacaggcttgtgagtggcaattccattgaagagaaattgttgaaaaatggaactaaagatctgatccgagaagtggctgctcagggaaatgactactccatggctttcttaactcagcgaaccatccaggagctgtttgaagtttattctcccatggatgatgctggcttcccggtcaaagctgaggagtttgtggtgctttctcaggaaccttctgtcacggaaaccattgcacccaaaattgcaagacctttcatagaggccctcaagagtattgagtatctggaggaggatgcccagaagtccgcacaggagggggtgctgggaccacacactgatgctctgtcatcagactctgagaacatgccgtgtgatgaagaaccatcccaattagaggagctagctgacttcatggagcagcttacaccaattgaaaaatatgctttaaattacctggaattattccatacttctattgagcaagaaaaggagagaaacagtgaggacgcagtgatgactgcagtgagggcatgggagttctggaacctgaagaccctgcaggagagggaggcccggctgcggctggagcaggaggaggcggagctcctgacctacacgcgagaggatgcctacagcatggagtatgtctacgaagatgtcgatgggcagacagaagtcatgccgctctggaccccacccaccccgccgcaggacgacagcgacatctacctcgactcggtcatgtgtctcatgtatgaagccactcccatcccagaggctaagctgccccctgtgtacgtgaggaaggagcggaagcgacacaaaacagacccctcagctgcaggcaggaagaagaagcagcgtcacggggaggcggtcgtccctcctcggtccctgtttgaccgcgcaacaccaggacttctgaaaattcgcagagagggcaaggagcagaagaagaatattctgctgaagcagcaggtgccattcgccaagcccctgccaacttttgccaaacccacagctgagcctggtcaagacaaccccgagtggctcatcagtgaggactgggcgctgctgcaggctgtaaagcagttactggagctgcctttgaacctcacaatcgtgtcacctgctcacacacctaattgggatcttgtcagtgacgttgttaactcctgtagccgaatctaccgctcttccaaacagtgccggaatcgctacgagaatgtcatcattccacgagaggaggggaagagtaaaaacaaccgtcctctccgtacgagccagatctatgcccaggatgagaatgccacacacacccagctgtacacgagccactttgacttaatgaaaatgactgctggcaagaggagtcccccaatcaaacctctgcttggcatgaatccctttcagaagaaccccaagcacgcgtctgtgttggcagaaagtggaatcaactatgacaagccgctgcctcccatccaggtggcatctctccgtgcagagcgaatcgcaaaagagaaaaaggctctggctgatcagcagaaggcacagcagccggccgtggcccagccacccccgccccagccgcagcccccaccacccccgcagcagccaccgccaccgctgccacaaccacaggcagcgggcagccagccgccagcagggccaccagctgtccagccccaaccccagccacagccccagacccagccacagcctgtgcaggccccagcgaaggcgcagcccgcaatcacgacggggggcagtgcagccgtactggcaggaaccattaaaacatcagttactgggacgagcatgcccactggtgccgtgagtggaaatgtgatcgtgaacaccatcgcaggggtcccagctgccaccttccagtccatcaacaagcgcctggcgtcgccagtggctcctggggccttgactacgccgggaggctctgctcccgcccaggtggtgcacacccagcccccgccacgggcagtcggctccccagccacggcgacccctgacctggtgtccatggcaacgactcagggtgttcgagcggtcacttctgtgacagcctcggccgtggtcactaccaacctgaccccagtgcagaccccggcacggtctttggtgccccaagtgtcccaagccacaggagttcagctccctggaaaaaccatcacacctgcacatttccagcttctcaggcagcagcagcagcagcagcaacaacagcagcagcagcagcagcagcagcagcagcagcagcagcagcaacagcagcagcagcaacagacgacgacgacctctcaggtgcaagttccacagatccagggccaggcccagtccccagcacagatcaaagctgtgggcaagctgacgccggaacacctcatcaaaatgcagaagcagaaactgcagatgcccccgcagcccccaccgccacaggcccagtctgcgcccccgcagccaacagcccaagtgcaagtgcagacctcgcagccgccgcagcagcagagcccccagctcacgacggtcacggccccaaggcctggtgccctgctgacgggcaccaccgtggccaacctccaggtggcccggctcacccgggttcccacttctcagctgcaggcgcaagggcagatgcagacccaggcaccccagccagcccaggtggccttggcgaagcctccggtggtgtccgtcccggcagctgtggtctcctcaccgggagtcaccaccctgcccatgaacgtcgcggggatcagcgtggcgatcggtcagccacagaaggcagcaggacagaccgtggtggcccagcccgtgcacatgcagcagctgctgaagctgaagcagcaggccgtccagcagcagaaggccatccagccccaggctgcacagggcccggcagccgtccagcagaagatcaccgcacagcagatcaccacccctggcgcgcagcagaaggttgcctacgccgcgcagccggcccttaagacccagtttcttaccacacccatctcccaggcccagaaactggccggggcccagcaagtgcagacccagatccaggttgcaaaacttcctcaagttgttcaacagcaaacacccgtggccagcatccagcaagttgcctctgcttcccagcaggcttctccacagactgtggcgctcacgcaggcgacggcggccgggcagcaggtgcagatgatccctgcagtgaccgcgactgcccaggtggttcagcagaaactcattcagcagcaggtggtgaccacggcgtcggccccgctccagactccaggcgctcccaacccagcccaggtgcccgccagctccgacagcccaagccagcagcccaagttacagatgagggtccctgctgtcaggctaaagacacctactaagcctccgtgccagtagtcagggcagcagggctgcctctcatctaaagcaaaactaccttcctcacagaaaacgctttattagtgaaccttgggaccatgtcacgcaagagattcagcactgggaaagatataattgaaacaaaatagtgtaatcattttattaaaatgcatcccacactgcaggacaaatggtccttatggagtgccgcgttctctgtactacgtggctcatggaaaaagtgacaacatggcttcctctaaatcatttcacctttcagtccccacccgcacccgtcccctagagccatagtactgtgttctgaaagccatttagaatttctttgtgagcatgtagtgctttgcacgccacagaagccgtctgccgtgtgtgaggagcatacaatggactttctaaagataaggcgtgggcttccacagtgtctgccagagtttagttctttataccttactgaaaaatgcctcgtggtcttcgcagaggggaaggcctgtctaaagtcaatcatccgagatgggttttccattccaaagaaaggcaatatggttccttccttccctcctaaaatatgacttaacttttaagagaaatgttctgacacccacctaaacacacaaggcacgttcctggcctgtgttcaagggaaatgatcagtcattgcattgttattccaaagagcagccaacagtggcctcccccaggccctaccctgcaatgggattcgctttcatttaatggaaacttctgggactgatgcccaactcagtgcactcaagacgcatctccagttttcgggggaagctggtatttgacatagtgtgttaaacagctcctgagaacctttgggacactctgccatggctggcgtgaggcccagaggaccacgcagaggcaatggtagtacagatgtcacagctgagggtacgatgaggcctgggctcagtgagccaggacgaatgtgacagacaccccttgctgccacagtcagccctttgacgaaggtgggctggtgattctggaagtattggctatagcggtgggcccagtcaactcttccttgtggacttacgacagcagattttctctaggataagcttgtgtggttctgccagtgaagcagagaaccacctgtgctgttgtggaaggcgtgccgttgagggggaaaacgaagcccagtatttgctactgtttttcctttttttactatgacaggaaaataaatgcaattttagtggaattgattgacagtgtctccttactttgaagttttcaccaaagcaaaaaggtccatatccaatagtatcctttgtgctgtggcttgattttggcctattttacattatttggtccaggaaattaggttatattaggttttttgtatactaaaaatcagttatggcacaataaagattttctgtttttaaattgtatttcatctgcttcctccccattctctcactttaagtgacattgaggaaggtattctgtcccacaggtttctgtggacagcgatacagcaggagtcagtgaaatcaactggggagctcacttgagctcttgataagaaatgtggagaaaagtaaaaaccaagctttgaagaaacagaagaaattaatcttttagttagttgaacataccaaagcagaggactggaatctgtttgttctaaccaacccgttctccctggcttggcacgtgccgtgagagcgcagcttgccggagggagggccgctgtgtgcgcctcacatctggctcccagtggaaacttttactcctcctcatccgcagatgtgatagaactgaagtatctaggaattctgcctttgtcatttgttttaatttgtgtgccctgttcattttttttgtctttcccaaatcttggtagtctccttatagttgaagataaaatgttgagtgcacttattttagaatatcctagacataactgtctaagtaaaagcgctctattaatctaaaacactacaagagaatttaacaccatctctcaaatgcttttttggagagcttaatgggattctgaatatttgcaatgtggagtttccgccccgatctcacgtcagtgagggtctcctgtctctcaagtgtgtttcctttggctgttccctaatacaaaacacggacatatttttactcgtagcactcaatttagtaacttctagatgctaccgttgacctgagttaaattcatttagtcgtgtacgtaaaaactctccttttagtgtgttattttcttggccttcccttttaaaggttaaagtttctaacctaagaattaagtacgcgttcaggaagctgttgtctaggccttccccttgtgaatctgggttcattccaatacggcaagtaagagttggaaactttgagaacacagactataaaggcagcagcccgaacactgtcagactctaattggcgaccctgggaaacagttgccctgctattctttaaagaaagacgtttattctgatgataaaaacagttagccagactgtttttaaagcacctggcgggaagcagaaggttggatccaagcccttgttcagatttggtgcctgataagacaggggtttctctttttgtgacctttattattattattttgttaactgttgtaaccagttagctgttgtgttttaagatagaaaggaacaagactaaaattgtaaatactttgtaaacatcagcatttgtacttgaatagtaggattttaaagggcattgatagcataccaaacaaaaggcaaaataaagtgacctttttatata

SEQ ID NO: 186585 - DNA, 12376 bp, Artificial Sequence
  derived and/or modified sequence
cactgagcggctgcggcgcggcttccatcctcccgccctcctgacgcggccggagcgcagccctgaggcccagggagaacgacacattggatacagaagggaggtgatcatgcaccatggcactggcccccagaacgtccagcatcagctgcagaggtccagggcctgccctggcagcgagggtgaggagcagccggcccaccccaacccacccccgtcccccgcagctcccttcgctccctcagcaagcccgtcggcaccccagtctcccagttatcaaatacagcagctgatgaataggagccctgcaaccgggcagaacgtgaacatcaccctgcagagcgtgggccctgtcgtcgggggaaaccagcagatcacactggccccactgccgctccccagccccacctctccaggcttccagttcagcgctcagcctcggcggtttgagcatgggtctccatcatacattcaggtcacgtcccccttgtcccagcaggtccagacccagagtcccacgcagcccagtccggggccggggcaggccttgcagaatgtgcgtgcaggtgcccctggccctgggctgggcctctgcagcagcagccctacagggggcttcgtggatgccagcgtgctggtgaggcagatcagcttgagcccctccagtggtggacactttgtgtttcaggatgggtcagggctcacccagatcgcccagggagcccaggttcagctccagcacccgggtacgcccatcacagtccgagagcggagaccctcccagccccacacacagtcagggggcaccatccaccacctgggaccccagagccctgcagccgcgggtggggccggcctgcagcccctggccagcccaagccacatcaccacggctaacttgccaccgcagatcagcagcatcatccagggccagctggttcagcagcagcaggtgctgcaggggccgccgctgccccggcccctgggcttcgagaggacacccggcgtgctgctccccggggctgggggcgcagcggggtttgggatgacgtccccacccccgcccaccagcccttccaggactgccgtgcccccaggcctttccagcctcccactcacgtctgtggggaacacgggaatgaagaaggttcccaagaagttagaggagattcccccagcctctccggagatggcacagatgaggaagcagtgcctggactatcattaccaggagatgcaggctctgaaggaggtcttcaaggagtatttgattgaactgtttttcttgcaacactttcaagggaacatgatggatttcttagctttcaagaagaaacattatgccccattacaagcatatcttaggcagaatgatttggacattgaagaagaggaggaggaggaggaagaggaggaagaaaaatctgaggttatcaatgacgaggtaaaggttgtgacaggaaaggatgggcagactgggactcccgttgctatagcaacccagcttccgccaaaggtttctgctgctttttcatcccagcagcaaccatttcagcaagccctcgcagggagcctggtagcaggggccggaagcacagtagagacggacctgtttaagaggcagcaggcgatgccctccacaggtatggcagagcagtctaagaggcctcgccttgaagtgggtcaccaaggggtagttttccagcacccaggggcggacgcaggcgttcctctccagcaactaatgccgaccgcacaaggaggaatgccccccacgccgcaggccgcgcagctcgctggacagaggcagagtcagcagcagtatgacccctccacggggcctcccgtgcagaacgctgccagcttgcacaccccactgccgcagctgcccgggaggctgcccccagccggtgttcccactgcagccctctcctctgcgctgcagtttgcacagcagccgcaagtggtagaggcccagacacagctccaaatcccggtgaagactcagcagcccaatgttcccatccctgcaccgcccagcagccaactccccatccctccctcgcagcctgcacagctggccctccacgttcccacacctggaaaggtgcaggtgcaggcctctcagctttcctccctgccacagatggtagcatcgacaaggctccctgtggaccctgccccgccctgcccacggcctctgcccacctcttctacctcgtccctcgcgcctgtgagtggctccggcccaggaccctcccctgctcgatcctctccagtaaatagaccttcctcagccaccaataaggcactatctccagtcacttcccggaccccaggggtggtggcatctgcccccaccaaaccacagagtcctgctcagaatgccacctcgtcccaagacagttctcaggatacgctgacagaacaaataactctggagaaccaggtgcatcagcgcattgcggagctgaggaaagcaggtctgtggtcccagaggcgtctgccaaagctgcaggaggccccacgccccaagtcccactgggactatctgctggaggagatgcagtggatggccacagactttgcccaggagaggaggtggaaggtggctgctgcgaagaagctcgttagaactgtggtgcgccatcacgaggagaagcagctccgtgaagaaagggggaagaaggaagagcagagcagactgaggcggatagccgcctccacggcccgggagatagagtgcttttggtcgaatattgaacaggttgtggaaataaaactacgagtagaattagaagaaaaaaggaagaaggccttaaatttacagaaagtttccaggagagggaaagaattgagacctaaaggatttgacgcattacaggaaagttctctggattcaggaatgtctggaagaaaaagaaaagctagcatatctttgactgatgacgaagtggacgatgaagaggaaacaattgaagaggaggaagcaaatgaaggcgttgtggaccaccaaacagaactttctaatttagccaaggaagctgagctgcccctcctggacctgatgaagctgtacgaaggcgccttcctgccgagttctcagtggccccggccgaagcctgatggggaggacacaagcggagaggaagatgcagatgactgtccaggcgacagggagagtcgcaaggacttggttctcatcgactcgcttttcatcatggatcagttcaaagctgccgagaggatgaatatcgggaagccaaacgccaaggacattgcggacgtcactgcggtggctgaagccatcctgccgaagggcagtgctcgggtcacaacctcggtcaagtttaatgctccatctttgttgtatggggctctcagagattatcagaagattggcctggactggctggccaaactttacaggaagaatctcaatggcatattggcagatgaagctgggctgggtaaaacagtgcagatcattgctttttttgcccacctagcttgtaacgaaggtaattggggcccccatcttgttgttgtgagaagttgtaacatactcaagtgggagcttgaattgaaacgttggtgtcccggactcaaaatcctctcatatattggcagccacagagaactcaaagcaaagagacaggagtgggccgaacccaacagcttccacgtctgcatcacgtcctacactcagttcttccggggcctcaccgccttcacacgagtgcgctggaagtgcctggtcattgatgagatgcagcgcgtgaagggcatgaccgagaggcactgggaagcggttttcaccctgcagagccaacaacgtctgcttctgatcgactcgccgctgcacaataccttcctggagctctggaccatggtgcacttcctggtcccagggatctccaggccctacctgagctcccctctgagggcccccagtgaagagagccaggattactaccataaagtggtcataaggttacacagggtgacacagccatttattttgaggagaactaagagagatgtggaaaagcaactaacaaagaaatatgagcatgttttgaagtgtcgcctttctaaccgacaaaaagccttatacgaggacgttatcctgcaacctggcactcaggaggccttgaagagcgggcactttgtcaacgtcctgagcatccttgtgcggctgcagcgcatctgcaaccaccctgggctcgtcgagccccggcacccaggctcttcctacgtggcggggccactggagtatccgtccgcatctctaatcctgaaggcactggagagagatttctggaaggaagcagatctttctatgtttgatctcatcggcttagaaaataaaatcactcgtcacgaggcagagttgctgtctaagaaaaagataccgcggaaactcatggaggaaatctccacttcagcagccccagcagcccgaccagcagcagcaaagctgaaggccagcaggttgtttcagcctgtgcagtatggccagaagcccgagggtcgcaccgtggctttccccagcactcacccgccccggacggcagcccccaccacggcctctgctgctccacagggcccgcttcgaggacggccgcccatcgccacgttctctgccaatccggaggcaaaagcagcagcagccccgtttcagacctctcaggcttccgccagtgctccacgacaccagcccgcctcggcctccagcacagccgctagcccggcccatcctgcgaaactgcgggcccagaccacagcacaggcctccaccccaggccagcccccgccccagccccaggccccctcgcacgcggccgggcagagcgcgctgcctcagaggctggtgctcccctcgcaggcccaggcccgcttgcccagtggagaggtagtgaaaatagctcagctggcatccatcacaggaccacagagccgcgtggctcagccagagacgccggtgacactgcagttccagggcagcaagttcaccctgtcacacagccagctccggcagctcacagcgggccagccgctgcagctgcaaggcagcgtcctccagatcgtgtccgcccccgggcagccctaccttcgagcccctggccctgtggtgatgcagaccgtgtctcaggcgggcgctgtgcacggcgccctgggaagcaagcccccggccggcggtcccagccctgcacccttgaccccacaagttggcgttccgggccgcgtggcggtgaatgccttggctgtaggagaacccggaacggcctccaaaccagcttctcccattggagggccgacccaggaggaaaagaccagactcttgaaagagcgcctggatcagatttatttagtcaacgagcggcgctgttctcaagctccagtctatggcagagacttgctaaggatttgtgccctgcctagccatggaagggtacagtggcgtgggtccctggatggccgtcgtgggaaggaggccgggccagcgcacagttacacttcatcctcagaaagtccaagtgagctgatgttgacgctttgtcggtgtggagagtctctgcaggatgttattgacagggtggcctttgtgattcctccggtggtggcagcacccccgtccctacgggtgccgcggccgccacccctgtacagccacagaatgaggatcttgaggcagggcctgagagagcacgctgcgccgtacttccagcagctgcggcagaccacggctccacgcctgctgcagttccctgagctgaggctggtgcagttcgactcagggaagttggaagctttagctatcttgcttcagaaattgaaatctgaaggacgtcgggtgctgattttatcacagatgattcttatgttggacattttagagatgttcttgaacttccattacctcacctatgtaagaatcgatgaaaatgccagcagtgagcaacggcaggaactgatgaggagtttcaacagagacaggcggattttttgtgccattctctccactcacagccgtaccacaggtataaaccttgtagaggcggacaccgtcgtgttttatgacaatgacctgaatccagtgatggatgccaaagctcaggagtggtgcgataggatcgggagatgcaaagacatccacatatacaggcttgtgagtggcaattccattgaagagaaattgttgaaaaatggaactaaagatctgatccgagaagtggctgctcagggaaatgactactccatggctttcttaactcagcgaaccatccaggagctgtttgaagtttattctcccatggatgatgctggcttcccggtcaaagctgaggagtttgtggtgctttctcaggaaccttctgtcacggaaaccattgcacccaaaattgcaagacctttcatagaggccctcaagagtattgagtatctggaggaggatgcccagaagtccgcacaggagggggtgctgggaccacacactgatgctctgtcatcagactctgagaacatgccgtgtgatgaagaaccatcccaattagaggagctagctgacttcatggagcagcttacaccaattgaaaaatatgctttaaattacctggaattattccatacttctattgagcaagaaaaggagagaaacagtgaggacgcagtgatgactgcagtgagggcatgggagttctggaacctgaagaccctgcaggagagggaggcccggctgcggctggagcaggaggaggcggagctcctgacctacacgcgagaggatgcctacagcatggagtatgtctacgaagatgtcgatgggcagacagaagtcatgccgctctggaccccacccaccccgccgcaggacgacagcgacatctacctcgactcggtcatgtgtctcatgtatgaagccactcccatcccagaggctaagctgccccctgtgtacgtgaggaaggagcggaagcgacacaaaacagacccctcagctgcaggcaggaagaagaagcagcgtcacggggaggcggtcgtccctcctcggtccctgtttgaccgcgcaacaccaggacttctgaaaattcgcagagagggcaaggagcagaagaagaatattctgctgaagcagcaggtgccattcgccaagcccctgccaacttttgccaaacccacagctgagcctggtcaagacaaccccgagtggctcatcagtgaggactgggcgctgctgcaggctgtaaagcagttactggagctgcctttgaacctcacaatcgtgtcacctgctcacacacctaattgggatcttgtcagtgacgttgttaactcctgtagccgaatctaccgctcttccaaacagtgccggaatcgctacgagaatgtcatcattccacgagaggaggggaagagtaaaaacaaccgtcctctccgtacgagccagatctatgcccaggatgagaatgccacacacacccagctgtacacgagccactttgacttaatgaaaatgactgctggcaagaggagtcccccaatcaaacctctgcttggcatgaatccctttcagaagaaccccaagcacgcgtctgtgttggcagaaagtggaatcaactatgacaagccgctgcctcccatccaggtggcatctctccgtgcagagcgaatcgcaaaagagaaaaaggctctggctgatcagcagaaggcacagcagccggccgtggcccagccacccccgccccagccgcagcccccaccacccccgcagcagccaccgccaccgctgccacaaccacaggcagcgggcagccagccgccagcagggccaccagctgtccagccccaaccccagccacagccccagacccagccacagcctgtgcaggccccagcgaaggcgcagcccgcaatcacgacggggggcagtgcagccgtactggcaggaaccattaaaacatcagttactgggacgagcatgcccactggtgccgtgagtggaaatgtgatcgtgaacaccatcgcaggggtcccagctgccaccttccagtccatcaacaagcgcctggcgtcgccagtggctcctggggccttgactacgccgggaggctctgctcccgcccaggtggtgcacacccagcccccgccacgggcagtcggctccccagccacggcgacccctgacctggtgtccatggcaacgactcagggtgttcgagcggtcacttctgtgacagcctcggccgtggtcactaccaacctgaccccagtgcagaccccggcacggtctttggtgccccaagtgtcccaagccacaggagttcagctccctggaaaaaccatcacacctgcacatttccagcttctcaggcagcagcagcagcagcagcaacaacagcagcagcagcagcagcagcagcagcagcagcagcagcagcaacagcagcagcagcaacagacgacgacgacctctcaggtgcaagttccacagatccagggccaggcccagtccccagcacagatcaaagctgtgggcaagctgacgccggaacacctcatcaaaatgcagaagcagaaactgcagatgcccccgcagcccccaccgccacaggcccagtctgcgcccccgcagccaacagcccaagtgcaagtgcagacctcgcagccgccgcagcagcagagcccccagctcacgacggtcacggccccaaggcctggtgccctgctgacgggcaccaccgtggccaacctccaggtggcccggctcacccgggttcccacttctcagctgcaggcgcaagggcagatgcagacccaggcaccccagccagcccaggtggccttggcgaagcctccggtggtgtccgtcccggcagctgtggtctcctcaccgggagtcaccaccctgcccatgaacgtcgcggggatcagcgtggcgatcggtcagccacagaaggcagcaggacagaccgtggtggcccagcccgtgcacatgcagcagctgctgaagctgaagcagcaggccgtccagcagcagaaggccatccagccccaggctgcacagggcccggcagccgtccagcagaagatcaccgcacagcagatcaccacccctggcgcgcagcagaaggttgcctacgccgcgcagccggcccttaagacccagtttcttaccacacccatctcccaggcccagaaactggccggggcccagcaagtgcagacccagatccaggttgcaaaacttcctcaagttgttcaacagcaaacacccgtggccagcatccagcaagttgcctctgcttcccagcaggcttctccacagactgtggcgctcacgcaggcgacggcggccgggcagcaggtgcagatgatccctgcagtgaccgcgactgcccaggtggttcagcagaaactcattcagcagcaggtggtgaccacggcgtcggccccgctccagactccaggcgctcccaacccagcccaggtgcccgccagctccgacagcccaagccagcagcccaagttacagatgagggtccctgctgtcaggctaaagacacctactaagcctccgtgccagtagtcagggcagcagggctgcctctcatctaaagcaaaactaccttcctcacagaaaacgctttattagtgaaccttgggaccatgtcacgcaagagattcagcactgggaaagatataattgaaacaaaatagtgtaatcattttattaaaatgcatcccacactgcaggacaaatggtccttatggagtgccgcgttctctgtactacgtggctcatggaaaaagtgacaacatggcttcctctaaatcatttcacctttcagtccccacccgcacccgtcccctagagccatagtactgtgttctgaaagccatttagaatttctttgtgagcatgtagtgctttgcacgccacagaagccgtctgccgtgtgtgaggagcatacaatggactttctaaagataaggcgtgggcttccacagtgtctgccagagtttagttctttataccttactgaaaaatgcctcgtggtcttcgcagaggggaaggcctgtctaaagtcaatcatccgagatgggttttccattccaaagaaaggcaatatggttccttccttccctcctaaaatatgacttaacttttaagagaaatgttctgacacccacctaaacacacaaggcacgttcctggcctgtgttcaagggaaatgatcagtcattgcattgttattccaaagagcagccaacagtggcctcccccaggccctaccctgcaatgggattcgctttcatttaatggaaacttctgggactgatgcccaactcagtgcactcaagacgcatctccagttttcgggggaagctggtatttgacatagtgtgttaaacagctcctgagaacctttgggacactctgccatggctggcgtgaggcccagaggaccacgcagaggcaatggtagtacagatgtcacagctgagggtacgatgaggcctgggctcagtgagccaggacgaatgtgacagacaccccttgctgccacagtcagccctttgacgaaggtgggctggtgattctggaagtattggctatagcggtgggcccagtcaactcttccttgtggacttacgacagcagattttctctaggataagcttgtgtggttctgccagtgaagcagagaaccacctgtgctgttgtggaaggcgtgccgttgagggggaaaacgaagcccagtatttgctactgtttttcctttttttactatgacaggaaaataaatgcaattttagtggaattgattgacagtgtctccttactttgaagttttcaccaaagcaaaaaggtccatatccaatagtatcctttgtgctgtggcttgattttggcctattttacattatttggtccaggaaattaggttatattaggttttttgtatactaaaaatcagttatggcacaataaagattttctgtttttaaattgtatttcatctgcttcctccccattctctcactttaagtgacattgaggaaggtattctgtcccacaggtttctgtggacagcgatacagcaggagtcagtgaaatcaactggggagctcacttgagctcttgataagaaatgtggagaaaagtaaaaaccaagctttgaagaaacagaagaaattaatcttttagttagttgaacataccaaagcagaggactggaatctgtttgttctaaccaacccgttctccctggcttggcacgtgccgtgagagcgcagcttgccggagggagggccgctgtgtgcgcctcacatctggctcccagtggaaacttttactcctcctcatccgcagatgtgatagaactgaagtatctaggaattctgcctttgtcatttgttttaatttgtgtgccctgttcattttttttgtctttcccaaatcttggtagtctccttatagttgaagataaaatgttgagtgcacttattttagaatatcctagacataactgtctaagtaaaagcgctctattaatctaaaacactacaagagaatttaacaccatctctcaaatgcttttttggagagcttaatgggattctgaatatttgcaatgtggagtttccgccccgatctcacgtcagtgagggtctcctgtctctcaagtgtgtttcctttggctgttccctaatacaaaacacggacatatttttactcgtagcactcaatttagtaacttctagatgctaccgttgacctgagttaaattcatttagtcgtgtacgtaaaaactctccttttagtgtgttattttcttggccttcccttttaaaggttaaagtttctaacctaagaattaagtacgcgttcaggaagctgttgtctaggccttccccttgtgaatctgggttcattccaatacggcaagtaagagttggaaactttgagaacacagactataaaggcagcagcccgaacactgtcagactctaattggcgaccctgggaaacagttgccctgctattctttaaagaaagacgtttattctgatgataaaaacagttagccagactgtttttaaagcacctggcgggaagcagaaggttggatccaagcccttgttcagatttggtgcctgataagacaggggtttctctttttgtgacctttattattattattttgttaactgttgtaaccagttagctgttgtgttttaagatagaaaggaacaagactaaaattgtaaatactttgtaaacatcagcatttgtacttgaatagtaggattttaaagggcattgatagcataccaaacaaaaggcaaaataaagtgacctttttatata

SEQ ID NO: 186586 - DNA, 12268 bp, Artificial Sequence
  derived and/or modified sequence
cactgagcggctgcggcgcggcttccatcctcccgccctcctgacgcggccggagcgcagccctgaggcccagggagaacgacacattggatacagaagggaggtgatcatgcaccatggcactggcccccagaacgtccagcatcagctgcagaggtccagggcctgccctggcagcgagggtgaggagcagccggcccaccccaacccacccccgtcccccgcagctcccttcgctccctcagcaagcccgtcggcaccccagtctcccagttatcaaatacagcagctgatgaataggagccctgcaaccgggcagaacgtgaacatcaccctgcagagcgtgggccctgtcgtcgggggaaaccagcagatcacactggccccactgccgctccccagccccacctctccaggcttccagttcagcgctcagcctcggcggtttgagcatgggtctccatcatacattcaggtcacgtcccccttgtcccagcaggtccagacccagagtcccacgcagcccagtccggggccggggcaggccttgcagaatgtgcgtgcaggtgcccctggccctgggctgggcctctgcagcagcagccctacagggggcttcgtggatgccagcgtgctggtgaggcagatcagcttgagcccctccagtggtggacactttgtgtttcaggatgggtcagggctcacccagatcgcccagggagcccaggttcagctccagcacccgggtacgcccatcacagtccgagagcggagaccctcccagccccacacacagtcagggggcaccatccaccacctgggaccccagagccctgcagccgcgggtggggccggcctgcagcccctggccagcccaagccacatcaccacggctaacttgccaccgcagatcagcagcatcatccagggccagctggttcagcagcagcaggtgctgcaggggccgccgctgccccggcccctgggcttcgagaggacacccggcgtgctgctccccggggctgggggcgcagcggggtttgggatgacgtccccacccccgcccaccagcccttccaggactgccgtgcccccaggcctttccagcctcccactcacgtctgtggggaacacgggaatgaagaaggttcccaagaagttagaggagattcccccagcctctccggagatggcacagatgaggaagcagtgcctggactatcattaccaggagatgcaggctctgaaggaggtcttcaaggagtatttgattgaactgtttttcttgcaacactttcaagggaacatgatggatttcttagctttcaagaagaaacattatgccccattacaagcatatcttaggcagaatgatttggacattgaagaagaggaggaggaggaggaagaggaggaagaaaaatctgaggttatcaatgacgagcagcaagccctcgcagggagcctggtagcaggggccggaagcacagtagagacggacctgtttaagaggcagcaggcgatgccctccacaggtatggcagagcagtctaagaggcctcgccttgaagtgggtcaccaaggggtagttttccagcacccaggggcggacgcaggcgttcctctccagcaactaatgccgaccgcacaaggaggaatgccccccacgccgcaggccgcgcagctcgctggacagaggcagagtcagcagcagtatgacccctccacggggcctcccgtgcagaacgctgccagcttgcacaccccactgccgcagctgcccgggaggctgcccccagccggtgttcccactgcagccctctcctctgcgctgcagtttgcacagcagccgcaagtggtagaggcccagacacagctccaaatcccggtgaagactcagcagcccaatgttcccatccctgcaccgcccagcagccaactccccatccctccctcgcagcctgcacagctggccctccacgttcccacacctggaaaggtgcaggtgcaggcctctcagctttcctccctgccacagatggtagcatcgacaaggctccctgtggaccctgccccgccctgcccacggcctctgcccacctcttctacctcgtccctcgcgcctgtgagtggctccggcccaggaccctcccctgctcgatcctctccagtaaatagaccttcctcagccaccaataaggcactatctccagtcacttcccggaccccaggggtggtggcatctgcccccaccaaaccacagagtcctgctcagaatgccacctcgtcccaagacagttctcaggatacgctgacagaacaaataactctggagaaccaggtgcatcagcgcattgcggagctgaggaaagcaggtctgtggtcccagaggcgtctgccaaagctgcaggaggccccacgccccaagtcccactgggactatctgctggaggagatgcagtggatggccacagactttgcccaggagaggaggtggaaggtggctgctgcgaagaagctcgttagaactgtggtgcgccatcacgaggagaagcagctccgtgaagaaagggggaagaaggaagagcagagcagactgaggcggatagccgcctccacggcccgggagatagagtgcttttggtcgaatattgaacaggttgtggaaataaaactacgagtagaattagaagaaaaaaggaagaaggccttaaatttacagaaagtttccaggagagggaaagaattgagacctaaaggatttgacgcattacaggaaagttctctggattcaggaatgtctggaagaaaaagaaaagctagcatatctttgactgatgacgaagtggacgatgaagaggaaacaattgaagaggaggaagcaaatgaaggcgttgtggaccaccaaacagaactttctaatttagccaaggaagctgagctgcccctcctggacctgatgaagctgtacgaaggcgccttcctgccgagttctcagtggccccggccgaagcctgatggggaggacacaagcggagaggaagatgcagatgactgtccaggcgacagggagagtcgcaaggacttggttctcatcgactcgcttttcatcatggatcagttcaaagctgccgagaggatgaatatcgggaagccaaacgccaaggacattgcggacgtcactgcggtggctgaagccatcctgccgaagggcagtgctcgggtcacaacctcggtcaagtttaatgctccatctttgttgtatggggctctcagagattatcagaagattggcctggactggctggccaaactttacaggaagaatctcaatggcatattggcagatgaagctgggctgggtaaaacagtgcagatcattgctttttttgcccacctagcttgtaacgaaggtaattggggcccccatcttgttgttgtgagaagttgtaacatactcaagtgggagcttgaattgaaacgttggtgtcccggactcaaaatcctctcatatattggcagccacagagaactcaaagcaaagagacaggagtgggccgaacccaacagcttccacgtctgcatcacgtcctacactcagttcttccggggcctcaccgccttcacacgagtgcgctggaagtgcctggtcattgatgagatgcagcgcgtgaagggcatgaccgagaggcactgggaagcggttttcaccctgcagagccaacaacgtctgcttctgatcgactcgccgctgcacaataccttcctggagctctggaccatggtgcacttcctggtcccagggatctccaggccctacctgagctcccctctgagggcccccagtgaagagagccaggattactaccataaagtggtcataaggttacacagggtgacacagccatttattttgaggagaactaagagagatgtggaaaagcaactaacaaagaaatatgagcatgttttgaagtgtcgcctttctaaccgacaaaaagccttatacgaggacgttatcctgcaacctggcactcaggaggccttgaagagcgggcactttgtcaacgtcctgagcatccttgtgcggctgcagcgcatctgcaaccaccctgggctcgtcgagccccggcacccaggctcttcctacgtggcggggccactggagtatccgtccgcatctctaatcctgaaggcactggagagagatttctggaaggaagcagatctttctatgtttgatctcatcggcttagaaaataaaatcactcgtcacgaggcagagttgctgtctaagaaaaagataccgcggaaactcatggaggaaatctccacttcagcagccccagcagcccgaccagcagcagcaaagctgaaggccagcaggttgtttcagcctgtgcagtatggccagaagcccgagggtcgcaccgtggctttccccagcactcacccgccccggacggcagcccccaccacggcctctgctgctccacagggcccgcttcgaggacggccgcccatcgccacgttctctgccaatccggaggcaaaagcagcagcagccccgtttcagacctctcaggcttccgccagtgctccacgacaccagcccgcctcggcctccagcacagccgctagcccggcccatcctgcgaaactgcgggcccagaccacagcacaggcctccaccccaggccagcccccgccccagccccaggccccctcgcacgcggccgggcagagcgcgctgcctcagaggctggtgctcccctcgcaggcccaggcccgcttgcccagtggagaggtagtgaaaatagctcagctggcatccatcacaggaccacagagccgcgtggctcagccagagacgccggtgacactgcagttccagggcagcaagttcaccctgtcacacagccagctccggcagctcacagcgggccagccgctgcagctgcaaggcagcgtcctccagatcgtgtccgcccccgggcagccctaccttcgagcccctggccctgtggtgatgcagaccgtgtctcaggcgggcgctgtgcacggcgccctgggaagcaagcccccggccggcggtcccagccctgcacccttgaccccacaagttggcgttccgggccgcgtggcggtgaatgccttggctgtaggagaacccggaacggcctccaaaccagcttctcccattggagggccgacccaggaggaaaagaccagactcttgaaagagcgcctggatcagatttatttagtcaacgagcggcgctgttctcaagctccagtctatggcagagacttgctaaggatttgtgccctgcctagccatggaagggtacagtggcgtgggtccctggatggccgtcgtgggaaggaggccgggccagcgcacagttacacttcatcctcagaaagtccaagtgagctgatgttgacgctttgtcggtgtggagagtctctgcaggatgttattgacagggtggcctttgtgattcctccggtggtggcagcacccccgtccctacgggtgccgcggccgccacccctgtacagccacagaatgaggatcttgaggcagggcctgagagagcacgctgcgccgtacttccagcagctgcggcagaccacggctccacgcctgctgcagttccctgagctgaggctggtgcagttcgactcagggaagttggaagctttagctatcttgcttcagaaattgaaatctgaaggacgtcgggtgctgattttatcacagatgattcttatgttggacattttagagatgttcttgaacttccattacctcacctatgtaagaatcgatgaaaatgccagcagtgagcaacggcaggaactgatgaggagtttcaacagagacaggcggattttttgtgccattctctccactcacagccgtaccacaggtataaaccttgtagaggcggacaccgtcgtgttttatgacaatgacctgaatccagtgatggatgccaaagctcaggagtggtgcgataggatcgggagatgcaaagacatccacatatacaggcttgtgagtggcaattccattgaagagaaattgttgaaaaatggaactaaagatctgatccgagaagtggctgctcagggaaatgactactccatggctttcttaactcagcgaaccatccaggagctgtttgaagtttattctcccatggatgatgctggcttcccggtcaaagctgaggagtttgtggtgctttctcaggaaccttctgtcacggaaaccattgcacccaaaattgcaagacctttcatagaggccctcaagagtattgagtatctggaggaggatgcccagaagtccgcacaggagggggtgctgggaccacacactgatgctctgtcatcagactctgagaacatgccgtgtgatgaagaaccatcccaattagaggagctagctgacttcatggagcagcttacaccaattgaaaaatatgctttaaattacctggaattattccatacttctattgagcaagaaaaggagagaaacagtgaggacgcagtgatgactgcagtgagggcatgggagttctggaacctgaagaccctgcaggagagggaggcccggctgcggctggagcaggaggaggcggagctcctgacctacacgcgagaggatgcctacagcatggagtatgtctacgaagatgtcgatgggcagacagaagtcatgccgctctggaccccacccaccccgccgcaggacgacagcgacatctacctcgactcggtcatgtgtctcatgtatgaagccactcccatcccagaggctaagctgccccctgtgtacgtgaggaaggagcggaagcgacacaaaacagacccctcagctgcaggcaggaagaagaagcagcgtcacggggaggcggtcgtccctcctcggtccctgtttgaccgcgcaacaccaggacttctgaaaattcgcagagagggcaaggagcagaagaagaatattctgctgaagcagcaggtgccattcgccaagcccctgccaacttttgccaaacccacagctgagcctggtcaagacaaccccgagtggctcatcagtgaggactgggcgctgctgcaggctgtaaagcagttactggagctgcctttgaacctcacaatcgtgtcacctgctcacacacctaattgggatcttgtcagtgacgttgttaactcctgtagccgaatctaccgctcttccaaacagtgccggaatcgctacgagaatgtcatcattccacgagaggaggggaagagtaaaaacaaccgtcctctccgtacgagccagatctatgcccaggatgagaatgccacacacacccagctgtacacgagccactttgacttaatgaaaatgactgctggcaagaggagtcccccaatcaaacctctgcttggcatgaatccctttcagaagaaccccaagcacgcgtctgtgttggcagaaagtggaatcaactatgacaagccgctgcctcccatccaggtggcatctctccgtgcagagcgaatcgcaaaagagaaaaaggctctggctgatcagcagaaggcacagcagccggccgtggcccagccacccccgccccagccgcagcccccaccacccccgcagcagccaccgccaccgctgccacaaccacaggcagcgggcagccagccgccagcagggccaccagctgtccagccccaaccccagccacagccccagacccagccacagcctgtgcaggccccagcgaaggcgcagcccgcaatcacgacggggggcagtgcagccgtactggcaggaaccattaaaacatcagttactgggacgagcatgcccactggtgccgtgagtggaaatgtgatcgtgaacaccatcgcaggggtcccagctgccaccttccagtccatcaacaagcgcctggcgtcgccagtggctcctggggccttgactacgccgggaggctctgctcccgcccaggtggtgcacacccagcccccgccacgggcagtcggctccccagccacggcgacccctgacctggtgtccatggcaacgactcagggtgttcgagcggtcacttctgtgacagcctcggccgtggtcactaccaacctgaccccagtgcagaccccggcacggtctttggtgccccaagtgtcccaagccacaggagttcagctccctggaaaaaccatcacacctgcacatttccagcttctcaggcagcagcagcagcagcagcaacaacagcagcagcagcagcagcagcagcagcagcagcagcagcagcaacagcagcagcagcaacagacgacgacgacctctcaggtgcaagttccacagatccagggccaggcccagtccccagcacagatcaaagctgtgggcaagctgacgccggaacacctcatcaaaatgcagaagcagaaactgcagatgcccccgcagcccccaccgccacaggcccagtctgcgcccccgcagccaacagcccaagtgcaagtgcagacctcgcagccgccgcagcagcagagcccccagctcacgacggtcacggccccaaggcctggtgccctgctgacgggcaccaccgtggccaacctccaggtggcccggctcacccgggttcccacttctcagctgcaggcgcaagggcagatgcagacccaggcaccccagccagcccaggtggccttggcgaagcctccggtggtgtccgtcccggcagctgtggtctcctcaccgggagtcaccaccctgcccatgaacgtcgcggggatcagcgtggcgatcggtcagccacagaaggcagcaggacagaccgtggtggcccagcccgtgcacatgcagcagctgctgaagctgaagcagcaggccgtccagcagcagaaggccatccagccccaggctgcacagggcccggcagccgtccagcagaagatcaccgcacagcagatcaccacccctggcgcgcagcagaaggttgcctacgccgcgcagccggcccttaagacccagtttcttaccacacccatctcccaggcccagaaactggccggggcccagcaagtgcagacccagatccaggttgcaaaacttcctcaagttgttcaacagcaaacacccgtggccagcatccagcaagttgcctctgcttcccagcaggcttctccacagactgtggcgctcacgcaggcgacggcggccgggcagcaggtgcagatgatccctgcagtgaccgcgactgcccaggtggttcagcagaaactcattcagcagcaggtggtgaccacggcgtcggccccgctccagactccaggcgctcccaacccagcccaggtgcccgccagctccgacagcccaagccagcagcccaagttacagatgagggtccctgctgtcaggctaaagacacctactaagcctccgtgccagtagtcagggcagcagggctgcctctcatctaaagcaaaactaccttcctcacagaaaacgctttattagtgaaccttgggaccatgtcacgcaagagattcagcactgggaaagatataattgaaacaaaatagtgtaatcattttattaaaatgcatcccacactgcaggacaaatggtccttatggagtgccgcgttctctgtactacgtggctcatggaaaaagtgacaacatggcttcctctaaatcatttcacctttcagtccccacccgcacccgtcccctagagccatagtactgtgttctgaaagccatttagaatttctttgtgagcatgtagtgctttgcacgccacagaagccgtctgccgtgtgtgaggagcatacaatggactttctaaagataaggcgtgggcttccacagtgtctgccagagtttagttctttataccttactgaaaaatgcctcgtggtcttcgcagaggggaaggcctgtctaaagtcaatcatccgagatgggttttccattccaaagaaaggcaatatggttccttccttccctcctaaaatatgacttaacttttaagagaaatgttctgacacccacctaaacacacaaggcacgttcctggcctgtgttcaagggaaatgatcagtcattgcattgttattccaaagagcagccaacagtggcctcccccaggccctaccctgcaatgggattcgctttcatttaatggaaacttctgggactgatgcccaactcagtgcactcaagacgcatctccagttttcgggggaagctggtatttgacatagtgtgttaaacagctcctgagaacctttgggacactctgccatggctggcgtgaggcccagaggaccacgcagaggcaatggtagtacagatgtcacagctgagggtacgatgaggcctgggctcagtgagccaggacgaatgtgacagacaccccttgctgccacagtcagccctttgacgaaggtgggctggtgattctggaagtattggctatagcggtgggcccagtcaactcttccttgtggacttacgacagcagattttctctaggataagcttgtgtggttctgccagtgaagcagagaaccacctgtgctgttgtggaaggcgtgccgttgagggggaaaacgaagcccagtatttgctactgtttttcctttttttactatgacaggaaaataaatgcaattttagtggaattgattgacagtgtctccttactttgaagttttcaccaaagcaaaaaggtccatatccaatagtatcctttgtgctgtggcttgattttggcctattttacattatttggtccaggaaattaggttatattaggttttttgtatactaaaaatcagttatggcacaataaagattttctgtttttaaattgtatttcatctgcttcctccccattctctcactttaagtgacattgaggaaggtattctgtcccacaggtttctgtggacagcgatacagcaggagtcagtgaaatcaactggggagctcacttgagctcttgataagaaatgtggagaaaagtaaaaaccaagctttgaagaaacagaagaaattaatcttttagttagttgaacataccaaagcagaggactggaatctgtttgttctaaccaacccgttctccctggcttggcacgtgccgtgagagcgcagcttgccggagggagggccgctgtgtgcgcctcacatctggctcccagtggaaacttttactcctcctcatccgcagatgtgatagaactgaagtatctaggaattctgcctttgtcatttgttttaatttgtgtgccctgttcattttttttgtctttcccaaatcttggtagtctccttatagttgaagataaaatgttgagtgcacttattttagaatatcctagacataactgtctaagtaaaagcgctctattaatctaaaacactacaagagaatttaacaccatctctcaaatgcttttttggagagcttaatgggattctgaatatttgcaatgtggagtttccgccccgatctcacgtcagtgagggtctcctgtctctcaagtgtgtttcctttggctgttccctaatacaaaacacggacatatttttactcgtagcactcaatttagtaacttctagatgctaccgttgacctgagttaaattcatttagtcgtgtacgtaaaaactctccttttagtgtgttattttcttggccttcccttttaaaggttaaagtttctaacctaagaattaagtacgcgttcaggaagctgttgtctaggccttccccttgtgaatctgggttcattccaatacggcaagtaagagttggaaactttgagaacacagactataaaggcagcagcccgaacactgtcagactctaattggcgaccctgggaaacagttgccctgctattctttaaagaaagacgtttattctgatgataaaaacagttagccagactgtttttaaagcacctggcgggaagcagaaggttggatccaagcccttgttcagatttggtgcctgataagacaggggtttctctttttgtgacctttattattattattttgttaactgttgtaaccagttagctgttgtgttttaagatagaaaggaacaagactaaaattgtaaatactttgtaaacatcagcatttgtacttgaatagtaggattttaaagggcattgatagcataccaaacaaaaggcaaaataaagtgacctttttatata

SEQ ID NO: 186587 - DNA, 12265 bp, Artificial Sequence
  derived and/or modified sequence
cactgagcggctgcggcgcggcttccatcctcccgccctcctgacgcggccggagcgcagccctgaggcccagggagaacgacacattggatacagaagggaggtgatcatgcaccatggcactggcccccagaacgtccagcatcagctgcagaggtccagggcctgccctggcagcgagggtgaggagcagccggcccaccccaacccacccccgtcccccgcagctcccttcgctccctcagcaagcccgtcggcaccccagtctcccagttatcaaatacagcagctgatgaataggagccctgcaaccgggcagaacgtgaacatcaccctgcagagcgtgggccctgtcgtcgggggaaaccagcagatcacactggccccactgccgctccccagccccacctctccaggcttccagttcagcgctcagcctcggcggtttgagcatgggtctccatcatacattcaggtcacgtcccccttgtcccagcaggtccagacccagagtcccacgcagcccagtccggggccggggcaggccttgcagaatgtgcgtgcaggtgcccctggccctgggctgggcctctgcagcagcagccctacagggggcttcgtggatgccagcgtgctggtgaggcagatcagcttgagcccctccagtggtggacactttgtgtttcaggatgggtcagggctcacccagatcgcccagggagcccaggttcagctccagcacccgggtacgcccatcacagtccgagagcggagaccctcccagccccacacacagtcagggggcaccatccaccacctgggaccccagagccctgcagccgcgggtggggccggcctgcagcccctggccagcccaagccacatcaccacggctaacttgccaccgcagatcagcagcatcatccagggccagctggttcagcagcagcaggtgctgcaggggccgccgctgccccggcccctgggcttcgagaggacacccggcgtgctgctccccggggctgggggcgcagcggggtttgggatgacgtccccacccccgcccaccagcccttccaggactgccgtgcccccaggcctttccagcctcccactcacgtctgtggggaacacgggaatgaagaaggttcccaagaagttagaggagattcccccagcctctccggagatggcacagatgaggaagcagtgcctggactatcattaccaggagatgcaggctctgaaggaggtcttcaaggagtatttgattgaactgtttttcttgcaacactttcaagggaacatgatggatttcttagctttcaagaagaaacattatgccccattacaagcatatcttaggcagaatgatttggacattgaagaagaggaggaggaggaggaagaggaggaagaaaaatctgaggttatcaatgacgagcaagccctcgcagggagcctggtagcaggggccggaagcacagtagagacggacctgtttaagaggcagcaggcgatgccctccacaggtatggcagagcagtctaagaggcctcgccttgaagtgggtcaccaaggggtagttttccagcacccaggggcggacgcaggcgttcctctccagcaactaatgccgaccgcacaaggaggaatgccccccacgccgcaggccgcgcagctcgctggacagaggcagagtcagcagcagtatgacccctccacggggcctcccgtgcagaacgctgccagcttgcacaccccactgccgcagctgcccgggaggctgcccccagccggtgttcccactgcagccctctcctctgcgctgcagtttgcacagcagccgcaagtggtagaggcccagacacagctccaaatcccggtgaagactcagcagcccaatgttcccatccctgcaccgcccagcagccaactccccatccctccctcgcagcctgcacagctggccctccacgttcccacacctggaaaggtgcaggtgcaggcctctcagctttcctccctgccacagatggtagcatcgacaaggctccctgtggaccctgccccgccctgcccacggcctctgcccacctcttctacctcgtccctcgcgcctgtgagtggctccggcccaggaccctcccctgctcgatcctctccagtaaatagaccttcctcagccaccaataaggcactatctccagtcacttcccggaccccaggggtggtggcatctgcccccaccaaaccacagagtcctgctcagaatgccacctcgtcccaagacagttctcaggatacgctgacagaacaaataactctggagaaccaggtgcatcagcgcattgcggagctgaggaaagcaggtctgtggtcccagaggcgtctgccaaagctgcaggaggccccacgccccaagtcccactgggactatctgctggaggagatgcagtggatggccacagactttgcccaggagaggaggtggaaggtggctgctgcgaagaagctcgttagaactgtggtgcgccatcacgaggagaagcagctccgtgaagaaagggggaagaaggaagagcagagcagactgaggcggatagccgcctccacggcccgggagatagagtgcttttggtcgaatattgaacaggttgtggaaataaaactacgagtagaattagaagaaaaaaggaagaaggccttaaatttacagaaagtttccaggagagggaaagaattgagacctaaaggatttgacgcattacaggaaagttctctggattcaggaatgtctggaagaaaaagaaaagctagcatatctttgactgatgacgaagtggacgatgaagaggaaacaattgaagaggaggaagcaaatgaaggcgttgtggaccaccaaacagaactttctaatttagccaaggaagctgagctgcccctcctggacctgatgaagctgtacgaaggcgccttcctgccgagttctcagtggccccggccgaagcctgatggggaggacacaagcggagaggaagatgcagatgactgtccaggcgacagggagagtcgcaaggacttggttctcatcgactcgcttttcatcatggatcagttcaaagctgccgagaggatgaatatcgggaagccaaacgccaaggacattgcggacgtcactgcggtggctgaagccatcctgccgaagggcagtgctcgggtcacaacctcggtcaagtttaatgctccatctttgttgtatggggctctcagagattatcagaagattggcctggactggctggccaaactttacaggaagaatctcaatggcatattggcagatgaagctgggctgggtaaaacagtgcagatcattgctttttttgcccacctagcttgtaacgaaggtaattggggcccccatcttgttgttgtgagaagttgtaacatactcaagtgggagcttgaattgaaacgttggtgtcccggactcaaaatcctctcatatattggcagccacagagaactcaaagcaaagagacaggagtgggccgaacccaacagcttccacgtctgcatcacgtcctacactcagttcttccggggcctcaccgccttcacacgagtgcgctggaagtgcctggtcattgatgagatgcagcgcgtgaagggcatgaccgagaggcactgggaagcggttttcaccctgcagagccaacaacgtctgcttctgatcgactcgccgctgcacaataccttcctggagctctggaccatggtgcacttcctggtcccagggatctccaggccctacctgagctcccctctgagggcccccagtgaagagagccaggattactaccataaagtggtcataaggttacacagggtgacacagccatttattttgaggagaactaagagagatgtggaaaagcaactaacaaagaaatatgagcatgttttgaagtgtcgcctttctaaccgacaaaaagccttatacgaggacgttatcctgcaacctggcactcaggaggccttgaagagcgggcactttgtcaacgtcctgagcatccttgtgcggctgcagcgcatctgcaaccaccctgggctcgtcgagccccggcacccaggctcttcctacgtggcggggccactggagtatccgtccgcatctctaatcctgaaggcactggagagagatttctggaaggaagcagatctttctatgtttgatctcatcggcttagaaaataaaatcactcgtcacgaggcagagttgctgtctaagaaaaagataccgcggaaactcatggaggaaatctccacttcagcagccccagcagcccgaccagcagcagcaaagctgaaggccagcaggttgtttcagcctgtgcagtatggccagaagcccgagggtcgcaccgtggctttccccagcactcacccgccccggacggcagcccccaccacggcctctgctgctccacagggcccgcttcgaggacggccgcccatcgccacgttctctgccaatccggaggcaaaagcagcagcagccccgtttcagacctctcaggcttccgccagtgctccacgacaccagcccgcctcggcctccagcacagccgctagcccggcccatcctgcgaaactgcgggcccagaccacagcacaggcctccaccccaggccagcccccgccccagccccaggccccctcgcacgcggccgggcagagcgcgctgcctcagaggctggtgctcccctcgcaggcccaggcccgcttgcccagtggagaggtagtgaaaatagctcagctggcatccatcacaggaccacagagccgcgtggctcagccagagacgccggtgacactgcagttccagggcagcaagttcaccctgtcacacagccagctccggcagctcacagcgggccagccgctgcagctgcaaggcagcgtcctccagatcgtgtccgcccccgggcagccctaccttcgagcccctggccctgtggtgatgcagaccgtgtctcaggcgggcgctgtgcacggcgccctgggaagcaagcccccggccggcggtcccagccctgcacccttgaccccacaagttggcgttccgggccgcgtggcggtgaatgccttggctgtaggagaacccggaacggcctccaaaccagcttctcccattggagggccgacccaggaggaaaagaccagactcttgaaagagcgcctggatcagatttatttagtcaacgagcggcgctgttctcaagctccagtctatggcagagacttgctaaggatttgtgccctgcctagccatggaagggtacagtggcgtgggtccctggatggccgtcgtgggaaggaggccgggccagcgcacagttacacttcatcctcagaaagtccaagtgagctgatgttgacgctttgtcggtgtggagagtctctgcaggatgttattgacagggtggcctttgtgattcctccggtggtggcagcacccccgtccctacgggtgccgcggccgccacccctgtacagccacagaatgaggatcttgaggcagggcctgagagagcacgctgcgccgtacttccagcagctgcggcagaccacggctccacgcctgctgcagttccctgagctgaggctggtgcagttcgactcagggaagttggaagctttagctatcttgcttcagaaattgaaatctgaaggacgtcgggtgctgattttatcacagatgattcttatgttggacattttagagatgttcttgaacttccattacctcacctatgtaagaatcgatgaaaatgccagcagtgagcaacggcaggaactgatgaggagtttcaacagagacaggcggattttttgtgccattctctccactcacagccgtaccacaggtataaaccttgtagaggcggacaccgtcgtgttttatgacaatgacctgaatccagtgatggatgccaaagctcaggagtggtgcgataggatcgggagatgcaaagacatccacatatacaggcttgtgagtggcaattccattgaagagaaattgttgaaaaatggaactaaagatctgatccgagaagtggctgctcagggaaatgactactccatggctttcttaactcagcgaaccatccaggagctgtttgaagtttattctcccatggatgatgctggcttcccggtcaaagctgaggagtttgtggtgctttctcaggaaccttctgtcacggaaaccattgcacccaaaattgcaagacctttcatagaggccctcaagagtattgagtatctggaggaggatgcccagaagtccgcacaggagggggtgctgggaccacacactgatgctctgtcatcagactctgagaacatgccgtgtgatgaagaaccatcccaattagaggagctagctgacttcatggagcagcttacaccaattgaaaaatatgctttaaattacctggaattattccatacttctattgagcaagaaaaggagagaaacagtgaggacgcagtgatgactgcagtgagggcatgggagttctggaacctgaagaccctgcaggagagggaggcccggctgcggctggagcaggaggaggcggagctcctgacctacacgcgagaggatgcctacagcatggagtatgtctacgaagatgtcgatgggcagacagaagtcatgccgctctggaccccacccaccccgccgcaggacgacagcgacatctacctcgactcggtcatgtgtctcatgtatgaagccactcccatcccagaggctaagctgccccctgtgtacgtgaggaaggagcggaagcgacacaaaacagacccctcagctgcaggcaggaagaagaagcagcgtcacggggaggcggtcgtccctcctcggtccctgtttgaccgcgcaacaccaggacttctgaaaattcgcagagagggcaaggagcagaagaagaatattctgctgaagcagcaggtgccattcgccaagcccctgccaacttttgccaaacccacagctgagcctggtcaagacaaccccgagtggctcatcagtgaggactgggcgctgctgcaggctgtaaagcagttactggagctgcctttgaacctcacaatcgtgtcacctgctcacacacctaattgggatcttgtcagtgacgttgttaactcctgtagccgaatctaccgctcttccaaacagtgccggaatcgctacgagaatgtcatcattccacgagaggaggggaagagtaaaaacaaccgtcctctccgtacgagccagatctatgcccaggatgagaatgccacacacacccagctgtacacgagccactttgacttaatgaaaatgactgctggcaagaggagtcccccaatcaaacctctgcttggcatgaatccctttcagaagaaccccaagcacgcgtctgtgttggcagaaagtggaatcaactatgacaagccgctgcctcccatccaggtggcatctctccgtgcagagcgaatcgcaaaagagaaaaaggctctggctgatcagcagaaggcacagcagccggccgtggcccagccacccccgccccagccgcagcccccaccacccccgcagcagccaccgccaccgctgccacaaccacaggcagcgggcagccagccgccagcagggccaccagctgtccagccccaaccccagccacagccccagacccagccacagcctgtgcaggccccagcgaaggcgcagcccgcaatcacgacggggggcagtgcagccgtactggcaggaaccattaaaacatcagttactgggacgagcatgcccactggtgccgtgagtggaaatgtgatcgtgaacaccatcgcaggggtcccagctgccaccttccagtccatcaacaagcgcctggcgtcgccagtggctcctggggccttgactacgccgggaggctctgctcccgcccaggtggtgcacacccagcccccgccacgggcagtcggctccccagccacggcgacccctgacctggtgtccatggcaacgactcagggtgttcgagcggtcacttctgtgacagcctcggccgtggtcactaccaacctgaccccagtgcagaccccggcacggtctttggtgccccaagtgtcccaagccacaggagttcagctccctggaaaaaccatcacacctgcacatttccagcttctcaggcagcagcagcagcagcagcaacaacagcagcagcagcagcagcagcagcagcagcagcagcagcagcaacagcagcagcagcaacagacgacgacgacctctcaggtgcaagttccacagatccagggccaggcccagtccccagcacagatcaaagctgtgggcaagctgacgccggaacacctcatcaaaatgcagaagcagaaactgcagatgcccccgcagcccccaccgccacaggcccagtctgcgcccccgcagccaacagcccaagtgcaagtgcagacctcgcagccgccgcagcagcagagcccccagctcacgacggtcacggccccaaggcctggtgccctgctgacgggcaccaccgtggccaacctccaggtggcccggctcacccgggttcccacttctcagctgcaggcgcaagggcagatgcagacccaggcaccccagccagcccaggtggccttggcgaagcctccggtggtgtccgtcccggcagctgtggtctcctcaccgggagtcaccaccctgcccatgaacgtcgcggggatcagcgtggcgatcggtcagccacagaaggcagcaggacagaccgtggtggcccagcccgtgcacatgcagcagctgctgaagctgaagcagcaggccgtccagcagcagaaggccatccagccccaggctgcacagggcccggcagccgtccagcagaagatcaccgcacagcagatcaccacccctggcgcgcagcagaaggttgcctacgccgcgcagccggcccttaagacccagtttcttaccacacccatctcccaggcccagaaactggccggggcccagcaagtgcagacccagatccaggttgcaaaacttcctcaagttgttcaacagcaaacacccgtggccagcatccagcaagttgcctctgcttcccagcaggcttctccacagactgtggcgctcacgcaggcgacggcggccgggcagcaggtgcagatgatccctgcagtgaccgcgactgcccaggtggttcagcagaaactcattcagcagcaggtggtgaccacggcgtcggccccgctccagactccaggcgctcccaacccagcccaggtgcccgccagctccgacagcccaagccagcagcccaagttacagatgagggtccctgctgtcaggctaaagacacctactaagcctccgtgccagtagtcagggcagcagggctgcctctcatctaaagcaaaactaccttcctcacagaaaacgctttattagtgaaccttgggaccatgtcacgcaagagattcagcactgggaaagatataattgaaacaaaatagtgtaatcattttattaaaatgcatcccacactgcaggacaaatggtccttatggagtgccgcgttctctgtactacgtggctcatggaaaaagtgacaacatggcttcctctaaatcatttcacctttcagtccccacccgcacccgtcccctagagccatagtactgtgttctgaaagccatttagaatttctttgtgagcatgtagtgctttgcacgccacagaagccgtctgccgtgtgtgaggagcatacaatggactttctaaagataaggcgtgggcttccacagtgtctgccagagtttagttctttataccttactgaaaaatgcctcgtggtcttcgcagaggggaaggcctgtctaaagtcaatcatccgagatgggttttccattccaaagaaaggcaatatggttccttccttccctcctaaaatatgacttaacttttaagagaaatgttctgacacccacctaaacacacaaggcacgttcctggcctgtgttcaagggaaatgatcagtcattgcattgttattccaaagagcagccaacagtggcctcccccaggccctaccctgcaatgggattcgctttcatttaatggaaacttctgggactgatgcccaactcagtgcactcaagacgcatctccagttttcgggggaagctggtatttgacatagtgtgttaaacagctcctgagaacctttgggacactctgccatggctggcgtgaggcccagaggaccacgcagaggcaatggtagtacagatgtcacagctgagggtacgatgaggcctgggctcagtgagccaggacgaatgtgacagacaccccttgctgccacagtcagccctttgacgaaggtgggctggtgattctggaagtattggctatagcggtgggcccagtcaactcttccttgtggacttacgacagcagattttctctaggataagcttgtgtggttctgccagtgaagcagagaaccacctgtgctgttgtggaaggcgtgccgttgagggggaaaacgaagcccagtatttgctactgtttttcctttttttactatgacaggaaaataaatgcaattttagtggaattgattgacagtgtctccttactttgaagttttcaccaaagcaaaaaggtccatatccaatagtatcctttgtgctgtggcttgattttggcctattttacattatttggtccaggaaattaggttatattaggttttttgtatactaaaaatcagttatggcacaataaagattttctgtttttaaattgtatttcatctgcttcctccccattctctcactttaagtgacattgaggaaggtattctgtcccacaggtttctgtggacagcgatacagcaggagtcagtgaaatcaactggggagctcacttgagctcttgataagaaatgtggagaaaagtaaaaaccaagctttgaagaaacagaagaaattaatcttttagttagttgaacataccaaagcagaggactggaatctgtttgttctaaccaacccgttctccctggcttggcacgtgccgtgagagcgcagcttgccggagggagggccgctgtgtgcgcctcacatctggctcccagtggaaacttttactcctcctcatccgcagatgtgatagaactgaagtatctaggaattctgcctttgtcatttgttttaatttgtgtgccctgttcattttttttgtctttcccaaatcttggtagtctccttatagttgaagataaaatgttgagtgcacttattttagaatatcctagacataactgtctaagtaaaagcgctctattaatctaaaacactacaagagaatttaacaccatctctcaaatgcttttttggagagcttaatgggattctgaatatttgcaatgtggagtttccgccccgatctcacgtcagtgagggtctcctgtctctcaagtgtgtttcctttggctgttccctaatacaaaacacggacatatttttactcgtagcactcaatttagtaacttctagatgctaccgttgacctgagttaaattcatttagtcgtgtacgtaaaaactctccttttagtgtgttattttcttggccttcccttttaaaggttaaagtttctaacctaagaattaagtacgcgttcaggaagctgttgtctaggccttccccttgtgaatctgggttcattccaatacggcaagtaagagttggaaactttgagaacacagactataaaggcagcagcccgaacactgtcagactctaattggcgaccctgggaaacagttgccctgctattctttaaagaaagacgtttattctgatgataaaaacagttagccagactgtttttaaagcacctggcgggaagcagaaggttggatccaagcccttgttcagatttggtgcctgataagacaggggtttctctttttgtgacctttattattattattttgttaactgttgtaaccagttagctgttgtgttttaagatagaaaggaacaagactaaaattgtaaatactttgtaaacatcagcatttgtacttgaatagtaggattttaaagggcattgatagcataccaaacaaaaggcaaaataaagtgacctttttatata

SEQ ID NO: 186588 - DNA, 2585 bp, Artificial Sequence
  derived and/or modified sequence
atgcactgagcggctgcggcgcggcttccatcctcccgccctcctgacgcggccggagcgcagccctgaggcccagggagaacgacacattggatacagaagggaggtgatcatgcaccatggcactggcccccagaacgtccagcatcagctgcagaggtccagggcctgccctggcagcgagggtgaggagcagccggcccaccccaacccacccccgtcccccgcagctcccttcgctccctcagcaagcccgtcggcaccccagtctcccagttatcaaatacagcagctgatgaataggagccctgcaaccgggcagaacgtgaacatcaccctgcagagcgtgggccctgtcgtcgggggaaaccagcagatcacactggccccactgccgctccccagccccacctctccaggcttccagttcagcgctcagcctcggcggtttgagcatgggtctccatcatacattcaggtcacgtcccccttgtcccagcaggtccagacccagagtcccacgcagcccagtccggggccggggcaggccttgcagaatgtgcgtgcaggtgcccctggccctgggctgggcctctgcagcagcagccctacagggggcttcgtggatgccagcgtgctggtgaggcagatcagcttgagcccctccagtggtggacactttgtgtttcaggatgggtcagggctcacccagatcgcccagggagcccaggttcagctccagcacccgggtacgcccatcacagtccgagagcggagaccctcccagccccacacacagtcagggggcaccatccaccacctgggaccccagagccctgcagccgcgggtggggccggcctgcagcccctggccagcccaagccacatcaccacggctaacttgccaccgcagatcagcagcatcatccagggccagctggttcagcagcagcaggtgctgcaggggccgccgctgccccggcccctgggcttcgagaggacacccggcgtgctgctccccggggctgggggcgcagcggggtttgggatgacgtccccacccccgcccaccagcccttccaggactgccgtgcccccaggcctttccagcctcccactcacgtctgtggggaacacgggaatgaagaaggttcccaagaagttagaggagattcccccagcctctccggagatggcacagatgaggaagcagtgcctggactatcattaccaggagatgcaggctctgaaggaggtcttcaaggagtatttgattgaactgtttttcttgcaacactttcaagggaacatgatggatttcttagctttcaagaagaaacattatgccccattacaagcatatcttaggcagaatgatttggacattgaagaagaggaggaggaggaggaagaggaggaagaaaaatctgaggttatcaatgacgagcaagccctcgcagggagcctggtagcaggggccggaagcacagtagagacggacctgtttaagaggcagcaggcgatgccctccacaggtatggcaggaggaatgccccccacgccgcaggccgcgcagctcgctggacagaggcagagtcagcagcagtatgacccctccacggggcctcccgtgcagaacgctgccagcttgcacaccccactgccgcagctgcccgggaggctgcccccagccggtgttcccactgcagccctctcctctgcgctgcagtttgcacagcagccgcaagtggtagaggcccagacacagctccaaatcccggtgaagactcagcagcccaatgttcccatccctgcaccgcccagcagccaactccccatccctccctcgcagcctgcacagctggccctccacgttcccacacctggaaaggtgcaggtgcaggcctctcagctttcctccctgccacagatggtagcatcgacaaggctccctgtggaccctgccccgccctgcccacggcctctgcccacctcttctacctcgtccctcgcgcctgtgagtggctccggcccaggaccctcccctgctcgatcctctccagtaaatagaccttcctcagccaccaataaggcactatctccagtcacttcccggaccccaggggtggtggcatctgcccccaccaaaccacagagtcctgctcagaatgccacctcgtcccaagacagttctcaggatacgctgacagaacaaataactctggagaaccaggtgcatcagcgcattgcggagctgaggaaagcaggtctgtggtcccagaggcgtctgccaaagctgcaggaggccccacgccccaagtcccactgggactatctgctggaggagatgcagtggatggccacagactttgcccaggagaggaggtggaaggtggctgctgcgaagaagctcgttagaactgtggtgcgccatcacgaggagaagcagctccgtgaagaaagggggaagaaggaagagcagagcagactgaggcggatagccgcctccacggcccgggagatagagtgcttttggtcgaatattgaacaggttgtggaaataaaactacgagtagaattagaag

SEQ ID NO: 186589 - DNA, 10014 bp, Artificial Sequence
  derived and/or modified sequence
ggagaacgacacattggatacagaagggaggtgatcatgcaccatggcactggcccccagaacgtccagcatcagctgcagaggtccagggcctgccctggcagcgagggtgaggagcagccggcccaccccaacccacccccgtcccccgcagctcccttcgctccctcagcaagcccgtcggcaccccagtctcccagttatcaaatacagcagctgatgaataggagccctgcaaccgggcagaacgtgaacatcaccctgcagagcgtgggccctgtcgtcgggggaaaccagcagatcacactggccccactgccgctccccagccccacctctccaggcttccagttcagcgctcagcctcggcggtttgagcatgggtctccatcatacattcaggtcacgtcccccttgtcccagcaggtccagacccagagtcccacgcagcccagtccggggccggggcaggccttgcagaatgtgcgtgcaggtgcccctggccctgggctgggcctctgcagcagcagccctacagggggcttcgtggatgccagcgtgctggtgaggcagatcagcttgagcccctccagtggtggacactttgtgtttcaggatgggtcagggctcacccagatcgcccagggagcccaggttcagctccagcacccgggtacgcccatcacagtccgagagcggagaccctcccagccccacacacagtcagggggcaccatccaccacctgggaccccagagccctgcagccgcgggtggggccggcctgcagcccctggccagcccaagccacatcaccacggctaacttgccaccgcagatcagcagcatcatccagggccagctggttcagcagcagcaggtgctgcaggggccgccgctgccccggcccctgggcttcgagaggacacccggcgtgctgctccccggggctgggggcgcagcggggtttgggatgacgtccccacccccgcccaccagcccttccaggactgccgtgcccccaggcctttccagcctcccactcacgtctgtggggaacacgggaatgaagaaggttcccaagaagttagaggagattcccccagcctctccggagatggcacagatgaggaagcagtgcctggactatcattaccaggagatgcaggctctgaaggaggtcttcaaggagtatttgattgaactgtttttcttgcaacactttcaagggaacatgatggatttcttagctttcaagaagaaacattatgccccattacaagcatatcttaggcagaatgatttggacattgaagaagaggaggaggaggaggaagaggaggaagaaaaatctgaggttatcaatgacgagcagcaagccctcgcagggagcctggtagcaggggccggaagcacagtagagacggacctgtttaagaggcagcaggcgatgccctccacaggtatggcagagcagtctaagaggcctcgccttgaagtgggtcaccaaggggtagttttccagcacccaggggcggacgcaggcgttcctctccagcaactaatgccgaccgcacaaggaggaatgccccccacgccgcaggccgcgcagctcgctggacagaggcagagtcagcagcagtatgacccctccacggggcctcccgtgcagaacgctgccagcttgcacaccccactgccgcagctgcccgggaggctgcccccagccggtgttcccactgcagccctctcctctgcgctgcagtttgcacagcagccgcaagtggtagaggcccagacacagctccaaatcccggtgaagactcagcagcccaatgttcccatccctgcaccgcccagcagccaactccccatccctccctcgcagcctgcacagctggccctccacgttcccacacctggaaaggtgcaggtgcaggcctctcagctttcctccctgccacagatggtagcatcgacaaggctccctgtggaccctgccccgccctgcccacggcctctgcccacctcttctacctcgtccctcgcgcctgtgagtggctccggcccaggaccctcccctgctcgatcctctccagtaaatagaccttcctcagccaccaataaggcactatctccagtcacttcccggaccccaggggtggtggcatctgcccccaccaaaccacagagtcctgctcagaatgccacctcgtcccaagacagttctcaggatacgctgacagaacaaataactctggagaaccaggtgcatcagcgcattgcggagctgaggaaagcaggtctgtggtcccagaggcgtctgccaaagctgcaggaggccccacgccccaagtcccactgggactatctgctggaggagatgcagtggatggccacagactttgcccaggagaggaggtggaaggtggctgctgcgaagaagctcgttagaactgtggtgcgccatcacgaggagaagcagctccgtgaagaaagggggaagaaggaagagcagagcagactgaggcggatagccgcctccacggcccgggagatagagtgcttttggtcgaatattgaacaggttgtggaaataaaactacgagtagaattagaagaaaaaaggaagaaggccttaaatttacagaaagtttccaggagagggaaagaattgagacctaaaggatttgacgcattacaggaaagttctctggattcaggaatgtctggaagaaaaagaaaagctagcatatctttgactgatgacgaagtggacgatgaagaggaaacaattgaagaggaggaagcaaatgaaggcgttgtggaccaccaaacagaactttctaatttagccaaggaagctgagctgcccctcctggacctgatgaagctgtacgaaggcgccttcctgccgagttctcagtggccccggccgaagcctgatggggaggacacaagcggagaggaagatgcagatgactgtccaggcgacagggagagtcgcaaggacttggttctcatcgactcgcttttcatcatggatcagttcaaagctgccgagaggatgaatatcgggaagccaaacgccaaggacattgcggacgtcactgcggtggctgaagccatcctgccgaagggcagtgctcgggtcacaacctcggtcaagtttaatgctccatctttgttgtatggggctctcagagattatcagaagattggcctggactggctggccaaactttacaggaagaatctcaatggcatattggcagatgaagctgggctgggtaaaacagtgcagatcattgctttttttgcccacctagcttgtaacgaaggtaattggggcccccatcttgttgttgtgagaagttgtaacatactcaagtgggagcttgaattgaaacgttggtgtcccggactcaaaatcctctcatatattggcagccacagagaactcaaagcaaagagacaggagtgggccgaacccaacagcttccacgtctgcatcacgtcctacactcagttcttccggggcctcaccgccttcacacgagtgcgctggaagtgcctggtcattgatgagatgcagcgcgtgaagggcatgaccgagaggcactgggaagcggttttcaccctgcagagccaacaacgtctgcttctgatcgactcgccgctgcacaataccttcctggagctctggaccatggtgcacttcctggtcccagggatctccaggccctacctgagctcccctctgagggcccccagtgaagagagccaggattactaccataaagtggtcataaggttacacagggtgacacagccatttattttgaggagaactaagagagatgtggaaaagcaactaacaaagaaatatgagcatgttttgaagtgtcgcctttctaaccgacaaaaagccttatacgaggacgttatcctgcaacctggcactcaggaggccttgaagagcgggcactttgtcaacgtcctgagcatccttgtgcggctgcagcgcatctgcaaccaccctgggctcgtcgagccccggcacccaggctcttcctacgtggcggggccactggagtatccgtccgcatctctaatcctgaaggcactggagagagatttctggaaggaagcagatctttctatgtttgatctcatcggcttagaaaataaaatcactcgtcacgaggcagagttgctgtctaagaaaaagataccgcggaaactcatggaggaaatctccacttcagcagccccagcagcccgaccagcagcagcaaagctgaaggccagcaggttgtttcagcctgtgcagtatggccagaagcccgagggtcgcaccgtggctttccccagcactcacccgccccggacggcagcccccaccacggcctctgctgctccacagggcccgcttcgaggacggccgcccatcgccacgttctctgccaatccggaggcaaaagcagcagcagccccgtttcagacctctcaggcttccgccagtgctccacgacaccagcccgcctcggcctccagcacagccgctagcccggcccatcctgcgaaactgcgggcccagaccacagcacaggcctccaccccaggccagcccccgccccagccccaggccccctcgcacgcggccgggcagagcgcgctgcctcagaggctggtgctcccctcgcaggcccaggcccgcttgcccagtggagaggtagtgaaaatagctcagctggcatccatcacaggaccacagagccgcgtggctcagccagagacgccggtgacactgcagttccagggcagcaagttcaccctgtcacacagccagctccggcagctcacagcgggccagccgctgcagctgcaaggcagcgtcctccagatcgtgtccgcccccgggcagccctaccttcgagcccctggccctgtggtgatgcagaccgtgtctcaggcgggcgctgtgcacggcgccctgggaagcaagcccccggccggcggtcccagccctgcacccttgaccccacaagttggcgttccgggccgcgtggcggtgaatgccttggctgtaggagaacccggaacggcctccaaaccagcttctcccattggagggccgacccaggaggaaaagaccagactcttgaaagagcgcctggatcagatttatttagtcaacgagcggcgctgttctcaagctccagtctatggcagagacttgctaaggatttgtgccctgcctagccatggaagggtacagtggcgtgggtccctggatggccgtcgtgggaaggaggccgggccagcgcacagttacacttcatcctcagaaagtccaagtgagctgatgttgacgctttgtcggtgtggagagtctctgcaggatgttattgacagggtggcctttgtgattcctccggtggtggcagcacccccgtccctacgggtgccgcggccgccacccctgtacagccacagaatgaggatcttgaggcagggcctgagagagcacgctgcgccgtacttccagcagctgcggcagaccacggctccacgcctgctgcagttccctgagctgaggctggtgcagttcgactcagggaagttggaagctttagctatcttgcttcagaaattgaaatctgaaggacgtcgggtgctgattttatcacagatgattcttatgttggacattttagagatgttcttgaacttccattacctcacctatgtaagaatcgatgaaaatgccagcagtgagcaacggcaggaactgatgaggagtttcaacagagacaggcggattttttgtgccattctctccactcacagccgtaccacaggtataaaccttgtagaggcggacaccgtcgtgttttatgacaatgacctgaatccagtgatggatgccaaagctcaggagtggtgcgataggatcgggagatgcaaagacatccacatatacaggcttgtgagtggcaattccattgaagagaaattgttgaaaaatggaactaaagatctgatccgagaagtggctgctcagggaaatgactactccatggctttcttaactcagcgaaccatccaggagctgtttgaagtttattctcccatggatgatgctggcttcccggtcaaagctgaggagtttgtggtgctttctcaggaaccttctgtcacggaaaccattgcacccaaaattgcaagacctttcatagaggccctcaagagtattgagtatctggaggaggatgcccagaagtccgcacaggagggggtgctgggaccacacactgatgctctgtcatcagactctgagaacatgccgtgtgatgaagaaccatcccaattagaggagctagctgacttcatggagcagcttacaccaattgaaaaatatgctttaaattacctggaattattccatacttctattgagcaagaaaaggagagaaacagtgaggacgcagtgatgactgcagtgagggcatgggagttctggaacctgaagaccctgcaggagagggaggcccggctgcggctggagcaggaggaggcggagctcctgacctacacgcgagaggatgcctacagcatggagtatgtctacgaagatgtcgatgggcagacagaagtcatgccgctctggaccccacccaccccgccgcaggacgacagcgacatctacctcgactcggtcatgtgtctcatgtatgaagccactcccatcccagaggctaagctgccccctgtgtacgtgaggaaggagcggaagcgacacaaaacagacccctcagctgcaggcaggaagaagaagcagcgtcacggggaggcggtcgtccctcctcggtccctgtttgaccgcgcaacaccaggacttctgaaaattcgcagagagggcaaggagcagaagaagaatattctgctgaagcagcaggtgccattcgccaagcccctgccaacttttgccaaacccacagctgagcctggtcaagacaaccccgagtggctcatcagtgaggactgggcgctgctgcaggctgtaaagcagttactggagctgcctttgaacctcacaatcgtgtcacctgctcacacacctaattgggatcttgtcagtgacgttgttaactcctgtagccgaatctaccgctcttccaaacagtgccggaatcgctacgagaatgtcatcattccacgagaggaggggaagagtaaaaacaaccgtcctctccgtacgagccagatctatgcccaggatgagaatgccacacacacccagctgtacacgagccactttgacttaatgaaaatgactgctggcaagaggagtcccccaatcaaacctctgcttggcatgaatccctttcagaagaaccccaagcacgcgtctgtgttggcagaaagtggaatcaactatgacaagccgctgcctcccatccaggtggcatctctccgtgcagagcgaatcgcaaaagagaaaaaggctctggctgatcagcagaaggcacagcagccggccgtggcccagccacccccgccccagccgcagcccccaccacccccgcagcagccaccgccaccgctgccacaaccacaggcagcgggcagccagccgccagcagggccaccagctgtccagccccaaccccagccacagccccagacccagccacagcctgtgcaggccccagcgaaggcgcagcccgcaatcacgacggggggcagtgcagccgtactggcaggaaccattaaaacatcagttactgggacgagcatgcccactggtgccgtgagtggaaatgtgatcgtgaacaccatcgcaggggtcccagctgccaccttccagtccatcaacaagcgcctggcgtcgccagtggctcctggggccttgactacgccgggaggctctgctcccgcccaggtggtgcacacccagcccccgccacgggcagtcggctccccagccacggcgacccctgacctggtgtccatggcaacgactcagggtgttcgagcggtcacttctgtgacagcctcggccgtggtcactaccaacctgaccccagtgcagaccccggcacggtctttggtgccccaagtgtcccaagccacaggagttcagctccctggaaaaaccatcacacctgcacatttccagcttctcaggcagcagcagcagcagcagcaacaacagcagcagcagcagcagcagcagcagcagcagcagcagcagcaacagcagcagcagcaacagacgacgacgacctctcaggtgcaagttccacagatccagggccaggcccagtccccagcacagatcaaagctgtgggcaagctgacgccggaacacctcatcaaaatgcagaagcagaaactgcagatgcccccgcagcccccaccgccacaggcccagtctgcgcccccgcagccaacagcccaagtgcaagtgcagacctcgcagccgccgcagcagcagagcccccagctcacgacggtcacggccccaaggcctggtgccctgctgacgggcaccaccgtggccaacctccaggtggcccggctcacccgggttcccacttctcagctgcaggcgcaagggcagatgcagacccaggcaccccagccagcccaggtggccttggcgaagcctccggtggtgtccgtcccggcagctgtggtctcctcaccgggagtcaccaccctgcccatgaacgtcgcggggatcagcgtggcgatcggtcagccacagaaggcagcaggacagaccgtggtggcccagcccgtgcacatgcagcagctgctgaagctgaagcagcaggccgtccagcagcagaaggccatccagccccaggctgcacagggcccggcagccgtccagcagaagatcaccgcacagcagatcaccacccctggcgcgcagcagaaggttgcctacgccgcgcagccggcccttaagacccagtttcttaccacacccatctcccaggcccagaaactggccggggcccagcaagtgcagacccagatccaggttgcaaaacttcctcaagttgttcaacagcaaacacccgtggccagcatccagcaagttgcctctgcttcccagcaggcttctccacagactgtggcgctcacgcaggcgacggcggccgggcagcaggtgcagatgatccctgcagtgaccgcgactgcccaggtggttcagcagaaactcattcagcagcaggtggtgaccacggcgtcggccccgctccagactccaggcgctcccaacccagcccaggtgcccgccagctccgacagcccaagccagcagcccaagttacagatgagggtccctgctgtcaggctaaagacacctactaagcctccgtgccagtagtcagggcagcagggctgcctctcatctaaagcaaaactaccttcctcacagaaaacgctttattagtgaaccttgggaccatgtcacgcaagagattcagcactgggaaagatataattgaaacaaaatagtgtaatcattttattaaaatgcatcccacactgcaggacaaatggtccttatggagtgccgcgttctctgtactacgtggctcatggaaaaagtgacaacatggcttcctctaaatcatttcacctttcagtccccacccgcacccgtcccctagagccatagtactgtgttctgaaagccatttagaatttctttgtgagcatgtagtgctttgcacgccacagaagccgtctgccgtgtgtgaggagcatacaatggactttctaaagataaggcgtgggcttccacagtgtctgccagagtttagttctttataccttactgaaaaatgcctcgtggtcttcgcagaggggaaggcctgtctaaagtcaatcatccgagatgggttttccattccaaagaaaggcaatatggttccttccttccctcctaaaatatgacttaacttttaagagaaatgttctgacacccacc

SEQ ID NO: 186590 - protein, 213 aa, Artificial Sequence
  derived and/or modified sequence
MFGWSFVFEDFVSDELRNKATQPMKSVLWWLPVEKAFWRQPAGPGSGIRERLEHPVLHVSWNDARAYCAWRGKRLPTEEEWEFAARGGLKGQVYPWGNWFQPNRTNLWQGKFPKGDKAEDGFHGVSPVNAFPAQNNYGLYDLLGNVWEWTASPYQAAEQDMRVLRGASWIDTADGSANHRARVTTRMGNTPDSASDNLGFRCAADAGRPPGEL

SEQ ID NO: 186591 - protein, 320 aa, Artificial Sequence
  derived and/or modified sequence
MRAHAQRGRGCTRRSAAVLMARHGLPLLPLLSLLVGAWLKLGNGQATSMVQLQGGRFLMGTNSPDSRDGDGPVREATVKPFAIDIFPVTNKDFRDFVREKKYRTEAEMFGWSFVFEDFVSDELRNKATQPMKSVLWWLPVEKAFWRQPAGPGSGIRERLEHPVLHVSWNDARAYCAWRGKRLPTEEEWEFAARGGLKGQVYPWGNWFQPNRTNLWQGKFPKGDKAEDGFHGVSPVNAFPAQNNYGLYDLLGNVWEWTASPYQAAEQDMRVLRGASWIDTADGSANHRARVTTRMGNTPDSASDNLGFRCAADAGRPPGEL

SEQ ID NO: 186592 - DNA, 963 bp, Artificial Sequence
  derived and/or modified sequence
atgagagcccacgcccagagaggcagaggctgcaccagaagaagcgccgccgtgctgatggccagacacggcctgcccctgctgcccctgctgagcctgctggtgggcgcctggctgaagctgggcaacggccaggccaccagcatggtgcagctgcagggcggcagattcctgatgggcaccaacagccccgacagcagagacggcgacggccccgtgagagaggccaccgtgaagcccttcgccatcgacatcttccccgtgaccaacaaggacttcagagacttcgtgagagagaagaagtacagaaccgaggccgagatgttcggctggagcttcgtgttcgaggacttcgtgagcgacgagctgagaaacaaggccacccagcccatgaagagcgtgctgtggtggctgcccgtggagaaggccttctggagacagcccgccggccccggcagcggcatcagagagagactggagcaccccgtgctgcacgtgagctggaacgacgccagagcctactgcgcctggagaggcaagagactgcccaccgaggaggagtgggagttcgccgccagaggcggcctgaagggccaggtgtacccctggggcaactggttccagcccaacagaaccaacctgtggcagggcaagttccccaagggcgacaaggccgaggacggcttccacggcgtgagccccgtgaacgccttccccgcccagaacaactacggcctgtacgacctgctgggcaacgtgtgggagtggaccgccagcccctaccaggccgccgagcaggacatgagagtgctgagaggcgccagctggatcgacaccgccgacggcagcgccaaccacagagccagagtgaccaccagaatgggcaacacccccgacagcgccagcgacaacctgggcttcagatgcgccgccgacgccggcagaccccccggcgagctgtag

SEQ ID NO: 186593 - DNA, 963 bp, Artificial Sequence
  derived and/or modified sequence
atgagggcgcatgctcagcgggggcgcggatgtacccgtcgcagcgccgccgtgctgatggccaggcatggtctgcccctcctgccgctgctcagcctgttggtgggagcatggcttaaattgggcaatggccaagccacttcaatggtccagctccaaggagggcgctttttgatgggaaccaatagcccagatagtcgggatggcgatggacccgtaagggaggcaacggtcaaacctttcgccatagacattttcccagttaccaataaagactttcgagatttcgtccgggagaaaaagtacaggactgaggcagagatgttcggatggagcttcgtgtttgaagatttcgtgagcgacgaactcagaaataaggctacccaaccgatgaaatccgtcctctggtggttgcccgtagagaaggccttctggcggcagccagccgggccagggtccggaatccgggaaagactggagcacccggtgctacacgtgtcctggaatgatgcccgggcttattgtgcctggcgcggcaaaagactgcccaccgaagaagagtgggaattcgctgcccgcggcggcctgaaggggcaggtctacccttggggcaactggttccagccgaatagaacaaacctctggcagggaaaattcccgaaaggggataaggcggaagacgggttccatggggtatctcctgtaaacgcttttcccgctcaaaacaactacggtctctacgacctgctgggcaatgtttgggagtggactgcgagtccgtaccaggcggctgagcaggatatgagggttctgagaggtgccagttggatagatacagccgacggcagtgccaaccatcgggcaagggtgacaacgcggatgggcaatactccagatagtgcctccgacaacctcggattccgctgtgccgcagacgccggtcgcccccccggagagctttag

SEQ ID NO: 186594 - DNA, 963 bp, Artificial Sequence
  derived and/or modified sequence
atgagggcccacgcccagaggggccggggctgcaccaggagatctgctgctgtgctgatggcccggcacggcctgcccctgctgcccctgctgagcctgctggtgggcgcctggctgaagctgggcaatggccaggccacctccatggtgcagctgcagggcggccgcttcctgatgggcaccaacagcccagacagcagagatggagatggccctgtgcgggaggccaccgtgaagccctttgccatcgacatcttccctgtgaccaacaaggacttccgggactttgtgcgggagaagaagtacagaacagaggccgagatgtttggctggagctttgtgtttgaggactttgtgtctgatgagctgaggaacaaggccacccagcccatgaagtctgtgctgtggtggctgcctgtggagaaggccttctggaggcagcctgctggccctggcagcggcatccgggagcggctggagcaccctgtgctgcacgtgtcctggaatgatgcccgggcctactgtgcctggaggggcaagaggctgcccacagaggaggagtgggagtttgctgcccggggcggcctgaagggccaggtgtacccctggggcaactggttccagcccaacagaaccaacctgtggcagggcaagttccccaagggggacaaggccgaggatggcttccacggcgtgtcccctgtgaatgccttccctgcccagaacaactacggcctgtatgacctgctgggcaatgtgtgggagtggacagccagcccctaccaggccgctgagcaggacatgagggtgctgcggggggcctcctggattgacacagcagatggcagcgccaaccaccgggcccgggtgaccaccaggatgggcaacaccccagacagcgccagtgacaacctgggcttccgctgtgccgcagatgctggccggcccccaggagagctgtag

SEQ ID NO: 186595 - DNA, 963 bp, Artificial Sequence
  derived and/or modified sequence
atgcgggcccacgcccagcggggccggggctgcacccggcggagcgctgcggtgttaatggcacgtcacggccttccacttctccctcttttatccttgctggtcggggcctggttgaagcttggtaacgggcaggctacctcaatggtgcaactgcagggtggcaggtttcttatgggtactaactctcctgacagccgagatggggacggtcccgtgagagaagccaccgttaagccatttgcgattgatattttcccagtcacaaataaggacttcagggacttcgtgcgggaaaagaagtaccgcacagaggctgagatgttcggctggagctttgtgttcgaagacttcgtgtctgatgaactccgtaacaaggcaactcaaccaatgaaatctgtgctttggtggctgcctgtggagaaagctttctggcgccaacccgccggcccagggagcgggattcgcgagaggctcgagcaccccgtcttgcacgtctcttggaacgatgcccgtgcgtactgtgcctggcgtggcaagcgtctgccaaccgaagaggagtgggaattcgcggcccgcggcgggcttaaagggcaggtctatccctggggtaactggttccagccaaatagaaccaatctgtggcaggggaagtttcctaagggcgataaggccgaggacggatttcatggtgtgtcccctgtcaacgcgtttccggcacaaaataactatggtctttatgatcttttgggaaatgtgtgggagtggacagccagcccctaccaggctgccgaacaggacatgagggtactgagaggcgcatcttggattgataccgctgacgggtcagccaatcacagagccagagtgaccacccgcatgggaaacacccctgattccgcctcggacaatctaggcttccgctgcgcagccgacgctgggaggccacctggagagctgtag

SEQ ID NO: 186596 - DNA, 963 bp, Artificial Sequence
  derived and/or modified sequence
atgcgcgcacacgcccagcgcggaaggggctgtacacgcagaagcgctgcagtgctgatggcccgacacggactgccactgctgccactgttgtcactgctggtaggggcatggttaaagctgggcaatggtcaagctacctctatggtgcaacttcaagggggacgatttctgatgggaacaaattcccccgatagccgtgatggagatggaccagtccgggaagcgaccgtcaagccattcgctattgacatcttccccgtgactaacaaagacttcagagatttcgttcgggagaagaaatataggaccgaagcagaaatgttcggctggtcctttgtgtttgaggacttcgtttccgatgagctacggaacaaagccacccaacccatgaagtcggtcctctggtggctgccagtggaaaaagctttttggcgccagccagccggacctggttccgggattcgagagcgcctggagcatcctgtgctccacgtttcttggaacgatgctagagcttactgcgcctggcggggtaagcggttgcctacggaggaagaatgggagttcgccgctcggggagggctaaaaggacaggtttacccctggggaaactggtttcagccaaacaggacaaacctgtggcaaggaaaattcccaaagggcgataaagctgaagacggttttcatggagtttctcccgtcaacgcgtttccagcccagaacaactacggcctgtatgatctccttggaaacgtctgggaatggactgcatcaccctaccaggccgctgaacaggatatgcgcgttttgagaggagcctcctggattgataccgccgacggctcagcgaaccaccgcgctcgcgtcacaacgagaatgggcaatacacctgactctgctagcgataatctgggcttcagatgcgcggctgacgccggacggccacccggagaactgtag

SEQ ID NO: 186597 - DNA, 1894 bp, Artificial Sequence
  derived and/or modified sequence
tgtgcataggggtcgactgccgctgcggtgcatgagggcgcatgcgcagcggggccgtgggtgtacgcggcgcagcgcggcagtcctgatggcccggcatgggttaccgctgctgcccctgctgtcgctcctggtcggcgcgtggctcaagctagggattttgtcagggagaaaaagtatcggacagaagctgagatgtttggatggagctttgtctttgaggactttgtctctgatgagctgagaaacaaagccacccagccaatgaagtctgtactctggtggcttccagtggaaaaggcattttggaggcagcctgcaggtcctggctctggcatccgagagagactggagcacccagtgttacacgtgagctggaatgacgcccgtgcctactgtgcttggcggggaaaacgactgcccacggaggaagagtgggagtttgccgcccgagggggcttgaagggtcaagtttacccatgggggaactggttccagccaaaccgcaccaacctgtggcagggaaagttccccaagggagacaaagctgaggatggcttccatggagtctccccagtgaatgctttccccgcccagaacaactacgggctctatgacctcctggggaacgtgtgggagtggacagcatcaccgtaccaggctgctgagcaggacatgcgcgtcctccggggggcatcctggatcgacacagctgatggctctgccaatcaccgggcccgggtcaccaccaggatgggcaacactccagattcagcctcagacaacctcggtttccgctgtgctgcagacgcaggccggccgccaggggagctgtaagcagccgggtggtgacaaggagaaaagccttctagggtcactgtcattccctggccatgttgcaaacagcgcaattccaagctcgagagcttcagcctcaggaaagaacttccccttccctgtctcccatccctctgtggcaggcgcctctcaccagggcaggagaggactcagcctcctgtgttttggagaaggggcccaatgtgtgttgacgatggctgggggccaggtgtttctgttagaggccaagtattattgacacaggattgcaaacacacaaacaattggaacagagcactctgaaaggccattttttaagcattttaaaatctattctctccccctttctccctggatgattcaggaagctgacattgtttcctcaaggcagaattttcctggttctgttttctcagccagttgctgtggaaggagaatgctttctttgtggcctcatctgtggtttcgtgtccctctgaaggaaactagtttccactgtgtaacaggcagacatgtaactatttaaagcacagttcagtcctaaaagggtctgggagaaccagatgatgtactaggtgaagcattgcattgtgggaatcacaaagcaaatagtactccagaaagacaaatatcagaagcttcctattctttttttttttttttttttttttgagacagggtctttctctgttgcccaggctagagtgcactggtgatcacggctcactctagccttgaattcctgggcccaagcaattctcccacctcagcctcctgagtagctgggactacaagtgtgcaccaccatgcctggctaattttttgaatttttgtagtgatgggatctcgctctgttgcccagggtggtctcgaactcctggcctcaagcgatcctcccacctcgacctcccaaagtgctgggattacaggtgtgagccacctcgcctgggcccccttctccatatgcctccaaaaacatgtccctggagagtagcctgctcccacactgtcactggatgtcatggggccaataaaatctcctgcaattgtgtatctc

SEQ ID NO: 186598 - DNA, 2052 bp, Artificial Sequence
  derived and/or modified sequence
tgtgcataggggtcgactgccgctgcggtgcatgagggcgcatgcgcagcggggccgtgggtgtacgcggcgcagcgcggcagtcctgatggcccggcatgggttaccgctgctgcccctgctgtcgctcctggtcggcgcgtggctcaagctaggaaatggacaggctactagcatggtccaactgcagggtgggagattcctgatgggaacaaattctccagacagcagagatggtgacgggcctgtgcgggaggcgacagtgaaaccctttgccatcgacatatttcctgtcaccaacaaagatttcagggattttgtcagggagaaaaagtatcggacagaagctgagatgtttggatggagctttgtctttgaggactttgtctctgatgagctgagaaacaaagccacccagccaatgaagtctgtactctggtggcttccagtggaaaaggcattttggaggcagcctgcaggtcctggctctggcatccgagagagactggagcacccagtgttacacgtgagctggaatgacgcccgtgcctactgtgcttggcggggaaaacgactgcccacggaggaagagtgggagtttgccgcccgagggggcttgaagggtcaagtttacccatgggggaactggttccagccaaaccgcaccaacctgtggcagggaaagttccccaagggagacaaagctgaggatggcttccatggagtctccccagtgaatgctttccccgcccagaacaactacgggctctatgacctcctggggaacgtgtgggagtggacagcatcaccgtaccaggctgctgagcaggacatgcgcgtcctccggggggcatcctggatcgacacagctgatggctctgccaatcaccgggcccgggtcaccaccaggatgggcaacactccagattcagcctcagacaacctcggtttccgctgtgctgcagacgcaggccggccgccaggggagctgtaagcagccgggtggtgacaaggagaaaagccttctagggtcactgtcattccctggccatgttgcaaacagcgcaattccaagctcgagagcttcagcctcaggaaagaacttccccttccctgtctcccatccctctgtggcaggcgcctctcaccagggcaggagaggactcagcctcctgtgttttggagaaggggcccaatgtgtgttgacgatggctgggggccaggtgtttctgttagaggccaagtattattgacacaggattgcaaacacacaaacaattggaacagagcactctgaaaggccattttttaagcattttaaaatctattctctccccctttctccctggatgattcaggaagctgacattgtttcctcaaggcagaattttcctggttctgttttctcagccagttgctgtggaaggagaatgctttctttgtggcctcatctgtggtttcgtgtccctctgaaggaaactagtttccactgtgtaacaggcagacatgtaactatttaaagcacagttcagtcctaaaagggtctgggagaaccagatgatgtactaggtgaagcattgcattgtgggaatcacaaagcaaatagtactccagaaagacaaatatcagaagcttcctattctttttttttttttttttttttttgagacagggtctttctctgttgcccaggctagagtgcactggtgatcacggctcactctagccttgaattcctgggcccaagcaattctcccacctcagcctcctgagtagctgggactacaagtgtgcaccaccatgcctggctaattttttgaatttttgtagtgatgggatctcgctctgttgcccagggtggtctcgaactcctggcctcaagcgatcctcccacctcgacctcccaaagtgctgggattacaggtgtgagccacctcgcctgggcccccttctccatatgcctccaaaaacatgtccctggagagtagcctgctcccacactgtcactggatgtcatggggccaataaaatctcctgcaattgtgtatctca

SEQ ID NO: 186599 - protein, 567 aa, Artificial Sequence
  derived and/or modified sequence
MMAAVPPGLEPWNRVRIPKAGNRSAVTVQNPGAALDLCIAAVIKECHLVILSLKSQTLDAETDVLCAVLYSNHNRMGRHKPHLALKQVEQCLKRLKNMNLEGSIQDLFELFSSNENQPLTTKVCVVPSQPVVELVLMKVLGACKLLLRLLDCCCKTFLLTVKHLGLQEFIILNLVMVGLVSRLWVLYKGVLKRLILLYEPLFGLLQEVARIQPMPYFKDFTFPSDITEFLGQPYFEAFKKKMPIAFAAKGINKLLNKLFLINEQSPRASEETLLGISKKAKQMKINVQNNVDLGQPVKNKRVFKEESSEFDVRAFCNQLKHKATQETSFDFKCSQSRLKTTKYSSQKVIGTPHAKSFVQRFREAESFTQLSEEIQMAVVWCRSKKLKAQAIFLGNKLLKSNRLKHLEAQGTSLPKKLECIKTSICNHLLRGSGIKTSKHHLRQRRSQNKFLRRQRKPQRKLQSTLLREIQQFSQGTRKSATDTSAKWRLSHCTVHRTDLYPNSKQLLNSGVSMPVIQTKEKMIHENLRGIHENETDSWTVMQINKNSTSGTIKETDDIDDIFALMGV

SEQ ID NO: 186600 - protein, 431 aa, Artificial Sequence
  derived and/or modified sequence
MKVLGACKLLLRLLDCCCKTFLLTVKHLGLQEFIILNLVMVGLVSRLWVLYKGVLKRLILLYEPLFGLLQEVARIQPMPYFKDFTFPSDITEFLGQPYFEAFKKKMPIAFAAKGINKLLNKLFLINEQSPRASEETLLGISKKAKQMKINVQNNVDLGQPVKNKRVFKEESSEFDVRAFCNQLKHKATQETSFDFKCSQSRLKTTKYSSQKVIGTPHAKSFVQRFREAESFTQLSEEIQMAVVWCRSKKLKAQAIFLGNKLLKSNRLKHLEAQGTSLPKKLECIKTSICNHLLRGSGIKTSKHHLRQRRSQNKFLRRQRKPQRKLQSTLLREIQQFSQGTRKSATDTSAKWRLSHCTVHRTDLYPNSKQLLNSGVSMPVIQTKEKMIHENLRGIHENETDSWTVMQINKNSTSGTIKETDDIDDIFALMGV

SEQ ID NO: 186601 - DNA, 4992 bp, Artificial Sequence
  derived and/or modified sequence
aatatacagatgactgggtccttcccagtcccacgcgtttactcgatgaaggcagcctcccgccgggctcctggccccgcccgagccccaccccctgctcccttccggcccggactgggtcccatcgccccacctccggtcgctggacgtgctctcgcgtagctccgcctttcgtaagtccccccgcctcgcatgatggctgcggtgccgccgggcctggagccgtggaaccgtgtgagaatccctaaggcggggaaccgcagcgcagtgacagtgcagaaccccggcgcggcccttgacctttgcattgcagctgtaattaaagaatgccatctcgtcatactgtcgctgaagagccaaaccttagatgcagaaacagatgtgttatgtgcagtcctttacagcaatcacaacagaatgggccgccacaaaccccatttggccctcaaacaggttgagcaatgtttaaagcgtttgaaaaacatgaatttggagggctcaattcaagacctgtttgagttgttttcttccaatgaaaatcagcccttaactaccaaagtatgtgttgtccccagtcagccagtggtggagttggtgttgatgaaggttttgggagcctgcaagttgttgctccgcttgttggactgctgctgcaaaacttttcttttgactgtgaaacatctaggtttgcaagagttcattattttaaaccttgtgatggttgggctggtgagcaggttatgggttctctataaaggtgtcttaaaaaggttgattttgttatatgagcctttgtttggattgcttcaagaggtcgctaggattcaaccaatgccttacttcaaagattttacctttccttctgatatcactgaatttttaggacagccatattttgaagcctttaagaaaaaaatgcctatagcttttgcagctaaaggaataaataaattgctaaataaactgtttttaataaatgagcagtcaccaagagccagtgaagaaaccttgcttggaatttcaaaaaaagctaaacaaatgaagatcaatgtacagaataatgtggatcttggacagccagtaaagaataagagagtcttcaaagaagagtcatcagaatttgatgtgagggctttctgcaaccagctgaaacacaaagctactcaggagaccagttttgattttaaatgttctcaatccagactaaagacaaccaagtattcttctcagaaagtgataggaactcctcatgccaaaagttttgtgcaaagattccgagaggctgagtccttcacacaactttctgaagaaatccagatggcagttgtatggtgcaggagcaaaaaactcaaggctcaggccatttttctgggtaacaaacttcttaaaagcaaccggcttaaacatctggaagctcaaggtactagtttgccaaagaaactagagtgcataaaaacgtctatttgcaaccaccttcttcgtggctcaggtatcaaaacttcaaagcatcatctgagacagagaagatcacagaataaatttttacggagacaaaggaaaccacagagaaagttgcagtcgactcttttaagggaaattcagcagttctctcaagggactcggaagagtgctacagataccagtgctaagtggagactctcacactgtactgtgcatagaactgatctctaccctaacagtaagcagctcttgaatagtggagtttcaatgcctgtcatacaaactaaggagaaaatgattcatgaaaatcttagaggcatccatgaaaatgaaactgattcgtggacggtgatgcaaataaataaaaacagtacatcaggaaccattaaggagacagatgacattgatgatatttttgctttaatgggagtttagatgttcgttcatatgtgagacttttaagtgattaacaaggctagttcagtgttctaagtagaactgctaagatctggaagtaccacctggactcacagaggagctgctttagtgcagcattgcacaggagttcatttcagttcagtctacatttaaagtagcattgtgtcatttcatcaacaagtatttcttttttggcttcaactacatgtcaggtgttaatatgaaaaatctgccacagcctacccttgagaagcagatgtaattccttgagtgaggctagtaagtctctgaaaaactgaataattttatgacttactaggcaatttaataatcgtttgcaaaaaccattgtgtcttgaggtaaatgaggagcgggggtgggagatagcaaggaaacacctgaaaggtcaatttggtcttattggctccattatacataggtccgcctctgaatactaaagtttgtagctcctgacatttatgttttcttgtttatatgttggaattgatcaacaaggtttgccactgcttgtattaccagggactggttacaaccattatttctcttcatttgcttggcttatctcatattaaagtgagtttggagttctccaaaacgttttaattttatttatttgggtaccagtgattgattccaaataaacctttttacaaaaaggcaataaggtggtttatggttacatatgaaatataataggataacaggtagatgagaaagtaaaatgaaaaaatgaggttaggagatacaaagtagacccaggaatgaggctagaacatttataatttggtgttgatgctgtcatctgataggggatgttgctcgtactgttgctctgaggggagtacatcttgagtattttcaaataatgatgtgaagtttgaggtaggtatctttccaatgttctaactttactagaattaggttattaagcttctctagtgcccttaacttttgttacatagagatttaaagaaaaagaaagtagtaccttagtatgtaccgcatccttcttttcctcagccaccctatcataacagaagttatttcccttccattctttatttggctttgttctttccctgtctgccttctccattttctcagttatctctaccagtggttctcaaactttagactttttgagaatcacctggtgggttgctaaaagatgcagattagccctttcccagagactgataaacaggggccagaaacctgcatttttaacatggagcccaagtgattttgatccaggtggcccccaaatccagttatataaacactactttagcttctctcctgaagccttaagtaaactggtttaattcttaatctgtagtcagttttcatattccttttggctttctaccaagtggtagtatccatttagtgccttaaaatacagacaataccaaggagatttcattctagacaagtctagaaatggccattaacttctaagtgtccttgtgttcaatgaatatcctttacctattgggaaatagaaggtaaattagtaagagaactggtgtatagctttgtggaccatagggcttatttgctgagagttgtctatattcatgcacccagtcccctaagtagcctcttttaatacttcatttagctgattcagaaaaaaactccctgggaattaggagatttaaggttcagtcttgcttctcctacttgtggcttcactgagctagtcagtttcctcaggcttaggtttctggatttgaagtggaattttttcaagaatgaaacttttatagctgaaataaactttggagcttatctttcattggaaaaaccagggtggttcagtgagttaaggacaatatagcatggactgggctgccagtctagcatttgtttccaaattcattcatgttcttttggagtatcttcatctcctctcattttcccatcttctgccctttactattctgggaaaatggcaaaaaagcttcacatgtgtccacaaaatgacaatttgtatgtttataaggaattcagtattctgtatcagttactttttccaaataaatccaaatatttaacatttaaaaaaatgcaatctaaagtataccaaactgtaacttacctagtaaatgagattagaaactattgtcagggtcatcgtagtgaattattattattattattttttgagacagagtcttgtgctgttgcccaggctggagcacagtggtatgatctcagttcactgcaccctccacctcctgggctcaagctattctcccacctcagccgcctgagtagctgacactataggcaccaccatgccctggctaattttttaaaaactttgtgtagagatagggtttcaccatgttgcttaggctggtctcaaactcctggactcaagggatccacccactttggtctcccaaagtgctgggattacccacatcctagtaccaactttatcacttctgatggcattaggacacacaggccatttataagagcagtgtttgagacctcctgtgtgtcacttccaatcctcttggccttcatactaaagtcactgctgtggcaaccagtttcaagcagggctgaaccttgcctcttgctctggggatgtctcacttcctgcccctgggcttctcaccagctacaggaactgcctagcacttgggtatgtacaacctggaagaggtgtggggccaccccatcccctcctcaaagaaattcacaggcacagtatgaggctaaagtaacttccatcttggatgctaatctaccatgttgacttctgataaccagttcctggaatgccctctaagatttctacttttatctattaaaagaacacacacacacacacacactgtaaatcctggccttaagcaagttataggctaagttgtaaacagcattcttgcctttccctgaggaggtgacttcagtgtctcacatgttccttcatgtacccccttttctctatggcatataagccctgggtcggggggtaactgtggggatcactgcctgagacatggcttctgtgcataagtccctattaaatgtttctttctgacaaactgg

SEQ ID NO: 186602 - DNA, 2168 bp, Artificial Sequence
  derived and/or modified sequence
atgatggctgcggtgccgccgggcctggagccgtggaaccgtgtgagaatccctaaggcggggaaccgcagcgcagtgacagtgcagaaccccggcgcggcccttggttgagcaatgtttaaagcgtttgaaaaacatgaatttggagggctcaattcaagacctgtttgagttgttttcttccaagtaatgaaaatcagcccttaactaccaaagtatgtgttgtccccagtcagccagtggtggagttggtgttgatgaaggttttgggagcctgcaagttgttgctccgcttgttggactgctgctgcaaaacttttcttttgactgtgaaacatctaggtttgcaagagttcattattttaaaccttgtgatggttgggctggtgagcaggttatgggttctctataaaggtgtcttaaaaaggttgattttgttatatgagcctttgtttggattgcttcaagaggtcgctaggattcaaccaatgccttacttcaaagattttacctttccttctgatatcactgaatttttaggacagccatattttgaagcctttaagaaaaaaatgcctatagcttttgcagctaaaggaataaataaattgctaaataaactgtttttaataaatgagcagtcaccaagagccagtgaagaaaccttgcttggaatttcaaaaaaagctaaacaaatgaagatcaatgtacagaataatgtggatcttggacagccagtaaagaataagagagtcttcaaagaagagtcatcagaatttgatgtgagggctttctgcaaccagctgaaacacaaagctactcaggagaccagttttgattttaaatgttctcaatccagactaaagacaaccaagtattcttctcagaaagtgataggaactcctcatgccaaaagttttgtgcaaagattccgagaggctgagtccttcacacaactttctgaagaaatccagatggcagttgtatggtgcaggagcaaaaaactcaaggctcaggccatttttctgggtaacaaacttcttaaaagcaaccggcttaaacatctggaagctcaaggtactagtttgccaaagaaactagagtgcataaaaacgtctatttgcaaccaccttcttcgtggctcaggtatcaaaacttcaaagcatcatctgagacagagaagatcacagaataaatttttacggagacaaaggaaaccacagagaaagttgcagtcgactcttttaagggaaattcagcagttctctcaagggactcggaagagtgctacagataccagtgctaagtggagactctcacactgtactgtgcatagaactgatctctaccctaacagtaagcagctcttgaatagtggagtttcaatgcctgtcatacaaactaaggagaaaatgattcatgaaaatcttagaggcatccatgaaaatgaaactgattcgtggacggtgatgcaaataaataaaaacagtacatcaggaaccattaaggagacagatgacattgatgatatttttgctttaatgggagtttagatgttcgttcatatgtgagacttttaagtgattaacaaggctagttcagtgttctaagtagaactgctaagatctggaagtaccacctggactcacagaggagctgctttagtgcagcattgcacaggagttcatttcagttcagtctacatttaaagtagcattgtgtcatttcatcaacaagtatttcttttttggcttcaactacatgtcaggtgttaatatgaaaaatctgccacagcctacccttgagaagcagatgtaattccttgagtgaggctagtaagtctctgaaaaactgaataattttatgacttactaggcaatttaataatcgtttgcaaaaaccattgtgtcttgaggtaaatgaggagcgggggtgggagatagcaaggaaacacctgaaaggtcaatttggtcttattggctccattatacataggtccgcctctgaatactaaagtttgtagctcctgacatttatgttttcttgtttatatgttggaattgatcaacaaggtttgccactgcttgtattaccagggactggttacaaccattatttctcttcatttgcttggcttatctcatattaaagtgagtttggagttctcc

SEQ ID NO: 186603 - DNA, 1704 bp, Artificial Sequence
  derived and/or modified sequence
atgatggccgccgtgccccccggcctggagccctggaacagagtgagaatccccaaggccggcaacagaagcgccgtgaccgtgcagaaccccggcgccgccctggacctgtgcatcgccgccgtgatcaaggagtgccacctggtgatcctgagcctgaagagccagaccctggacgccgagaccgacgtgctgtgcgccgtgctgtacagcaaccacaacagaatgggcagacacaagccccacctggccctgaagcaggtggagcagtgcctgaagagactgaagaacatgaacctggagggcagcatccaggacctgttcgagctgttcagcagcaacgagaaccagcccctgaccaccaaggtgtgcgtggtgcccagccagcccgtggtggagctggtgctgatgaaggtgctgggcgcctgcaagctgctgctgagactgctggactgctgctgcaagaccttcctgctgaccgtgaagcacctgggcctgcaggagttcatcatcctgaacctggtgatggtgggcctggtgagcagactgtgggtgctgtacaagggcgtgctgaagagactgatcctgctgtacgagcccctgttcggcctgctgcaggaggtggccagaatccagcccatgccctacttcaaggacttcaccttccccagcgacatcaccgagttcctgggccagccctacttcgaggccttcaagaagaagatgcccatcgccttcgccgccaagggcatcaacaagctgctgaacaagctgttcctgatcaacgagcagagccccagagccagcgaggagaccctgctgggcatcagcaagaaggccaagcagatgaagatcaacgtgcagaacaacgtggacctgggccagcccgtgaagaacaagagagtgttcaaggaggagagcagcgagttcgacgtgagagccttctgcaaccagctgaagcacaaggccacccaggagaccagcttcgacttcaagtgcagccagagcagactgaagaccaccaagtacagcagccagaaggtgatcggcaccccccacgccaagagcttcgtgcagagattcagagaggccgagagcttcacccagctgagcgaggagatccagatggccgtggtgtggtgcagaagcaagaagctgaaggcccaggccatcttcctgggcaacaagctgctgaagagcaacagactgaagcacctggaggcccagggcaccagcctgcccaagaagctggagtgcatcaagaccagcatctgcaaccacctgctgagaggcagcggcatcaagaccagcaagcaccacctgagacagagaagaagccagaacaagttcctgagaagacagagaaagccccagagaaagctgcagagcaccctgctgagagagatccagcagttcagccagggcaccagaaagagcgccaccgacaccagcgccaagtggagactgagccactgcaccgtgcacagaaccgacctgtaccccaacagcaagcagctgctgaacagcggcgtgagcatgcccgtgatccagaccaaggagaagatgatccacgagaacctgagaggcatccacgagaacgagaccgacagctggaccgtgatgcagatcaacaagaacagcaccagcggcaccatcaaggagaccgacgacatcgacgacatcttcgccctgatgggcgtgtag

SEQ ID NO: 186604 - DNA, 1704 bp, Artificial Sequence
  derived and/or modified sequence
atgatggctgccgtaccccccgggctcgaaccctggaaccgtgtaagaatcccaaaggctgggaaccgctctgccgtgaccgttcagaatcctggagccgctctcgatctttgcatcgctgctgtgatcaaggagtgccatctggttattctgagtctcaagtcacagacgttggacgccgaaaccgacgtgctgtgcgcagttttatactcaaaccacaataggatgggcagacacaagccccatctggccctaaagcaggtcgagcagtgtctaaaacgactcaaaaatatgaacctggaggggtctattcaggatttattcgagctatttagctcaaacgagaaccagccactgacaactaaggtttgcgtggtgccctcgcagcccgttgttgagctcgttttaatgaaggtgttaggggcctgtaaattactgctgcggctactggactgttgctgcaaaactttcctgttgaccgttaagcacctgggtctgcaggagtttatcattcttaatctggtgatggttggactggtgagcagactgtgggtgctctataagggtgtcctgaagcgactcatactcctgtacgagccactgttcgggttactgcaggaggtcgcccgaatccagccgatgccgtattttaaggatttcactttccccagcgacatcactgaatttttaggccaaccttacttcgaagcctttaagaaaaagatgcccatcgcattcgccgccaaagggattaataaactgcttaacaaactgtttctgattaatgaacagagcccccgggcctccgaggagaccctgctgggcatttcaaagaaggccaaacagatgaagatcaacgtgcagaacaacgtggacctcggacagcctgtgaaaaacaagagggtgttcaaggaggaaagtagcgagttcgatgtgcgagctttttgcaatcagctgaagcacaaggccacccaagagacaagcttcgacttcaagtgttcccagagtcgattgaaaacaaccaaatactcctcccaaaaagtgattggaaccccacacgccaaaagcttcgtgcagaggttccgcgaagcagaatctttcactcaattgtctgaagagatacaaatggccgtggtgtggtgtcgctcaaagaaactgaaggctcaggccatcttccttggcaacaaacttctgaaatcaaataggctgaagcaccttgaggcccagggtacctcgctgcccaaaaaactggagtgcatcaagacttctatctgtaaccacctgctgaggggaagcggtatcaagacaagcaaacatcacctcaggcagcggcgatcccaaaataaatttttgcgtcgacagaggaagccccagaggaagctgcaatctaccttactgagagaaattcaacagtttagccaaggaacccgcaaatcagctacagacactagcgcaaaatggcggctctcacactgcaccgtgcaccgaactgacttatacccaaatagcaagcagctgttaaacagcggggtgtccatgcctgttattcagacgaaagagaagatgattcatgagaatctgagagggattcatgaaaacgaaaccgactcctggacagttatgcagattaacaagaactctactagcggcacaatcaaggagacagacgacatagatgacattttcgccctgatgggggtgtag

SEQ ID NO: 186605 - DNA, 1704 bp, Artificial Sequence
  derived and/or modified sequence
atgatggctgctgtgcccccaggcctggagccctggaacagagtgcgcatccccaaggccggcaacagatctgctgtgacagtgcagaaccctggagctgccctggacctgtgcatcgctgctgtgatcaaggagtgccacctggtgatcctgagcctgaagagccagaccctggatgctgagacagatgtgctgtgtgctgtgctgtacagcaaccacaacaggatgggccgccacaagccccacctggccctgaagcaggtggagcagtgcctgaagaggctgaagaacatgaacctggagggcagcatccaggacctgtttgagctgttcagcagcaatgaaaaccagcccctgaccaccaaggtgtgtgtggtgcccagccagcctgtggtggagctggtgctgatgaaggtgctgggcgcctgcaagctgctgctgcggctgctggactgctgctgcaagaccttcctgctgactgtgaagcacctgggcctgcaggagttcatcatcctgaacctggtgatggtgggcctggtgtcccggctgtgggtgctgtacaagggcgtgctgaagaggctcatcctgctgtatgagcccctgtttggcctgctgcaggaggtggcccgcatccagcccatgccctacttcaaggacttcaccttccccagcgacatcacagagttcctgggccagccctactttgaggccttcaagaagaagatgcccatcgcctttgctgccaagggcatcaacaagctgctgaacaagctgttcctgatcaatgagcagagcccccgggccagcgaggagaccctgctgggcatcagcaagaaggccaagcagatgaagatcaacgtgcagaacaacgtggacctgggccagcctgtgaagaacaagagggtcttcaaggaggagagcagcgagtttgatgtgcgggccttctgcaaccagctgaagcacaaggccacccaggagaccagctttgacttcaagtgcagccagagccggctgaagaccaccaagtacagcagccagaaggtgattggcacccctcatgccaagagctttgtgcagcgcttccgggaggccgagagcttcacccagctgtctgaggagatccagatggctgtggtgtggtgccgcagcaagaagctgaaggcccaggccatcttcctgggcaacaagctgctgaagagcaaccggctgaagcacctggaggcccagggcaccagcctgcccaagaagctggagtgcatcaagaccagcatctgcaaccacctgctgcggggcagcggcatcaagaccagcaagcaccacctgcggcagaggaggagccagaacaagttcctgcggcggcagaggaagccccagaggaagctgcagagcaccctgctgcgggagatccagcagttcagccagggcaccaggaagagcgccacagacaccagcgccaagtggaggctgagccactgcaccgtgcacaggacagacctgtaccccaacagcaagcagctgctgaacagcggcgtgtccatgcctgtgatccagaccaaggagaagatgattcatgagaacctgcggggcatccatgaaaatgaaacagacagctggacagtgatgcagatcaacaagaacagcaccagcggcaccatcaaggagacagatgacattgatgacatctttgccctgatgggcgtgtag

SEQ ID NO: 186606 - DNA, 1704 bp, Artificial Sequence
  derived and/or modified sequence
atgatggccgccgtgccccccggcctggagccctggaaccgggtgcgcatacctaaggctggcaaccggagcgccgtgaccgtgcagaacccaggtgccgctctggatctttgtattgcagccgtgatcaaggagtgccatttggtgattctttctctgaaaagtcagactctcgatgccgaaacagacgtgctgtgcgctgtactttacagcaatcataaccggatgggaagacacaaaccacatctggcactgaaacaggtggagcaatgcttaaagaggttgaaaaacatgaacctcgaaggaagcatacaggacctgtttgagcttttctccagtaacgagaatcagcctttgacaactaaggtttgcgtagttccgtcgcaaccagtggtggagttggttctcatgaaggtgcttggcgcctgtaaactcttgctgcgcctcctggactgctgttgcaaaaccttcctgctgacggtgaagcatctgggacttcaggagtttataatcctaaacctcgttatggtcggacttgtgtctagactatgggtgctttataagggggtgctgaagagactgattctgttgtatgaaccattgttcggcctgctccaggaggtagcacgtattcagccaatgccatattttaaagatttcacttttcccagcgacattacggaattcctggggcagccatacttcgaagcgtttaaaaagaagatgcccattgctttcgccgcgaaaggcatcaacaagctgttaaataagctgttcctgatcaatgagcagagtcctcgagcttcagaggagaccctgctgggtatctctaagaaagctaagcagatgaaaatcaatgtgcagaacaatgttgacctcggtcaacccgtcaagaataagcgggtttttaaagaggagtccagcgagttcgatgttcgggcattctgtaaccagcttaaacataaggcaactcaagagacaagctttgactttaagtgtagccagtccagactgaaaacaaccaagtacagctcccaaaaagtgattggcacacctcacgccaagtcattcgttcaacgtttcagggaggcagagtcttttacccagttgtctgaggagattcagatggccgttgtttggtgtaggagtaagaagctgaaggcccaagctattttcttgggcaataagctattgaaaagtaatagattaaagcacctggaagcccaggggacctcacttccgaagaagcttgagtgtatcaagacttctatttgcaatcatcttctcagggggagtgggatcaaaacctcaaaacatcacctgaggcagcgacgcagtcagaacaaattcctgagacggcagaggaagccacagcgcaagctgcaatccactcttttgcgcgagatacagcagttttcccaaggtacaagaaagagcgctaccgacacaagtgccaaatggcgcctctctcactgtacagtgcataggacagatctctatcccaacagtaaacagctgctaaacagtggggtctctatgcctgtcatccagaccaaggaaaaaatgatccacgagaatctgcggggtatacacgagaacgaaaccgacagttggaccgttatgcagatcaataagaactcaacaagcggcaccatcaaggagacggacgatatcgacgatatctttgccctgatgggcgtctag

SEQ ID NO: 186607 - DNA, 1704 bp, Artificial Sequence
  derived and/or modified sequence
atgatggccgcagtgccgccagggcttgagccttggaatcgggttcgcatacctaaggcagggaaccgctccgccgtcacagtacaaaaccccggagccgctctcgatctgtgtattgctgctgtcatcaaggagtgtcacctggtcattctgtcactaaagtcacagacgctggatgcagagacagatgtgctgtgcgccgtgctttactccaatcacaatcggatggggagacacaagccccacctagccctgaagcaagtcgagcagtgtcttaaaagactcaaaaatatgaaccttgaaggcagcatccaggatttgtttgagctcttcagcagcaatgaaaatcaacctctgacaactaaagtgtgcgtcgttccatctcaacctgtcgtggaactggttttgatgaaggtattgggagcctgtaagcttttgctgagactgctcgactgctgctgtaaaacgttccttctgaccgtgaagcaccttgggttgcaagagtttattattctgaacctggtgatggtcggcctggtaagcaggctctgggtgctgtataagggagttctgaagcgactgattcttctgtacgagccccttttcggattgctgcaggaagtagctaggattcagcccatgccatatttcaaagatttcacatttccttccgacattacagagttcttaggccaaccgtattttgaggcgttcaaaaaaaagatgcccatagccttcgctgctaagggtatcaacaaactccttaacaagcttttcctcataaacgaacaaagcccaagggcatccgaagagacccttctcggcatctctaagaaggccaagcagatgaaaattaatgtgcagaacaatgtagacctgggacagcccgtcaaaaacaagagagtcttcaaggaagagtcatctgaatttgacgtgagggctttctgcaaccagctgaagcataaagctacccaggaaacttccttcgatttcaaatgtagccagtcaagattgaagacaaccaaatactcttcacagaaagtaattggcactcctcatgcaaagtcattcgtccaaaggtttcgcgaggctgagagctttactcagctgtcagaggaaatccaaatggctgttgtctggtgtcggtcaaaaaagttgaaagcacaggcaatctttctgggcaataaactgcttaagtcaaaccgcctgaagcaccttgaggcccaaggaacttccctccctaagaagttagagtgtatcaaaacatcgatctgtaatcacttgctgcgcggatctggcatcaaaacctccaagcaccacttgcgacagaggcggtcccaaaacaaattcctacgcagacagcggaagcctcagaggaagctccagtcaaccctgttgagagagatacaacagttctcacagggcacccgcaagagtgctactgacacatctgcaaagtggcgcctttcccattgcaccgtccaccgcaccgacctctaccctaatagcaagcagttacttaacagcggtgtgtctatgcccgtgatccagactaaggaaaagatgatccacgagaatttgcgcggtatccacgagaatgagactgactcgtggaccgttatgcagattaacaagaacagcacaagtggtacgataaaagaaactgatgatattgacgatattttcgctctcatgggcgtatag

SEQ ID NO: 186608 - protein, 360 aa, Artificial Sequence
  derived and/or modified sequence
MALSRVCWARSAVWGSAVTPGHFVTRRLQLGRSGLAWGAPRSSKLHLSPKADVKNLMSYVVTKTKAINGKYHRFLGRHFPRFYVLYTIFMKGLQMLWADAKKARRIKTNMWKHNIKFHQLPYREMEHLRQFRQDVTKCLFLGIISIPPFANYLVFLLMYLFPRQLLIRHFWTPKQQTDFLDIYHAFRKQSHPEIISYLEKVIPLISDAGLRWRLTDLCTKIQRGTHPAIHDILALRECFSNHPLGMNQLQALHVKALSRAMLLTSYLPPPLLRHRLKTHTTVIHQLDKALAKLGIGQLTAQEVKSACYLRGLNSTHIGEDRCRTWLGEWLQISCSLKEAELSLLLHNVVLLSTNYLGTRR

SEQ ID NO: 186609 - protein, 304 aa, Artificial Sequence
  derived and/or modified sequence
MSYVVTKTKAINGKYHRFLGRHFPRFYVLYTIFMKGLQMLWADAKKARRIKTNMWKHNIKFHQLPYREMEHLRQFRQDVTKCLFLGIISIPPFANYLVFLLMYLFPRQLLIRHFWTPKQQTDFLDIYHAFRKQSHPEIISYLEKVIPLISDAGLRWRLTDLCTKIQRGTHPAIHDILALRECFSNHPLGMNQLQALHVKALSRAMLLTSYLPPPLLRHRLKTHTTVIHQLDKALAKLGIGQLTAQEVKSACYLRGLNSTHIGEDRCRTWLGEWLQISCSLKEAELSLLLHNVVLLSTNYLGTRR

SEQ ID NO: 186610 - DNA, 1083 bp, Artificial Sequence
  derived and/or modified sequence
atggccctgagcagagtgtgctgggccagaagcgccgtgtggggcagcgccgtgacccccggccacttcgtgaccagaagactgcagctgggcagaagcggcctggcctggggcgcccccagaagcagcaagctgcacctgagccccaaggccgacgtgaagaacctgatgagctacgtggtgaccaagaccaaggccatcaacggcaagtaccacagattcctgggcagacacttccccagattctacgtgctgtacaccatcttcatgaagggcctgcagatgctgtgggccgacgccaagaaggccagaagaatcaagaccaacatgtggaagcacaacatcaagttccaccagctgccctacagagagatggagcacctgagacagttcagacaggacgtgaccaagtgcctgttcctgggcatcatcagcatcccccccttcgccaactacctggtgttcctgctgatgtacctgttccccagacagctgctgatcagacacttctggacccccaagcagcagaccgacttcctggacatctaccacgccttcagaaagcagagccaccccgagatcatcagctacctggagaaggtgatccccctgatcagcgacgccggcctgagatggagactgaccgacctgtgcaccaagatccagagaggcacccaccccgccatccacgacatcctggccctgagagagtgcttcagcaaccaccccctgggcatgaaccagctgcaggccctgcacgtgaaggccctgagcagagccatgctgctgaccagctacctgcccccccccctgctgagacacagactgaagacccacaccaccgtgatccaccagctggacaaggccctggccaagctgggcatcggccagctgaccgcccaggaggtgaagagcgcctgctacctgagaggcctgaacagcacccacatcggcgaggacagatgcagaacctggctgggcgagtggctgcagatcagctgcagcctgaaggaggccgagctgagcctgctgctgcacaacgtggtgctgctgagcaccaactacctgggcaccagaagatag

SEQ ID NO: 186611 - DNA, 915 bp, Artificial Sequence
  derived and/or modified sequence
atgagctacgtggtgaccaagaccaaggccatcaacggcaagtaccacagattcctgggcagacacttccccagattctacgtgctgtacaccatcttcatgaagggcctgcagatgctgtgggccgacgccaagaaggccagaagaatcaagaccaacatgtggaagcacaacatcaagttccaccagctgccctacagagagatggagcacctgagacagttcagacaggacgtgaccaagtgcctgttcctgggcatcatcagcatcccccccttcgccaactacctggtgttcctgctgatgtacctgttccccagacagctgctgatcagacacttctggacccccaagcagcagaccgacttcctggacatctaccacgccttcagaaagcagagccaccccgagatcatcagctacctggagaaggtgatccccctgatcagcgacgccggcctgagatggagactgaccgacctgtgcaccaagatccagagaggcacccaccccgccatccacgacatcctggccctgagagagtgcttcagcaaccaccccctgggcatgaaccagctgcaggccctgcacgtgaaggccctgagcagagccatgctgctgaccagctacctgcccccccccctgctgagacacagactgaagacccacaccaccgtgatccaccagctggacaaggccctggccaagctgggcatcggccagctgaccgcccaggaggtgaagagcgcctgctacctgagaggcctgaacagcacccacatcggcgaggacagatgcagaacctggctgggcgagtggctgcagatcagctgcagcctgaaggaggccgagctgagcctgctgctgcacaacgtggtgctgctgagcaccaactacctgggcaccagaagatag

SEQ ID NO: 186612 - DNA, 1083 bp, Artificial Sequence
  derived and/or modified sequence
atggctctgtctcgtgtgtgttgggcacgatcagctgtgtggggaagcgctgtgacccctggacattttgtcacccgaagacttcagctgggccggtctggcctggcctggggggccccccgtagttccaaactgcacctttcgccgaaggctgacgtgaagaatttgatgtcctacgttgttactaagacgaaagcgataaacggcaagtaccatcggtttctgggacgacactttccccgattttacgtcctgtataccatttttatgaagggcctgcagatgctctgggccgatgctaaaaaagcccgtagaattaaaaccaacatgtggaagcataatatcaaattccaccagctaccataccgcgaaatggaacacttaaggcagttcaggcaggatgttactaagtgtcttttcctcggcattatcagcatccctcccttcgccaactatctagtattcctgcttatgtacctattcccacgccaactcttgatcaggcacttttggacccccaaacagcagacagacttcctcgacatttatcacgcttttagaaagcagtctcatcccgagatcattagctatttagagaaggtgattccactcattagtgatgctgggctacggtggcgactgactgacctctgtactaagatccagaggggaacccatccagcgatccacgatatcctggctctccgggagtgcttctccaatcacccactcgggatgaaccagcttcaggcgctccacgtgaaagccctctctcgcgccatgttgttgacaagttaccttccccctcctctgctgcgacaccgcctgaaaactcacacgaccgtgatacatcaactcgataaggcactagcaaagctggggattggccaactcacagcccaggaggtgaaaagcgcctgctatctaaggggactaaatagcacgcacattggcgaagacagatgccgaacgtggcttggagaatggctccaaatatcttgctcgctgaaggaggcggagcttagcctgttgctgcacaacgtagtactattaagtacaaactacctgggcacgaggcggtag

SEQ ID NO: 186613 - DNA, 915 bp, Artificial Sequence
  derived and/or modified sequence
atgtcctatgtagtgacaaagacaaaagccatcaacggcaaataccaccgctttcttggtcgtcactttccccgtttttacgtgctttatacgatattcatgaagggactgcaaatgctctgggctgatgccaaaaaggcccgacggattaagactaatatgtggaaacacaatattaaatttcatcagctgccttatcgggaaatggaacatcttagacagttcaggcaagacgtgaccaaatgcttgtttctgggaatcatttccatccccccttttgctaattatctcgtgttcctgcttatgtatctgttcccacggcagcttcttatccggcacttttggacccccaagcagcagaccgactttctggacatctaccatgcatttaggaagcagtctcacccagagatcatcagctatctggaaaaagtgattccattgatctctgatgcagggctgaggtggaggctcacagacctctgtacaaagatccagagagggacccatcctgctatccacgacatacttgctttgcgggagtgttttagcaaccatccgttaggcatgaaccagttgcaggccctgcacgtcaaggccctgagccgcgcaatgctcctcacttcttacctcccgccccccttgctccgccatcgtctgaaaactcatactaccgtgatccatcagctggacaaagcgcttgccaaacttggaataggccagctcaccgctcaggaggttaagagcgcttgttaccttaggggtctaaattctactcatattggcgaggacagatgtcgcacctggctgggagagtggctgcagatctcatgctcacttaaagaagctgaactgagcctcctcctgcacaacgtcgtactgctctcaacgaattacctggggaccagaagatag

SEQ ID NO: 186614 - DNA, 2112 bp, Artificial Sequence
  derived and/or modified sequence
aaagacaacctcttctctcccgcttctctcgctgtgaagatggcgctctccagggtgtgctgggctcggtcggctgtgtggggctcggcagtcacccctggacattttgtcacccggaggctgcaacttggtcgctctggcctggcttggggggcccctcggtcttcaaagcttcacctttctccaaaggcagatgtgaagaacttgatgtcttatgtggtaaccaagacaaaagcgattaatgggaaataccatcgtttcttgggtcgtcatttcccccgcttctatgtcctgtacacaatcttcatgaaaggattgcagatgttatgggctgatgccaaaaaggctagaagaataaagacaaatatgtggaagcacaatataaagtttcatcaacttccataccgggagatggagcatttgagacagttccgccaagacgtcaccaagtgtcttttcctaggtattatttccattccaccttttgccaactacctggtcttcttgctaatgtacctgtttcccaggcaactactgatcaggcatttctggaccccaaaacaacaaactgatttcttagatatctatcatgctttccggaagcagtcccacccagaaattattagttatttagaaaaggtcatccctctcatttctgatgcaggactccggtggcgtctgacagatctgtgcaccaagatacagcgtggtacccacccagcaatacatgatatcttggctctgagagagtgtttctctaaccatcctctgggcatgaaccaactccaggctttgcacgtgaaagccttgagccgggccatgcttctcacatcttacctgcctcctcccttgttgagacatcgtttgaagactcatacaactgtgattcaccaactggacaaggctttggcaaagctggggattggccagctgactgctcaggaagtaaaatcggcttgttatctccgtggcctgaattctacgcatattggtgaagataggtgtcgaacttggctgggagaatggctgcagatttcctgcagcctgaaagaagctgagctgtctctcttgctgcacaacgtggtcctgctctccaccaactaccttgggacaaggcgctgaatgaaccatggagcggatggcattgtcctgcagtcgtatagtatagcagtgcaggaacaaacagcacttgccagcaaagtctgtgtgtactgttaagtgtgtgggaggcagagagaggagcaggggccatgggcttcacagcatggcacacatgtgggaactgcagacattcctctcacagctagaactgaaacaaaccctcttgctaggggtggtccgtgtgaggtgtcatcctgtccccctcataattactaatagctggaactggcagcagcctctactgggcttttactgtgatgtgttcagttcatgtcctaggaagtcagcttttgccccaggtgggaatccttatttggcttaggactgatccacttccatgttacttacatctgtgggtttttgttgttgctgttagaaaatttgtggctggtgaaaacagcactcctttggctggagcacatgtgtccgtgcatgtacttgggtgtttccctccatcctttctgatatgaccaaaaatcaagttgttttgttttttgtcaccttcactggcatgggctaaccacttctttttcaaaccctctgaacacctttttctgatgggtaacttgcaggaatattctattggaaaagataacaggaagtacaagtgcttcttgaccccttcctcaatgtttctagccttcactctccattgtcttttctgggctgtattacagccctctgtggatcttcaactctgctgcctccactgtgatgcagcagtccaactgtaactgacagtggctgccttctctgggccatggatcacacctgtaaggtactaattactgcccagcctggggagatcaggagaggtctgcatagttagtaagttgggtttagcttttgtgtgtgcatcagtgacttagagttctgtaataacttattgtaaatgcatgaagcactgtttttaaacccaagtaaagactgcttgaaacctgttgatggaaa

SEQ ID NO: 186615 - DNA, 1389 bp, Artificial Sequence
  derived and/or modified sequence
aaagacaacctcttctctcccgcttctctcgctgtgaagatggcgctctccagggtcttcaaagcttcacctttctccaaaggcagatgtgaagaacttgatgtcttatgtggtaaccaagacaaaagcgattaatgggaaataccatcgtttcttgggtcgtcatttcccccgcttctatgtcctgtacacaatcttcatgaaaggattgcagatgttatgggctgatgccaaaaaggctagaagaataaagacaaatatgtggaagcacaatataaagtttcatcaacttccataccgggagatggagcatttgagacagttccgccaagacgtcaccaagtgtcttttcctaggtattatttccattccaccttttgccaactacctggtcttcttgctaatgtacctgtttcccaggcaactactgatcaggcatttctggaccccaaaacaacaaactgatttcttagatatctatcatgctttccggaagcagtcccacccagaaattattagttatttagaaaaggtcatccctctcatttctgatgcaggactccggtggcgtctgacagatctgtgcaccaagatacagcgtggtacccacccagcaatacatgatatcttggctctgagagagtgtttctctaaccatcctctgggcatgaaccaactccaggctttgcacgtgaaagccttgagccgggccatgcttctcacatcttacctgcctcctcccttgttgagacatcgtttgaagactcatacaactgtgattcaccaactggacaaggctttggcaaagctggggattggccagctgactgctcaggaagtaaaatcggcttgttatctccgtggcctgaattctacgcatattggtgaagataggtgtcgaacttggctgggagaatggctgcagatttcctgcagcctgaaagaagctgagctgtctctcttgctgcacaacgtggtcctgctctccaccaactaccttgggacaaggcgctgaatgaaccatggagcggatggcattgtcctgcagtcgtatagtatagcagtgcaggaacaaacagcacttgccagcaaagtctgtgtgtactgttaagtgtgtgggaggcagagagaggagcaggggccatgggcttcacagcatggcacacatgtgggaactgcagacattcctctcacagctagaactgaaacaaaccctcttgctaggggtggtccgtgtgaggtgtcatcctgtccccctcataattactaatagctggaactggcagcagcctctactgggcttttactgtgatgtgttcagttcatgtcctaggaagtcagcttttgccccaggtgggaatccttatttggcttaggactgatccactt

SEQ ID NO: 186616 - DNA, 1083 bp, Artificial Sequence
  derived and/or modified sequence
atggccctgagccgggtgtgctgggcccggtctgctgtgtggggcagcgctgtgaccccaggccactttgtgacccggcggctgcagctgggccgcagcggcctggcctggggcgcccccaggagcagcaagctgcacctgagccccaaggcagatgtgaagaacctgatgtcctatgtggtgaccaagaccaaggccatcaacgggaagtaccaccgcttcctgggccgccacttcccccgcttctacgtgctgtacaccatcttcatgaagggcctgcagatgctgtgggcagatgccaagaaggcccggcgcatcaagaccaacatgtggaagcacaacatcaagttccaccagctgccctaccgggagatggagcacctgcggcagttccggcaggatgtgaccaagtgcctcttcctgggcatcatcagcatccccccatttgccaactacctggtgttcctgctgatgtacctgttcccccggcagctgctgatccgccacttctggacccccaagcagcagacagacttcctggacatctaccacgccttcaggaagcagagccaccctgagatcatctcctacctggagaaggtgatccccctcatcagtgatgctggcctgcgctggaggctgacagacctgtgcaccaagatccagaggggcacccacccagccatccatgacatcctggccctgcgggagtgcttcagcaaccaccccctgggcatgaaccagctgcaggccctgcacgtgaaggccctgagccgggccatgctgctgaccagctacctgcccccacccctgctgcggcaccggctgaagacccacaccaccgtcatccaccagctggacaaggccctggccaagctgggcatcggccagctgacagcccaggaggtgaagagcgcctgctacctgcggggcctgaacagcacccacatcggagaagatcgctgcaggacctggctgggggagtggctgcagatcagctgcagcctgaaggaggccgagctgagcctgctgctgcacaacgtggtgctgctgagcaccaactacctgggcaccaggaggtag

SEQ ID NO: 186617 - DNA, 915 bp, Artificial Sequence
  derived and/or modified sequence
atgtcctatgtggtgaccaagaccaaggccatcaacgggaagtaccaccgcttcctgggccgccacttcccccgcttctacgtgctgtacaccatcttcatgaagggcctgcagatgctgtgggcagatgccaagaaggcccggcgcatcaagaccaacatgtggaagcacaacatcaagttccaccagctgccctaccgggagatggagcacctgcggcagttccggcaggatgtgaccaagtgcctcttcctgggcatcatcagcatccccccatttgccaactacctggtgttcctgctgatgtacctgttcccccggcagctgctgatccgccacttctggacccccaagcagcagacagacttcctggacatctaccacgccttcaggaagcagagccaccctgagatcatctcctacctggagaaggtgatccccctcatcagtgatgctggcctgcgctggaggctgacagacctgtgcaccaagatccagaggggcacccacccagccatccatgacatcctggccctgcgggagtgcttcagcaaccaccccctgggcatgaaccagctgcaggccctgcacgtgaaggccctgagccgggccatgctgctgaccagctacctgcccccacccctgctgcggcaccggctgaagacccacaccaccgtcatccaccagctggacaaggccctggccaagctgggcatcggccagctgacagcccaggaggtgaagagcgcctgctacctgcggggcctgaacagcacccacatcggagaagatcgctgcaggacctggctgggggagtggctgcagatcagctgcagcctgaaggaggccgagctgagcctgctgctgcacaacgtggtgctgctgagcaccaactacctgggcaccaggaggtag

SEQ ID NO: 186618 - DNA, 1083 bp, Artificial Sequence
  derived and/or modified sequence
atggccctgagccgggtgtgctgggcccggagcgccgtgtggggcagcgccgtgacaccaggccattttgtgacacggagactacaactcgggcggtcaggtttggcctggggggccccaaggagtagtaaactgcatctgtcacctaaggccgatgtcaagaatttgatgtcctacgttgtgaccaaaacaaaggctataaacggtaaataccaccgattcctgggtcgacactttcctcgtttttacgtcctttacacgatctttatgaaaggcctgcagatgctgtgggccgacgctaagaaggcccgccgaattaagacaaacatgtggaaacataatataaagtttcatcagctgccctaccgcgagatggaacatcttcgacagtttaggcaggacgtgacaaaatgtcttttcctagggatcatctccatccccccctttgccaattacctggtcttcctcctcatgtatctatttcctcgccaactgctgattaggcatttttggacgccaaagcagcagactgacttcctcgacatttaccatgctttcaggaagcagtcgcatccggaaattatcagttatctggaaaaggttatccccttgatctcagacgcggggctacgctggcggctgaccgatctctgtacaaagattcaacggggcacccatccagccattcacgacattttagccctgagagaatgcttctccaaccaccctctgggcatgaatcagctgcaggctctccacgtaaaagcactgagtagagccatgctgcttacttcatatctaccacctcctctgctcagacaccgcctgaagactcataccactgtgatccatcagttagacaaggcacttgcaaaactcggtatcgggcaactaaccgcccaggaggtcaagtccgcttgctacttaaggggactcaattctactcacatcggggaagatcgctgtagaacctggttgggcgagtggttacagattagctgctctcttaaggaggcggagctgagtctcttactgcataatgtggtactgctctctactaattatctgggcactaggcggtag

SEQ ID NO: 186619 - DNA, 915 bp, Artificial Sequence
  derived and/or modified sequence
atgagctacgtggtgaccaagaccaaggccatcaacggcaagtaccacagatttctgggccggcattttcccaggttctatgtgctctacactatcttcatgaagggcttgcagatgctgtgggctgatgcaaaaaaagctaggaggatcaagaccaacatgtggaagcataatataaaattccaccagctcccctaccgggagatggaacacttacgtcagtttcgacaagacgtgaccaagtgtctgtttcttggcataattagtattccacctttcgccaattacctggtgttcctccttatgtaccttttcccccgacaactgttgatccgccacttttggactcctaaacagcaaactgattttcttgatatctatcacgcctttagaaagcagtcccacccagagatcatttcttatctagagaaagtgatccctctcatatcagatgcaggccttagatggcgcctcaccgatctgtgcacaaagatacagcgcggaacacaccctgccattcacgatattttggctcttagggaatgtttttctaatcatccccttgggatgaaccagttacaggccctgcacgtgaaggccttgtcgcgtgccatgttactgacgtcgtatcttcctcctcccctgctccgccaccggctgaaaactcatactactgtgattcatcagctggacaaagcgctggcaaagctgggtatcggccagcttaccgcccaagaggtcaagtctgcttgttacctaaggggactaaattcaacacacattggagaagataggtgccgaacttggctcggagagtggcttcagatatcttgttccttaaaggaagccgaactttctttgttattgcacaatgtggttttactatccacaaattacctcggcaccagacgctag

SEQ ID NO: 186620 - DNA, 1083 bp, Artificial Sequence
  derived and/or modified sequence
atggccctttccagggtctgttgggctagatcggctgtctggggatctgccgtcacacccggtcatttcgtaactcgaagacttcagctcgggagatccgggctggcttggggcgctcctcgcagtagcaagcttcacttgagtcccaaggcagacgtaaagaacctgatgtcgtacgtagtaacaaagaccaaagccattaacggcaagtatcatagattcctcggcagacatttccccagattctacgttctgtataccattttcatgaaaggtctccagatgttatgggccgacgctaagaaagctcggagaatcaaaacaaatatgtggaagcataacatcaaattccatcagctcccgtatagggagatggagcacctaagacaattcaggcaggacgtgactaaatgcctgttcctgggcatcatctctattccgccatttgctaattatctagtgttcctcctaatgtatctgttccctcggcaactcctcattcgccatttttggacgcctaaacagcaaacagacttccttgatatctatcatgcatttcggaagcagagccatcccgaaatcatcagctacctcgagaaagtgataccattgatcagcgatgctggactgcggtggcgtttaactgatttgtgtaccaagatccaacggggaactcatccagccattcacgacatacttgccctccgggaatgcttcagcaatcaccctttggggatgaatcaactgcaggctcttcacgtcaaggcactgagtagggcaatgttgttgacctcttacctgcctcccccactcctgagacacaggcttaaaacacatactaccgtcattcatcagcttgacaaggctctagccaaattgggcatcgggcagcttacagcacaggaggttaagtcagcctgttacctccgcggtttgaatagcactcacatcggggaggatcggtgccgaacatggctgggagagtggctgcagatctcatgttctctcaaggaggccgagctgagcttattactgcacaacgtggtgctgctctctaccaactatttaggaactcgtcgttag

SEQ ID NO: 186621 - DNA, 915 bp, Artificial Sequence
  derived and/or modified sequence
atgagctacgtggtgacaaaaacgaaggcaattaatggcaagtaccataggttcctgggtcggcactttccgcgtttctacgttctgtatacaatttttatgaagggcttacaaatgctatgggctgatgctaagaaagctcggaggatcaaaacaaacatgtggaaacataatattaagttccatcagctgccctatagagaaatggaacacctccgccagtttcggcaggacgtaacaaaatgcctgttcctgggcatcatctctataccgccatttgcgaactacctggtgttcctcttgatgtatttgtttcctcgacagcttctcatacgccatttctggactcctaaacagcagaccgacttcctcgacatctatcacgccttccgcaaacagagtcatcccgagatcatctcatatttggagaaggtcatccccctcattagtgatgccggacttcgttggcggctgaccgacctctgtacaaagatccagagagggacccaccccgcaatacatgatattttagccttgagggagtgcttctctaaccatcctctgggtatgaatcagctgcaggccctccacgtgaaggccctctctagagcaatgctgctgacttcttacctgcctccccctctgctaagacatcgcctgaagacccacacaacagtgattcaccagctggataaggccttagctaagttgggaattgggcagcttaccgcccaggaagtcaagagcgcctgctacctgagaggcctgaactctacccacatcggcgaggacagatgtcggacctggctgggcgaatggctgcagataagctgcagcttgaaggaggcagagttgtctctgttactacacaacgttgttttgctctcaactaattatctcgggactcgacgttag

SEQ ID NO: 186622 - protein, 2828 aa, Artificial Sequence
  derived and/or modified sequence
MPKRAHWGALSVVLILLWGHPRVALACPHPCACYVPSEVHCTFRSLASVPAGIAKHVERINLGFNSIQALSETSFAGLTKLELLMIHGNEIPSIPDGALRDLSSLQVFKFSYNKLRVITGQTLQGLSNLMRLHIDHNKIEFIHPQAFNGLTSLRLLHLEGNLLHQLHPSTFSTFTFLDYFRLSTIRHLYLAENMVRTLPASMLRNMPLLENLYLQGNPWTCDCEMRWFLEWDAKSRGILKCKKDKAYEGGQLCAMCFSPKKLYKHEIHKLKDMTCLKPSIESPLRQNRSRSIEEEQEQEEDGGSQLILEKFQLPQWSISLNMTDEHGNMVNLVCDIKKPMDVYKIHLNQTDPPDIDINATVALDFECPMTRENYEKLWKLIAYYSEVPVKLHRELMLSKDPRVSYQYRQDADEEALYYTGVRAQILAEPEWVMQPSIDIQLNRRQSTAKKVLLSYYTQYSQTISTKDTRQARGRSWVMIEPSGAVQRDQTVLEGGPCQLSCNVKASESPSIFWVLPDGSILKAPMDDPDSKFSILSSGWLRIKSMEPSDSGLYQCIAQVRDEMDRMVYRVLVQSPSTQPAEKDTVTIGKNPGESVTLPCNALAIPEAHLSWILPNRRIINDLANTSHVYMLPNGTLSIPKVQVSDSGYYRCVAVNQQGADHFTVGITVTKKGSGLPSKRGRRPGAKALSRVREDIVEDEGGSGMGDEENTSRRLLHPKDQEVFLKTKDDAINGDKKAKKGRRKLKLWKHSEKEPETNVAEGRRVFESRRRINMANKQINPERWADILAKVRGKNLPKGTEVPPLIKTTSPPSLSLEVTPPFPAISPPSASPVQTVTSAEESSADVPLLGEEEHVLGTISSASMGLEHNHNGVILVEPEVTSTPLEEVVDDLSEKTEEITSTEGDLKGTAAPTLISEPYEPSPTLHTLDTVYEKPTHEETATEGWSAADVGSSPEPTSSEYEPPLDAVSLAESEPMQYFDPDLETKSQPDEDKMKEDTFAHLTPTPTIWVNDSSTSQLFEDSTIGEPGVPGQSHLQGLTDNIHLVKSSLSTQDTLLIKKGMKEMSQTLQGGNMLEGDPTHSRSSESEGQESKSITLPDSTLGIMSSMSPVKKPAETTVGTLLDKDTTTATTTPRQKVAPSSTMSTHPSRRRPNGRRRLRPNKFRHRHKQTPPTTFAPSETFSTQPTQAPDIKISSQVESSLVPTAWVDNTVNTPKQLEMEKNAEPTSKGTPRRKHGKRPNKHRYTPSTVSSRASGSKPSPSPENKHRNIVTPSSETILLPRTVSLKTEGPYDSLDYMTTTRKIYSSYPKVQETLPVTYKPTSDGKEIKDDVATNVDKHKSDILVTGESITNAIPTSRSLVSTMGEFKEESSPVGFPGTPTWNPSRTAQPGRLQTGIPVTTSGENLTDPPLLKELEDVDFTSEFLSSLTVSTPFHQEEAGSSTTLSSIKVEVASSQAETTTLDQDHLETTVAILLSETRPQNHTPTAARMKEPASSSPSTILMSLGQTTTTKPALPSPRISQASRDSKENVFLNYVGNPETEATPVNNEGTQHMSGPNELSTPSSDQDAFNLSTKLELEKQVFGSRSLPRGPDSQRQDGRVHASHQLTRVPAKPILPTATVRLPEMSTQSASRYFVTSQSPRHWTNKPEITTYPSGALPENKQFTTPRLSSTTIPLPLHMSKPSIPSKFTDRRTDQFNGYSKVFGNNNIPEARNPVGKPPSPRIPHYSNGRLPFFTNKTLSFPQLGVTRRPQIPTSPAPVMRERKVIPGSYNRIHSHSTFHLDFGPPAPPLLHTPQTTGSPSTNLQNIPMVSSTQSSISFITSSVQSSGSFHQSSSKFFAGGPPASKFWSLGEKPQILTKSPQTVSVTAETDTVFPCEATGKPKPFVTWTKVSTGALMTPNTRIQRFEVLKNGTLVIRKVQVQDRGQYMCTASNLHGLDRMVVLLSVTVQQPQILASHYQDVTVYLGDTIAMECLAKGTPAPQISWIFPDRRVWQTVSPVEGRITLHENRTLSIKEASFSDRGVYKCVASNAAGADSLAIRLHVAALPPVIHQEKLENISLPPGLSIHIHCTAKAAPLPSVRWVLGDGTQIRPSQFLHGNLFVFPNGTLYIRNLAPKDSGRYECVAANLVGSARRTVQLNVQRAAANARITGTSPRRTDVRYGGTLKLDCSASGDPWPRILWRLPSKRMIDALFSFDSRIKVFANGTLVVKSVTDKDAGDYLCVARNKVGDDYVVLKVDVVMKPAKIEHKEENDHKVFYGGDLKVDCVATGLPNPEISWSLPDGSLVNSFMQSDDSGGRTKRYVVFNNGTLYFNEVGMREEGDYTCFAENQVGKDEMRVRVKVVTAPATIRNKTYLAVQVPYGDVVTVACEAKGEPMPKVTWLSPTNKVIPTSSEKYQIYQDGTLLIQKAQRSDSGNYTCLVRNSAGEDRKTVWIHVNVQPPKINGNPNPITTVREIAAGGSRKLIDCKAEGIPTPRVLWAFPEGVVLPAPYYGNRITVHGNGSLDIRSLRKSDSVQLVCMARNEGGEARLILQLTVLEPMEKPIFHDPISEKITAMAGHTISLNCSAAGTPTPSLVWVLPNGTDLQSGQQLQRFYHKADGMLHISGLSSVDAGAYRCVARNAAGHTERLVSLKVGLKPEANKQYHNLVSIINGETLKLPCTPPGAGQGRFSWTLPNGMHLEGPQTLGRVSLLDNGTLTVREASVFDRGTYVCRMETEYGPSVTSIPVIVIAYPPRITSEPTPVIYTRPGNTVKLNCMAMGIPKADITWELPDKSHLKAGVQARLYGNRFLHPQGSLTIQHATQRDAGFYKCMAKNILGSDSKTTYIHVF

SEQ ID NO: 186623 - DNA, 8487 bp, Artificial Sequence
  derived and/or modified sequence
atgcccaagagagcccactggggcgccctgagcgtggtgctgatcctgctgtggggccaccccagagtggccctggcctgcccccacccctgcgcctgctacgtgcccagcgaggtgcactgcaccttcagaagcctggccagcgtgcccgccggcatcgccaagcacgtggagagaatcaacctgggcttcaacagcatccaggccctgagcgagaccagcttcgccggcctgaccaagctggagctgctgatgatccacggcaacgagatccccagcatccccgacggcgccctgagagacctgagcagcctgcaggtgttcaagttcagctacaacaagctgagagtgatcaccggccagaccctgcagggcctgagcaacctgatgagactgcacatcgaccacaacaagatcgagttcatccacccccaggccttcaacggcctgaccagcctgagactgctgcacctggagggcaacctgctgcaccagctgcaccccagcaccttcagcaccttcaccttcctggactacttcagactgagcaccatcagacacctgtacctggccgagaacatggtgagaaccctgcccgccagcatgctgagaaacatgcccctgctggagaacctgtacctgcagggcaacccctggacctgcgactgcgagatgagatggttcctggagtgggacgccaagagcagaggcatcctgaagtgcaagaaggacaaggcctacgagggcggccagctgtgcgccatgtgcttcagccccaagaagctgtacaagcacgagatccacaagctgaaggacatgacctgcctgaagcccagcatcgagagccccctgagacagaacagaagcagaagcatcgaggaggagcaggagcaggaggaggacggcggcagccagctgatcctggagaagttccagctgccccagtggagcatcagcctgaacatgaccgacgagcacggcaacatggtgaacctggtgtgcgacatcaagaagcccatggacgtgtacaagatccacctgaaccagaccgacccccccgacatcgacatcaacgccaccgtggccctggacttcgagtgccccatgaccagagagaactacgagaagctgtggaagctgatcgcctactacagcgaggtgcccgtgaagctgcacagagagctgatgctgagcaaggaccccagagtgagctaccagtacagacaggacgccgacgaggaggccctgtactacaccggcgtgagagcccagatcctggccgagcccgagtgggtgatgcagcccagcatcgacatccagctgaacagaagacagagcaccgccaagaaggtgctgctgagctactacacccagtacagccagaccatcagcaccaaggacaccagacaggccagaggcagaagctgggtgatgatcgagcccagcggcgccgtgcagagagaccagaccgtgctggagggcggcccctgccagctgagctgcaacgtgaaggccagcgagagccccagcatcttctgggtgctgcccgacggcagcatcctgaaggcccccatggacgaccccgacagcaagttcagcatcctgagcagcggctggctgagaatcaagagcatggagcccagcgacagcggcctgtaccagtgcatcgcccaggtgagagacgagatggacagaatggtgtacagagtgctggtgcagagccccagcacccagcccgccgagaaggacaccgtgaccatcggcaagaaccccggcgagagcgtgaccctgccctgcaacgccctggccatccccgaggcccacctgagctggatcctgcccaacagaagaatcatcaacgacctggccaacaccagccacgtgtacatgctgcccaacggcaccctgagcatccccaaggtgcaggtgagcgacagcggctactacagatgcgtggccgtgaaccagcagggcgccgaccacttcaccgtgggcatcaccgtgaccaagaagggcagcggcctgcccagcaagagaggcagaagacccggcgccaaggccctgagcagagtgagagaggacatcgtggaggacgagggcggcagcggcatgggcgacgaggagaacaccagcagaagactgctgcaccccaaggaccaggaggtgttcctgaagaccaaggacgacgccatcaacggcgacaagaaggccaagaagggcagaagaaagctgaagctgtggaagcacagcgagaaggagcccgagaccaacgtggccgagggcagaagagtgttcgagagcagaagaagaatcaacatggccaacaagcagatcaaccccgagagatgggccgacatcctggccaaggtgagaggcaagaacctgcccaagggcaccgaggtgccccccctgatcaagaccaccagcccccccagcctgagcctggaggtgaccccccccttccccgccatcagcccccccagcgccagccccgtgcagaccgtgaccagcgccgaggagagcagcgccgacgtgcccctgctgggcgaggaggagcacgtgctgggcaccatcagcagcgccagcatgggcctggagcacaaccacaacggcgtgatcctggtggagcccgaggtgaccagcacccccctggaggaggtggtggacgacctgagcgagaagaccgaggagatcaccagcaccgagggcgacctgaagggcaccgccgcccccaccctgatcagcgagccctacgagcccagccccaccctgcacaccctggacaccgtgtacgagaagcccacccacgaggagaccgccaccgagggctggagcgccgccgacgtgggcagcagccccgagcccaccagcagcgagtacgagccccccctggacgccgtgagcctggccgagagcgagcccatgcagtacttcgaccccgacctggagaccaagagccagcccgacgaggacaagatgaaggaggacaccttcgcccacctgacccccacccccaccatctgggtgaacgacagcagcaccagccagctgttcgaggacagcaccatcggcgagcccggcgtgcccggccagagccacctgcagggcctgaccgacaacatccacctggtgaagagcagcctgagcacccaggacaccctgctgatcaagaagggcatgaaggagatgagccagaccctgcagggcggcaacatgctggagggcgaccccacccacagcagaagcagcgagagcgagggccaggagagcaagagcatcaccctgcccgacagcaccctgggcatcatgagcagcatgagccccgtgaagaagcccgccgagaccaccgtgggcaccctgctggacaaggacaccaccaccgccaccaccacccccagacagaaggtggcccccagcagcaccatgagcacccaccccagcagaagaagacccaacggcagaagaagactgagacccaacaagttcagacacagacacaagcagaccccccccaccaccttcgcccccagcgagaccttcagcacccagcccacccaggcccccgacatcaagatcagcagccaggtggagagcagcctggtgcccaccgcctgggtggacaacaccgtgaacacccccaagcagctggagatggagaagaacgccgagcccaccagcaagggcacccccagaagaaagcacggcaagagacccaacaagcacagatacacccccagcaccgtgagcagcagagccagcggcagcaagcccagccccagccccgagaacaagcacagaaacatcgtgacccccagcagcgagaccatcctgctgcccagaaccgtgagcctgaagaccgagggcccctacgacagcctggactacatgaccaccaccagaaagatctacagcagctaccccaaggtgcaggagaccctgcccgtgacctacaagcccaccagcgacggcaaggagatcaaggacgacgtggccaccaacgtggacaagcacaagagcgacatcctggtgaccggcgagagcatcaccaacgccatccccaccagcagaagcctggtgagcaccatgggcgagttcaaggaggagagcagccccgtgggcttccccggcacccccacctggaaccccagcagaaccgcccagcccggcagactgcagaccggcatccccgtgaccaccagcggcgagaacctgaccgacccccccctgctgaaggagctggaggacgtggacttcaccagcgagttcctgagcagcctgaccgtgagcacccccttccaccaggaggaggccggcagcagcaccaccctgagcagcatcaaggtggaggtggccagcagccaggccgagaccaccaccctggaccaggaccacctggagaccaccgtggccatcctgctgagcgagaccagaccccagaaccacacccccaccgccgccagaatgaaggagcccgccagcagcagccccagcaccatcctgatgagcctgggccagaccaccaccaccaagcccgccctgcccagccccagaatcagccaggccagcagagacagcaaggagaacgtgttcctgaactacgtgggcaaccccgagaccgaggccacccccgtgaacaacgagggcacccagcacatgagcggccccaacgagctgagcacccccagcagcgaccaggacgccttcaacctgagcaccaagctggagctggagaagcaggtgttcggcagcagaagcctgcccagaggccccgacagccagagacaggacggcagagtgcacgccagccaccagctgaccagagtgcccgccaagcccatcctgcccaccgccaccgtgagactgcccgagatgagcacccagagcgccagcagatacttcgtgaccagccagagccccagacactggaccaacaagcccgagatcaccacctaccccagcggcgccctgcccgagaacaagcagttcaccacccccagactgagcagcaccaccatccccctgcccctgcacatgagcaagcccagcatccccagcaagttcaccgacagaagaaccgaccagttcaacggctacagcaaggtgttcggcaacaacaacatccccgaggccagaaaccccgtgggcaagccccccagccccagaatcccccactacagcaacggcagactgcccttcttcaccaacaagaccctgagcttcccccagctgggcgtgaccagaagaccccagatccccaccagccccgcccccgtgatgagagagagaaaggtgatccccggcagctacaacagaatccacagccacagcaccttccacctggacttcggcccccccgccccccccctgctgcacaccccccagaccaccggcagccccagcaccaacctgcagaacatccccatggtgagcagcacccagagcagcatcagcttcatcaccagcagcgtgcagagcagcggcagcttccaccagagcagcagcaagttcttcgccggcggcccccccgccagcaagttctggagcctgggcgagaagccccagatcctgaccaagagcccccagaccgtgagcgtgaccgccgagaccgacaccgtgttcccctgcgaggccaccggcaagcccaagcccttcgtgacctggaccaaggtgagcaccggcgccctgatgacccccaacaccagaatccagagattcgaggtgctgaagaacggcaccctggtgatcagaaaggtgcaggtgcaggacagaggccagtacatgtgcaccgccagcaacctgcacggcctggacagaatggtggtgctgctgagcgtgaccgtgcagcagccccagatcctggccagccactaccaggacgtgaccgtgtacctgggcgacaccatcgccatggagtgcctggccaagggcacccccgccccccagatcagctggatcttccccgacagaagagtgtggcagaccgtgagccccgtggagggcagaatcaccctgcacgagaacagaaccctgagcatcaaggaggccagcttcagcgacagaggcgtgtacaagtgcgtggccagcaacgccgccggcgccgacagcctggccatcagactgcacgtggccgccctgccccccgtgatccaccaggagaagctggagaacatcagcctgccccccggcctgagcatccacatccactgcaccgccaaggccgcccccctgcccagcgtgagatgggtgctgggcgacggcacccagatcagacccagccagttcctgcacggcaacctgttcgtgttccccaacggcaccctgtacatcagaaacctggcccccaaggacagcggcagatacgagtgcgtggccgccaacctggtgggcagcgccagaagaaccgtgcagctgaacgtgcagagagccgccgccaacgccagaatcaccggcaccagccccagaagaaccgacgtgagatacggcggcaccctgaagctggactgcagcgccagcggcgacccctggcccagaatcctgtggagactgcccagcaagagaatgatcgacgccctgttcagcttcgacagcagaatcaaggtgttcgccaacggcaccctggtggtgaagagcgtgaccgacaaggacgccggcgactacctgtgcgtggccagaaacaaggtgggcgacgactacgtggtgctgaaggtggacgtggtgatgaagcccgccaagatcgagcacaaggaggagaacgaccacaaggtgttctacggcggcgacctgaaggtggactgcgtggccaccggcctgcccaaccccgagatcagctggagcctgcccgacggcagcctggtgaacagcttcatgcagagcgacgacagcggcggcagaaccaagagatacgtggtgttcaacaacggcaccctgtacttcaacgaggtgggcatgagagaggagggcgactacacctgcttcgccgagaaccaggtgggcaaggacgagatgagagtgagagtgaaggtggtgaccgcccccgccaccatcagaaacaagacctacctggccgtgcaggtgccctacggcgacgtggtgaccgtggcctgcgaggccaagggcgagcccatgcccaaggtgacctggctgagccccaccaacaaggtgatccccaccagcagcgagaagtaccagatctaccaggacggcaccctgctgatccagaaggcccagagaagcgacagcggcaactacacctgcctggtgagaaacagcgccggcgaggacagaaagaccgtgtggatccacgtgaacgtgcagccccccaagatcaacggcaaccccaaccccatcaccaccgtgagagagatcgccgccggcggcagcagaaagctgatcgactgcaaggccgagggcatccccacccccagagtgctgtgggccttccccgagggcgtggtgctgcccgccccctactacggcaacagaatcaccgtgcacggcaacggcagcctggacatcagaagcctgagaaagagcgacagcgtgcagctggtgtgcatggccagaaacgagggcggcgaggccagactgatcctgcagctgaccgtgctggagcccatggagaagcccatcttccacgaccccatcagcgagaagatcaccgccatggccggccacaccatcagcctgaactgcagcgccgccggcacccccacccccagcctggtgtgggtgctgcccaacggcaccgacctgcagagcggccagcagctgcagagattctaccacaaggccgacggcatgctgcacatcagcggcctgagcagcgtggacgccggcgcctacagatgcgtggccagaaacgccgccggccacaccgagagactggtgagcctgaaggtgggcctgaagcccgaggccaacaagcagtaccacaacctggtgagcatcatcaacggcgagaccctgaagctgccctgcaccccccccggcgccggccagggcagattcagctggaccctgcccaacggcatgcacctggagggcccccagaccctgggcagagtgagcctgctggacaacggcaccctgaccgtgagagaggccagcgtgttcgacagaggcacctacgtgtgcagaatggagaccgagtacggccccagcgtgaccagcatccccgtgatcgtgatcgcctacccccccagaatcaccagcgagcccacccccgtgatctacaccagacccggcaacaccgtgaagctgaactgcatggccatgggcatccccaaggccgacatcacctgggagctgcccgacaagagccacctgaaggccggcgtgcaggccagactgtacggcaacagattcctgcacccccagggcagcctgaccatccagcacgccacccagagagacgccggcttctacaagtgcatggccaagaacatcctgggcagcgacagcaagaccacctacatccacgtgttctag

SEQ ID NO: 186624 - DNA, 8487 bp, Artificial Sequence
  derived and/or modified sequence
atgcccaaacgggctcactggggagccctcagtgtcgtgctcattctcctctgggggcatcctcgcgtggccctggcatgcccacacccatgtgcctgttatgtgcctagtgaagttcattgtaccttcaggagtctcgccagtgtgccagccggcatcgcaaagcacgtcgaacgcattaatctgggatttaattccatccaggcgctatccgaaacaagtttcgccggcctcactaaactggagttactgatgatccacgggaacgaaatcccatcaatccctgacggcgccttgagggacctgagctccctgcaggtctttaagttctcttacaataaattacgcgtgatcacaggacagacgctgcagggcctctcgaatttaatgaggctacacatagatcacaacaagatcgagttcatccatcctcaagctttcaacggtctgacatccctgcgcctactccatctggaaggcaatcttctgcaccaactgcatccgtccacattttcaacttttactttcctcgattactttcgcctttccaccattcgccatctctatctggctgaaaacatggttcggactctcccagccagtatgcttcgtaatatgccgctgcttgagaatctttatctacagggaaatccttggacatgtgattgcgaaatgcgttggttcctggaatgggatgccaagtcccgggggatacttaagtgcaaaaaggacaaagcttacgaagggggacagttgtgtgccatgtgttttagtcctaagaagctctataaacatgagattcataaactgaaagatatgacgtgcctcaaacctagcatagagtcccctctgcgacagaaccgcagccgctccatcgaggaggagcaggaacaggaggaggacggggggtcacagctgatcctcgaaaaatttcagcttcctcagtggtccatctccctgaatatgaccgatgagcacggtaacatggtcaaccttgtatgcgatattaagaagcctatggacgtctacaagatccatctcaaccagacagatccaccggacatcgacatcaatgctacagtcgccctggactttgagtgcccaatgaccagggagaactatgagaagctctggaagctaattgcctactactcagaggtgccagtgaagttgcatcgggagctgatgctatcgaaggacccacgggtgtcataccaataccgccaggacgccgatgaggaagccctgtactacaccggcgtgcgcgcccagatcctggcagagcccgaatgggtcatgcagccctccatcgacattcagctcaatagacggcagtctaccgccaagaaggtgcttctaagttattatacacagtacagccagaccatttctaccaaggatacacggcaagcccgagggcgatcttgggtaatgatcgaaccctcgggcgcagtgcagcgggaccaaacagtgttagagggcggaccgtgccaactctcttgtaatgttaaggctagtgaatccccatccatcttttgggtactccctgacggctcaatcctgaaggctcctatggacgatccggattccaagttctccatcctctcgtccggttggctgcgcatcaaaagcatggaaccctctgactccggcctctatcagtgtatagcccaggttcgggacgaaatggacagaatggtgtaccgcgtgttggtacagagtcctagcacgcagccggcggagaaggacaccgtcaccatcgggaagaaccccggagaatccgtaacacttccgtgtaacgcgttggccatcccagaggcccacctctcatggattcttccaaacaggcgaatcatcaatgacctagctaacacaagccacgtgtacatgctaccaaacggtacactgagcatccctaaagtgcaggtaagcgacagcggttactaccggtgcgtggcagtcaatcagcagggcgctgatcactttacagtggggatcacagtgactaagaagggttccggcctccctagcaaacgtggacgccggccgggagctaaggctctcagccgggtgcgggaagatatcgtggaagatgagggtgggtcagggatgggagacgaagagaatacttctagacgcttgctccaccctaaggaccaggaagtgtttctgaaaactaaagatgacgctatcaacggagacaagaaagcgaagaaggggagacggaaactcaagctgtggaagcattcagagaaggaacctgagacaaatgtggcggagggccgccgcgtgtttgagagtcgccgcagaattaacatggcaaataagcaaatcaatcctgagcgatgggccgacatcctggccaaagtgcgaggcaagaaccttcccaaaggcacagaggtgcctcctctgattaagaccacgtctcctccatcgctgtcgttggaagtcacacctccgtttcctgccattagtcctcccagcgcatctccagtgcaaaccgtcacctcagctgaggaatctagtgcagacgttcctctgttgggggaagaagaacatgtgctgggcacaatttcctccgcctcgatggggttggagcacaaccacaacggtgtcatcctggtcgagccagaagtgacgtccacccctctggaggaagtggtggacgaccttagcgagaaaactgaggagatcacaagtacggagggcgaccttaaggggacggccgccccaaccctcatctcagagccctacgagccatctcccaccctgcacacattggacactgtgtatgagaagccgacccatgaagaaacagctaccgagggttggtctgccgccgacgtgggctctagccctgagcctacaagctccgaatacgaaccccctttagatgccgtttccctggccgagagtgagccgatgcaatattttgaccctgaccttgaaaccaaatctcagccagacgaagacaagatgaaagaggacaccttcgcacatctaacccccactcctactatatgggtcaacgattccagtacttctcagctctttgaagatagcacaattggggagccaggcgtacctggccaaagtcatcttcagggcttgaccgataacatccaccttgtgaagtcaagtctctctacacaagacacacttctcatcaagaaagggatgaaagaaatgagccagacattgcagggtggaaacatgcttgagggggaccccacccacagtcgctcgtctgagtctgagggtcaggaaagtaaatccatcaccctccctgattcgacgctgggcattatgagctcaatgtctcctgtgaaaaagcccgctgagacaaccgtgggaacactactagacaaggacacgacgaccgccaccaccaccccacgccaaaaagtggctcctagcagcaccatgagcacgcacccctctcggcggcgacccaacgggcgccgccggctgagaccaaataaatttaggcaccgtcacaagcagacacccccgaccacattcgccccttctgaaaccttctctacccagcctacccaggccccagatatcaaaatcagcagtcaggtcgagagtagccttgtgccaacagcctgggttgacaacaccgtgaatacacccaaacagctcgagatggaaaagaatgctgagcctacatccaaaggtactccccgcagaaaacacgggaagagaccaaataagcacagatacacacctagtaccgtgtctagcagggcgtcagggtcgaaacctagcccctcccccgagaataagcataggaatatagtgactcccagctcagagacaatcctgctgcctcgtacagtgtctctcaaaaccgagggcccctacgattcactggattacatgacaactaccagaaaaatctacagctcctacccgaaagtgcaagaaactcttcctgtcacttataagccaacctccgacggcaaagagatcaaggacgacgtggcgaccaatgtcgacaagcacaaatccgatatcctcgtgaccggagagagcatcaccaacgcaattccaacgtccaggtcgcttgtgagcacaatgggagaattcaaagaggaatcatcccccgtgggctttcccggtacgccaacttggaacccgtctcgcaccgcgcagcctggccggctgcagaccggcattcccgtgactacgagcggggaaaacctaaccgatccacctctgttgaaagaattagaagatgtagacttcacatcagagtttctatcaagtctgacagtgagtactccctttcaccaggaggaggcaggtagctctaccacactgtccagcattaaggtggaagtcgcatcttcacaggccgaaaccaccaccctggatcaggatcatctcgagacgacagttgctattctgttgtctgagacccgcccccaaaaccacaccccaacagcagcacggatgaaggagcctgcttctagctccccctccactattcttatgagtctggggcaaacaactacaaccaaaccagccctgccgagtccacgcatcagtcaggcaagtagggacagtaaggagaatgtttttctcaattatgtgggaaacccagagaccgaggcaacaccagtcaacaatgagggtactcaacatatgtcaggtccaaatgagctcagtacgcctagttccgaccaggacgcatttaacctcagcacaaagctagaactagaaaagcaagtgtttggctcgcggtccctcccccggggcccagactctcaacgccaggacgggagagtgcacgcctcacaccaactgactagggtgcccgcaaagcccattctcccaacggcgactgtcaggctgcccgagatgagcacacaaagtgcctcccgctactttgtcacctcccaatcgccccgtcattggaccaataagcctgaaattaccacgtacccctcaggcgctcttcccgaaaacaagcaattcaccacccctcgacttagcagcacaacgatccctctacctcttcacatgagcaaaccctcgataccatccaaattcacggacaggaggaccgatcagtttaatgggtattctaaggttttcgggaacaataatatacccgaggcacgtaaccctgttggtaaaccaccttcgcctcgcatccctcattactccaatgggagactgcccttcttcaccaacaagactctctcctttcctcagctcggagtcactcggcgtcctcagatccctacttctcccgcaccagtcatgagagaaaggaaggtgattccaggatcatacaatagaatccatagtcattcgacttttcacctggatttcggtccccccgcaccccctctgcttcacactcctcagactaccggcagtccttccacgaacttacagaatatcccaatggtgtcctcaacccagtcttcaatcagctttatcacatcctctgtccagtcatccggctcttttcatcaatctagctccaagttctttgcaggcgggcctcctgcaagcaagttctggagcctgggagaaaaaccacagatcctgacaaaaagcccccaaacggtgtccgtgactgccgaaactgatacggttttcccgtgcgaggccacagggaagcccaaaccctttgtgacttggacaaaagtgtctactggcgcccttatgacaccaaacactaggattcagcggtttgaggtcctcaaaaacggcaccctagtcattaggaaagtgcaggtgcaagaccggggacaatatatgtgcaccgcctctaatttgcatggccttgatcgcatggtggtattactttccgtgacggtacagcagcctcagattctcgcctcacattatcaggacgtgaccgtgtacttaggtgacactatcgccatggagtgcttggcaaaagggacccctgctcctcaaatttcttggatctttccagataggcgggtgtggcaaactgtatctcccgttgagggaagaataactctgcatgagaaccgaaccctttccataaaagaagcctccttctcagacagaggagtatacaaatgtgtagcatccaacgccgccggagctgattctctagctatacgtctacacgtggctgccctgccacccgttattcaccaagaaaagctcgagaatatatccttgccaccagggttaagcatccatattcactgcactgccaaggctgctccattgcccagtgtcagatgggtactgggcgacggtacgcagatcagaccatcacagttcctgcacggaaacttgttcgtgtttcccaatggcactttgtacatccgtaatctcgcgcctaaggattcaggcagatatgaatgcgttgctgccaatctcgtgggatccgctagacggactgtccagttaaatgtacagagagcggcagcaaatgcccgcattaccgggacgagtccacgcagaaccgatgtgcgatatggcggcaccttgaagctagactgttcagctagtggcgatccatggcctcgcatcttgtggagactcccatctaagcgcatgatagacgctttgtttagctttgacagcagaattaaggtgttcgcaaatggcaccctggtggtgaaaagcgtgactgacaaggacgccggagactatctctgtgttgcccgcaataaggtgggagatgactacgtcgtcctgaaggttgacgttgtgatgaaaccagctaaaatcgaacacaaggaggaaaatgatcacaaagtcttctatgggggcgatctgaaggtggactgtgtggccactgggctccccaaccctgaaataagctggagtctccctgacggatcattggtcaactcatttatgcaaagcgacgactctggcggtcgaactaaacggtatgtggtgttcaataatggtacactatacttcaatgaagtcggaatgagggaagagggtgattatacttgttttgcagagaaccaggtggggaaggatgagatgcgggtgagagtgaaagtggtcaccgcacctgccaccataaggaacaaaacatacctcgcagttcaggtgccttatggggacgtggttaccgtggcctgcgaggccaagggggagcccatgccaaaggtcacttggctgtcaccaacaaacaaagttatccctacttcttcagagaagtatcagatttatcaggacggtaccctgctcatccagaaggcccaacgctcggattcgggtaattatacttgtctggtcaggaacagtgccggagaggatcgaaaaacagtgtggatccacgtcaatgtgcagcccccaaagatcaacggcaacccaaatcccatcacaacagtgcgggagattgctgctggagggtctaggaaactgatcgactgtaaggccgaggggattccaacaccacgcgtactgtgggcgttcccagaaggggtcgtgctacccgctccgtactacggaaaccgcattaccgtgcatggaaatggatcacttgacatccgctcactccgtaaaagtgacagcgtacagttggtgtgcatggcacggaatgaaggaggcgaggccagactgatcttgcagctgactgtactagagcctatggaaaagcccatcttccatgacccaatcagcgagaaaatcactgcaatggctggacatacaatttccctgaactgcagcgccgctggtacccccaccccaagtttggtctgggttctgccaaacgggacagacctgcagagcggacaacagctgcagagattctaccacaaagccgacggcatgctgcatatctccggcctgtcctcagtggatgcgggggcgtaccgctgcgtcgcccgcaacgctgcaggccataccgaacgcttagtgtcgctcaaggtaggactaaaacctgaggccaacaagcagtaccataacctcgtgagcatcattaacggagaaacgttaaagctcccctgcacaccgcctggcgccggacagggtcggttttcttggacgctccctaacggcatgcatcttgaaggcccacagacactggggagggtctcgctgctggacaatggcaccctcacagttagggaagcctctgtgttcgatagaggtacttacgtttgccgaatggaaacggagtacggaccaagcgtgacctcaatcccagtcatcgtcattgcttacccacctcggataacaagcgaacccacccctgtaatctacactcgtcctggtaataccgtgaaattaaattgcatggcaatgggaatcccgaaggcagatattacatgggagctgcccgataaatctcacctgaaagcaggggtgcaggcgcggctgtacggcaaccgttttttacaccctcagggcagcctgactatccagcacgccacacagagggacgccggcttctacaagtgtatggccaagaatatcctcgggagtgattccaagacaacttatatccacgttttctag

SEQ ID NO: 186625 - DNA, 8487 bp, Artificial Sequence
  derived and/or modified sequence
atgcccaagagggcccactggggcgccctgtctgtggtgctgatcctgctgtggggccacccccgggtggccctggcctgcccccacccctgtgcctgctacgtgcccagcgaggtgcactgcaccttccgcagcctggcctctgtgcctgctggcatcgccaagcacgtggagcgcatcaacctgggcttcaacagcatccaggccctgtctgagaccagctttgctggcctgaccaagctggagctgctgatgattcatggaaatgagatccccagcatcccagatggagccctgcgggacctgagcagcctgcaggtgttcaagttctcctacaacaagctgcgggtcatcaccggccagaccctgcagggcctgagcaacctgatgaggctgcacatcgaccacaacaagattgagttcatccacccccaggccttcaacggcctgaccagcctgcggctgctgcacctggagggcaacctgctgcaccagctgcaccccagcaccttcagcaccttcaccttcctggactacttccggctgagcaccatccgccacctgtacctggccgagaacatggtgaggaccctgcctgcctccatgctgaggaacatgcccctgctggagaacctgtacctgcagggcaacccctggacctgtgactgtgagatgcgctggttcctggagtgggatgccaagagccggggcatcctgaagtgcaagaaggacaaggcctatgaaggaggccagctgtgtgccatgtgcttcagccccaagaagctgtacaagcatgagatccacaagctgaaggacatgacctgcctgaagcccagcattgagagccccctgcggcagaacagaagccgcagcattgaggaggagcaggagcaggaggaggatggcggcagccagctgatcctggagaagttccagctgccccagtggagcatcagcctgaacatgacagatgagcacggcaacatggtgaacctggtgtgtgacatcaagaagcccatggatgtgtacaagatccacctgaaccagacagaccccccagacatcgacatcaatgccaccgtggccctggactttgagtgccccatgacccgggagaactatgagaagctgtggaagctgattgcctactacagcgaggtgcctgtgaagctgcaccgggagctgatgctgagcaaggacccccgggtgtcctaccagtaccggcaggatgctgatgaggaggccctgtactacacaggagtgcgggcccagatcctggccgagcctgagtgggtgatgcagcccagcattgacatccagctgaacagacggcagagcacagccaagaaggtgctgctgagctactacacccagtacagccagaccatcagcaccaaggacacccggcaggcccggggccgctcctgggtgatgattgagcccagcggggctgtgcagagggaccagacagtgctggagggcggcccctgccagctgagctgcaatgtgaaggccagcgagagccccagcatcttctgggtgctgcctgatggcagcatcctgaaggcccccatggatgatcctgacagcaagttcagcatcctgagcagcggctggctgcgcatcaagtccatggagcccagcgacagcggcctgtaccagtgcatcgcccaggtgagagatgagatggacaggatggtgtacagagtgctggtgcagagccccagcacccagcctgctgagaaggacacagtgaccatcggcaagaaccctggagagagcgtgaccctgccctgcaatgccctggccatccctgaggcccacctgtcctggatcctgcccaacagacgcatcatcaatgacctggccaacaccagccacgtgtacatgctgcccaacggcaccctgagcatccccaaggtgcaggtgtctgacagcggctactaccgctgtgtggccgtgaaccagcagggcgctgaccacttcaccgtgggcatcaccgtgaccaagaagggcagcggcctgcccagcaagagaggaagaagacctggggccaaggccctgagccgggtgagagaagatattgtggaggatgagggcggcagcggcatgggagatgaggagaacaccagccggcggctgctgcaccccaaggaccaggaggtgttcctgaagaccaaggatgatgccatcaacggggacaagaaggccaagaagggccgcaggaagctgaagctgtggaagcacagcgagaaggagcctgagaccaacgtggccgagggccggcgggtgtttgagagcagaagacgcatcaacatggccaacaagcagatcaaccctgagcgctgggccgacatcctggccaaggtgcggggcaagaacctgcccaagggcacagaggtgcccccactcatcaagaccaccagcccccccagcctgagcctggaggtgaccccacccttccctgccatcagcccccccagcgccagccctgtgcagacagtgaccagcgctgaggagagcagcgcagatgtgcccctgctgggggaggaggagcacgtgctgggcaccatcagcagcgcctccatgggcctggagcacaaccacaacggggtcatcctggtggagcctgaggtgaccagcacccccctggaggaggtggtggatgacctgtctgagaagacagaggagatcaccagcacagaaggagacctgaagggcacagctgcccccaccctcatcagcgagccctatgagcccagccccaccctgcacaccctggacacagtgtatgagaagcccacccatgaggagacagccacagagggctggagcgctgctgatgtgggcagcagccctgagcccaccagcagtgaatatgagccccccctggatgctgtgtccctggccgagagcgagcccatgcagtactttgatcctgacctggagaccaagagccagccagatgaggacaagatgaaggaggacacctttgcccacctgacccccacccccaccatctgggtgaatgacagcagcaccagccagctgtttgaggacagcaccatcggggagcccggggtgcccggccagagccacctgcagggcctgacagacaacatccacctggtgaagagcagcctgagcacccaggacaccctgctgatcaagaagggcatgaaggagatgagccagaccctgcagggcggcaacatgctggagggggaccccacccacagccgcagcagcgagagcgagggccaggagagcaagagcatcaccctgcctgacagcaccctgggcatcatgagctccatgagccctgtgaagaagccagctgagaccaccgtgggcaccctgctggacaaggacaccaccacagccaccaccaccccccggcagaaggtggcccccagcagcaccatgagcacccaccccagcagaagaagacccaacggcagaagaaggctgcggcccaacaagttccgccaccgccacaagcagaccccacccaccacctttgcccccagcgagaccttcagcacccagcccacccaggccccagacatcaagatcagcagccaggtggagagcagcctggtgcccacagcctgggtggacaacacagtgaacacccccaagcagctggagatggagaagaatgctgagcccaccagcaagggcacccccaggaggaagcacggcaagaggcccaacaagcaccgctacacccccagcacagtgagcagccgggccagcggcagcaagcccagccccagccctgagaacaagcacaggaacatcgtgacccccagcagcgagaccatcctgctgcccaggacagtgtccctgaagacagagggcccctatgacagcctggactacatgaccaccaccaggaagatctacagcagctaccccaaggtgcaggagaccctgcctgtgacctacaagcccaccagtgatggcaaggagatcaaggatgatgtggccaccaacgtggacaagcacaagagtgacatcctggtgactggagagagcatcaccaatgccatccccaccagccgcagcctggtgtccaccatgggagagttcaaggaggagagcagccctgtgggcttccctggcacccccacctggaaccccagcaggacagcccagcccggccgcctgcagacaggcatccctgtgaccaccagcggggagaacctgacagatcctcccctgctgaaggagctggaggatgtggacttcaccagcgagttcctgagcagcctgactgtgtccacccccttccaccaggaggaggccggcagcagcaccaccctgagcagcatcaaggtggaggtggccagcagccaggccgagaccaccaccctggaccaggaccacctggagaccaccgtggccatcctgctgtctgagacccggccccagaaccacacccccacagctgccaggatgaaggagcccgccagcagcagccccagcaccatcctgatgagcctgggccagaccaccaccaccaagccagccctgcccagcccccgcatcagccaggccagccgggacagcaaagaaaatgtgttcctgaactacgtgggcaaccctgagacagaggccacccctgtgaacaatgaaggcacccagcacatgagcggccccaatgagctgagcacccccagcagtgaccaggatgccttcaacctgagcaccaagctggagctggagaagcaggtgtttggcagccgcagcctgccccggggccctgacagccagaggcaggacggccgggtgcacgccagccaccagctgaccagggtgcctgccaagcccatcctgcccacagccaccgtgcggctgcctgagatgagcacccagagcgccagccgctactttgtgaccagccagagccccaggcactggaccaacaagccagagatcaccacctaccccagcggggccctgcctgagaacaagcagttcaccaccccccggctgagcagcaccaccatccccctgcccctgcacatgagcaagcccagcatccccagcaagttcacagacagaagaacagaccagttcaacggctacagcaaggtgtttggaaacaacaacatccctgaggccagaaatcctgtgggcaagccacccagcccccgcatcccccactacagcaatggccgcctgcccttcttcaccaacaagaccctgtccttcccccagctgggcgtgacccggcggccccagatccccaccagccctgcccctgtgatgagggagaggaaggtgattcctggcagctacaaccgcatccacagccacagcaccttccacctggactttggccccccagccccacccctgctgcacaccccccagaccaccggcagccccagcaccaacctgcagaacatccccatggtgagcagcacccagagcagcatctccttcatcaccagctctgtgcagagcagcggcagcttccaccagagcagcagcaagttctttgctgggggccccccagccagcaagttctggagcctgggggagaagccccagatcctgaccaagagcccccagacagtgtctgtgacagctgagacagacacagtgttcccctgtgaggccaccgggaagcccaagccctttgtgacctggaccaaggtgtccactggagccctgatgacccccaacacccgcatccagagatttgaggtgctgaagaatggcaccctggtgatcaggaaggtgcaggtgcaggaccggggccagtacatgtgcacagccagcaacctgcacggcctggacaggatggtggtgctgctgtctgtgacagtgcagcagccccagatcctggccagccactaccaggatgtgacagtgtacctgggggacaccatcgccatggagtgcctggccaagggcaccccagccccccagatctcctggatcttcccagacagaagagtgtggcagacagtgtcccctgtggagggccgcatcaccctgcacgagaacagaaccctgagcatcaaggaggccagcttcagtgacagaggagtgtacaagtgtgtggccagcaatgctgctggagctgacagcctggccatccggctgcacgtggccgccctgccccctgtgatccaccaggagaagctggagaacatcagcctgcccccaggcctgagcatccacatccactgcacagccaaggccgcccccctgcccagcgtgcgctgggtgctgggagatggcacccagatccggcccagccagttcctgcacggcaacctgtttgtgttccccaacggcaccctgtacatccggaacctggcccccaaggacagcggccgctatgaatgtgtggccgccaacctggtgggcagcgcccggaggacagtgcagctgaatgtgcagagagctgctgccaatgcccgcatcaccggcaccagccccaggagaacagatgtgcgctatggaggcaccctgaagctggactgcagcgccagcggggacccctggccccgcatcctgtggaggctgcccagcaagaggatgattgatgccctcttctcctttgacagccgcatcaaggtgtttgccaacggcaccctggtggtgaagtctgtgacagacaaggatgctggggactacctgtgtgtggccaggaacaaggtgggagatgattatgtggtgctgaaggtggatgtggtgatgaagccagccaagattgagcacaaggaggagaatgaccacaaggtgttctatggaggagacctgaaggtggactgtgtggccaccggcctgcccaaccctgagatctcctggagcctgcctgatggcagcctggtgaacagcttcatgcagagtgatgacagcggcggccgcaccaagagatatgtggtgttcaacaacggcaccctgtacttcaatgaggtgggcatgagggaggagggggactacacctgctttgctgagaaccaggtgggcaaggatgagatgagggtgcgggtgaaggtggtgacagccccagccaccatccggaacaagacctacctggccgtgcaggtgccctatggagatgtggtgacagtggcctgtgaggccaagggggagcccatgcccaaggtgacctggctgagccccaccaacaaggtgatccccaccagcagcgagaagtaccagatctaccaggacggcaccctgctgatccagaaggcccagaggagtgacagcggcaactacacctgcctggtgagaaattctgctggggaggacaggaagacagtgtggatccacgtgaatgtgcagccccccaagatcaatggaaaccccaaccccatcaccaccgtgcgggagattgctgctgggggcagcaggaagctgattgactgcaaggccgagggcatccccaccccccgggtgctgtgggccttccctgagggcgtggtgctgcctgccccctactacggcaaccgcatcaccgtgcacggcaatggcagcctggacatccgcagcctgaggaagagtgacagcgtgcagctggtgtgcatggccagaaatgaaggaggagaggcccggctcatcctgcagctgactgtgctggagcccatggagaagcccatcttccatgaccccatcagcgagaagatcacagccatggccggccacaccatcagcctgaactgcagcgctgctggcacccccacccccagcctggtgtgggtgctgcccaacggcacagacctgcagagcggccagcagctgcagcgcttctaccacaaggcagatggcatgctgcacatcagcggcctgagctctgtggatgctggggcctaccgctgtgtggccagaaatgctgctggccacacagagcggctggtgtccctgaaggtgggcctgaagccagaggccaacaagcagtaccacaacctggtgtccatcatcaatggagagaccctgaagctgccctgcaccccacctggggccggccagggccgcttctcctggaccctgcccaacggcatgcacctggagggcccccagaccctgggccgggtgtccctgctggacaatggcaccctgactgtgcgggaggcctctgtgtttgaccggggcacctacgtgtgcaggatggagacagaatatggccccagcgtgaccagcatccctgtgattgtgattgcctacccaccccgcatcaccagcgagcccacccctgtgatctacaccaggcctggcaacacagtgaagctgaactgcatggccatgggcatccccaaggctgacatcacctgggagctgcctgacaagagccacctgaaggccggcgtgcaggcccggctgtatggcaaccgcttcctgcacccccagggcagcctgaccatccagcacgccacccagagagatgctggcttctacaagtgcatggccaagaacatcctgggcagtgacagcaagaccacctacatccacgtgttctag

SEQ ID NO: 186626 - DNA, 8487 bp, Artificial Sequence
  derived and/or modified sequence
atgcccaagcgggcccactggggcgccctgagcgtggtgctgatcctgttatgggggcaccccagggtcgccctggcctgcccacatccgtgcgcatgctatgtgccaagtgaggtgcactgtacatttcgctccctggcaagcgtcccagcgggaattgctaagcatgtcgagcgcatcaacttgggcttcaacagcatccaggcactcagcgaaactagcttcgcaggactgaccaagttggagttattgatgattcacgggaacgagatcccgagtattccggatggcgctctgcgcgatctctcctctctgcaagtgttcaaattttcctataacaagctccgggtgattacaggccagacactgcagggcctaagtaacctgatgcgtctgcatatcgaccacaacaagattgagttcatccacccacaggccttcaatggtctgacgtccctgagactgctgcacttagagggaaacttattgcatcaactgcatcccagtacattttcaactttcacctttctggattattttcgactttccacaatcagacatctctacctcgctgagaacatggttcgtactctgcccgcctctatgctccgcaatatgcctctgctggagaatctctacctgcagggcaacccgtggacctgcgattgcgagatgcggtggtttctcgaatgggatgccaagtcaaggggcatcttaaagtgtaaaaaggacaaagcctacgagggtggccagctgtgtgccatgtgtttcagccctaagaaactatacaaacacgaaatccacaagttgaaagatatgacatgcctcaaaccaagtatcgagtcacctctgagacagaacaggtcccggagtatagaggaggagcaggagcaagaggaggacggcggaagtcagctgatcctggaaaaattccagttgccacagtggtccatctcactgaacatgacggatgagcatggaaacatggtgaacttagtctgtgatatcaaaaaacccatggacgtgtacaaaattcatcttaaccagactgacccgcctgatattgacataaacgcaactgtcgcgctggattttgagtgcccaatgacgcgggagaattatgagaaactttggaaactcatcgcctactattctgaagtccctgtgaagctccacagggagctgatgctaagcaaagacccacgggtcagttaccagtaccgacaggacgctgacgaggaggccctttattacacgggcgtcagggcacagattctcgctgaacctgaatgggtaatgcaaccctcaatcgatattcaactgaacagacggcagagcactgccaaaaaagttctactctcatattacacacaatactcccagactatatcaaccaaggatactcgtcaggctcggggccgtagctgggtgatgatcgaacctagcggcgccgttcagagagaccagacagtgctcgaaggcgggccttgccagttgtcatgtaacgttaaggcttcagaatctccaagtattttttgggtccttcctgatgggagcatcctgaaggctcctatggatgatccagactcaaaattctctatattgtctagcggttggttgcggataaagagcatggagccgagcgacagcgggctgtaccagtgcatcgcccaggtgagagacgagatggatcggatggtttacagagtgcttgtgcaatctccgtctacacagcctgcagaaaaggatacagtgacaatcggaaaaaaccccggagagtccgttactctgccatgtaatgcattggcaatcccagaggcgcatttgtcttggatcttgcctaaccggagaatcatcaacgatctcgccaatacttcccacgtctatatgcttcccaatgggaccctgagtattcctaaagtccaggtatccgactccggttactaccgttgcgtggccgtcaatcagcaaggggccgatcactttaccgttggaattacggttactaagaaaggctctggtctgcccagcaagagaggaaggcgccctggcgccaaggccttgtcaagagtgagggaggacattgttgaggatgagggcgggtccgggatgggcgatgaggagaacacttctaggcggctgctgcaccccaaagaccaggaggtcttcctgaaaactaaggacgacgcaatcaacggcgacaaaaaggctaaaaaaggaagaagaaaactgaagttatggaaacattccgaaaaggaacctgaaacaaacgtggcggaggggcgtagagtttttgagagccggcgccgcattaacatggcaaacaaacaaatcaatcccgaaagatgggcagacattcttgcgaaggtccgcggtaagaacctgccgaagggtactgaagtaccccctctgattaagactacaagcccgccctccctttcactcgaagtgacccccccattccccgcaatatcacctccatccgcaagccccgtgcagactgtgactagcgcagaggagtcttccgccgacgtaccactgctgggggaggaggagcacgttttaggcactatttcaagcgcctccatgggactggagcataatcataacggagtgatcttggtggagcccgaagtgaccagcactccactggaggaggtggttgacgatctttccgaaaaaaccgaagagattacaagtacagaaggtgacctgaagggaaccgccgcgcctacactcatctccgagccgtatgagccatcccctacactgcacactctggatacagtgtacgagaagcccacccatgaggaaactgccactgaaggatggtccgctgccgacgtgggttcctcccccgagccgacatctagcgagtacgaacctccacttgatgcagtcagtttggcagagtcagagcccatgcagtatttcgacccagatctggaaacgaaatctcagcccgacgaggataagatgaaggaggacacctttgcccacttaacaccaaccccaactatttgggtgaatgactcatcgaccagccagctcttcgaggacagcacaatcggagagcctggagttccagggcaaagccacctccaggggcttaccgataatattcatttggtcaaatcaagcctctcaacccaggacacactgcttatcaagaaaggtatgaaagaaatgagtcagactctgcaggggggaaatatgctggaaggggacccaactcattctcgcagctctgaaagtgagggacaagagtccaagtcaatcacactccctgatagcacactcggcattatgtcatccatgagtccagtcaagaaaccagcagaaacgaccgtagggacactattagataaagatactactacggccactactactccacgccaaaaagtagcaccgagctccacaatgtctacacacccatcccggcgccggccaaatggtcgccgccgccttagaccgaacaagttccgtcaccgacacaaacagacacctccaaccacttttgccccttcagagacattttcaacccagcccacacaggccccagatatcaaaattagtagccaggtggagtccagtctggtgccaaccgcctgggttgacaacacagtaaataccccgaaacaactcgagatggagaagaatgccgaaccaacctccaagggcacacctcggaggaagcacgggaagcgccccaacaaacacagatatactcccagcacagtgtcgtcgcgcgcctcgggctcaaaaccaagccctagccctgagaataaacacaggaatatagtgacaccctcctctgagacaatcctcctgccgcggaccgtttctctgaagactgaggggccctacgatagcttggactacatgacgactacaaggaagatctactccagttaccctaaagtgcaggaaactctgccagtgacgtataagcctacatccgacgggaaagaaatcaaggatgatgtcgccactaatgtggataagcacaaatccgacattctggttaccggcgagtccatcaccaatgccatccctacaagcagatcgttggtgtctacaatgggtgagtttaaggaagaaagtagccccgtgggatttcctggaacaccgacctggaacccatcaaggaccgctcagccaggacggctgcagacggggatacccgtcacaacctcaggagagaacttgacagatccgccgctactgaaggagcttgaggacgtggatttcaccagcgaattcctgagctcacttaccgtgtctactccattccatcaggaagaggctggcagttccaccacattgagcagcattaaggtggaggtggcaagctcccaggcggaaactacgaccctggaccaggatcatctcgaaacaaccgtcgccatacttttgtctgagactagaccccagaaccacaccccgaccgctgcacgcatgaaggaaccagcgagcagctcacccagcaccattctgatgtcgctcggacagacaactactactaagcccgcactgccatccccccgaatttctcaggcctcaagggacagcaaagaaaacgtttttcttaactatgtgggaaacccagagacagaagctactccagtaaacaacgaagggacccaacatatgtccggccccaatgagctctcaaccccgtcaagcgatcaggatgccttcaacctgagtaccaagctggagctcgagaaacaggtttttggctcccgaagcctgccaaggggtcccgattctcaacgccaagatggccgggttcatgcaagccaccaactcacccgtgttcctgctaaacctatacttcccactgccaccgtccggctccctgagatgtctacccagtcagccagtagatatttcgtaacctctcaatctccccggcattggacaaacaagcccgagatcacgacgtacccatccggggcactcccagaaaacaagcagttcaccactccccgattatccagcacaacaattcctctgcctctgcatatgtcgaagccatctatcccgagtaagtttaccgacagacgaacagaccagtttaatggctatagtaaagtgttcgggaacaataacatacctgaggcacgcaatcctgtcggcaagcccccaagtcctaggatcccgcactattcaaacggaaggttgcccttcttcactaataagactctgtcatttccccaacttggggtgacccgaaggccacagatccccacaagccctgccccagttatgcgcgagagaaaagtgatacccggctcttacaacaggatccactcacattcaacgttccaccttgatttcggcccacctgctcctcctctcctgcatacaccgcagacgacaggcagccccagtacaaacctacaaaacattccaatggtctcatcaactcagtccagcatttcttttattacgagctctgttcagtcaagcggctctttccaccaatcctcatctaagtttttcgccggcgggcccccagcctcaaagttctggagcctgggagaaaagcctcagattcttactaagtctccccaaaccgttagtgtgaccgcagagactgataccgtatttccctgtgaggccaccggaaagcctaagcccttcgtaacatggaccaaggttagtactggcgcactaatgacaccaaacacccgtatccagcggttcgaggtattaaaaaacggaacactggtcattcggaaggtccaggtgcaagaccgtggccagtatatgtgtactgcttcgaacctccatggcctcgaccgtatggtcgtgttgctgagtgtgacggtgcagcagccccagattctggcaagccactatcaggacgttaccgtttacctgggcgataccatcgcaatggaatgcctggccaaagggaccccggcaccccagatatcctggatctttcccgataggagggtgtggcagactgtctctccagtagaagggcggataaccctccacgaaaataggactctgtccattaaagaggccagcttcagcgaccgcggagtgtacaagtgcgtggcttcaaatgctgcaggcgccgactctctggcaatccgacttcatgtggccgcattgccaccggtgatccaccaagaaaaactcgagaacatctccctccccccagggctgagtatacacatacactgtactgcgaaggccgctcctttgccttccgtccgatgggtgctcggcgacggaacacagatcaggccgagccagtttttacacgggaacctgtttgtgttcccgaacggcacactatacattaggaacctggcccctaaggactccgggcgatacgagtgcgtcgccgcaaatctggtaggcagcgccaggcgcactgttcagctgaacgttcagcgggccgccgcgaacgcgaggatcacgggcacctcgccacggaggactgacgtaagatatggcggcacactcaagctggattgcagcgctagtggggacccttggccccgtatactttggcggctgcccagtaagcgaatgatagacgcactgttttcttttgatagcaggatcaaagtttttgcgaatgggacactcgtcgttaaatccgttaccgataaggacgcaggcgactacttgtgtgtagccagaaataaggtgggggatgattacgtggttcttaaagtggacgtggttatgaaacccgccaaaatcgagcacaaggaagaaaatgatcacaaggttttttatggcggggatctgaaggtggactgtgttgccaccggtctcccaaatccggagatctcatggtctttaccagacggttcgctggtgaacagctttatgcagtcggacgattccggcggcaggaccaagcgttatgtggtctttaataacgggaccttgtacttcaacgaagtaggcatgcgagaagaaggggactacacttgctttgctgagaatcaagttggaaaggatgaaatgcgcgtgagggtgaaggtggtcacagcccccgcgactattcgcaataaaacatacctggccgtgcaggttccatacggcgatgttgtgactgttgcttgtgaggctaagggcgagccgatgcctaaagtgacctggttgagtcccacaaataaggtcatcccaacctcttccgagaagtaccagatttaccaggatgggaccctgctgatccagaaggcccagcgatcagacagcgggaattacacatgtctcgtgcgaaactccgccggagaggaccgcaaaaccgtgtggattcatgtgaacgtgcaacctcccaagatcaatgggaatccgaaccccattactaccgttcgcgaaatcgctgctgggggaagccgtaaacttattgattgtaaggccgagggaatacctacgccccgagtgctgtgggccttccctgagggcgttgttttacctgcgccttactatggcaaccgaatcacagtgcatggaaacggctcattagacatcaggagtctccgaaaaagcgacagtgtgcagctggtgtgtatggccaggaacgaaggcggagaggccaggttgatccttcagctgaccgtgttggaacctatggaaaagccaatattccacgatcctatcagtgagaagattacggctatggccggtcataccataagtttgaactgctctgcagcagggacgccaactccctcgctggtgtgggtattgccaaacggaaccgacttacagagcggccagcaacttcagagattctaccacaaagcagacggtatgctgcatatctctgggttaagttctgtagacgctggcgcttatagatgcgtagcccgcaatgctgcaggccacacggagcgcctggtgagcctgaaggtagggctgaaacctgaggcaaataagcaataccacaatctggtctcaatcattaacggggaaactctcaaactgccctgtacccctcctggcgctggtcagggcagattctcttggacgctccctaatgggatgcacctggagggtccccagacactgggccgggtgtcactgctggataacgggacactgacagtgagggaggcctcagtgttcgacagagggacctacgtttgcagaatggagactgagtacggccccagcgtcacatcaatcccagttatcgtcatcgcgtaccctccacgcattactagcgagcccacccctgtgatatacaccagacccgggaacaccgtcaagctcaactgtatggccatggggatccctaaagccgatatcacctgggagctgcccgataagagccacctcaaggccggcgtccaagcccggctgtacggcaatcgattcctgcacccacagggctcacttaccattcagcatgctacacagcgggacgccggattctacaaatgcatggctaagaacatcctaggatccgattctaagaccacttacatccatgtcttctag

SEQ ID NO: 186627 - DNA, 8487 bp, Artificial Sequence
  derived and/or modified sequence
atgcccaagagggctcattggggggcactatcagtcgtcttgattctgctttgggggcatccacgggtcgcgcttgcttgccctcatccctgcgcgtgttacgtgccatcagaggtgcactgtaccttccggagcctggcctctgtgccagccggtatcgcaaaacatgtggaaagaattaatttgggttttaacagcatccaggctctgtctgaaacatccttcgccggtctcacaaaacttgaactgctgatgatccatggcaatgaaattccctctatacccgacggagccttaagggacctctccagcctgcaagtgttcaagttcagctataataagctgagggtgattacaggacagaccctgcagggactatccaacctgatgagactccacatcgaccacaacaagatagagttcattcaccctcaagctttcaacggtttaacctcgctcagactactccatctagagggtaatttattgcaccagcttcaccccagtacattctccacattcaccttcctcgattattttagactctctaccattagacatctgtatttggcggagaatatggttcgaaccctgcccgctagcatgttgcgaaacatgcctctcctggagaacttatatctccagggtaacccttggacctgcgactgcgagatgcgatggttcctggagtgggatgcaaaatctcggggaatcctaaaatgcaagaaagacaaagcctatgagggaggccagctttgcgccatgtgtttctcccccaaaaaactctataaacatgaaatccacaaactcaaagacatgacgtgtttgaaaccatcgatcgagtcaccattacgccagaataggtcacggtcaatagaagaggagcaggaacaagaggaagatggcggatcccagctgattttagaaaagttccagctgccccaatggtctatctcgctcaacatgacagatgaacacggtaacatggttaacctggtctgcgacataaaaaaaccaatggatgtctacaagatccatctgaaccagactgaccctccggacattgacatcaacgccaccgtggcgctggactttgagtgtccaatgacacgggaaaactatgaaaaactgtggaagctaatcgcatactactccgaagtgcccgtcaagcttcatagggagctgatgttaagcaaggacccccgtgtaagctatcaatataggcaggacgccgatgaggaagcattgtattatacaggcgtgagagcccaaatcctggcagaaccagaatgggtcatgcagcctagcattgatattcagctgaatagaagacaaagtactgctaaaaaggtgctgttgtcctattatacccaatactcgcagaccatctcaaccaaagacacaagacaagctcgtggccgaagctgggtcatgatcgaaccttccggagcagtacagagagaccagactgtcctggagggcggaccgtgccagctgagctgcaatgtgaaagcaagcgagtccccaagtattttctgggtgttgccagacgggtccattctcaaggccccaatggatgaccctgactcaaaatttagcattttaagttcaggctggctgcgaataaagagcatggaacctagcgactccggcttgtaccaatgcattgctcaggttagggacgaaatggataggatggtgtacagagtactggtgcagtcgccatctacccaacctgctgagaaggatacagtcacgattgggaagaacccaggcgagagcgtcacattgccatgcaatgccctagccatcccagaagctcatttaagttggatcctgccaaaccgacggattataaatgatttagctaatacaagtcatgtctatatgctgcctaacggaaccctgagcatcccaaaggtccaagtttcagactcgggatactacaggtgtgtcgccgtaaaccaacaaggcgcagaccactttaccgttggaattactgtaacaaaaaagggctctgggctcccttccaaacggggtcggcgtcccggtgctaaggctttgtccagggtgagagaggatatcgtggaagatgagggagggagtggtatgggggacgaagagaacacttcgcgtcgtctactgcaccccaaagatcaggaagtgttcctgaaaactaaagacgacgcaattaacggcgacaagaaagcaaagaaaggacggagaaaactgaagctctggaagcacagtgaaaaggaaccagaaactaacgtggctgaaggccgtcgggttttcgaatccagaaggaggataaacatggctaacaaacagattaatccagagaggtgggccgacattctcgcaaaagtgcggggaaagaacttgccaaagggcacggaagtgccccctctcataaagacgacctccccaccctccttgtcattagaggttacacccccattccctgcaatctcaccgccatcagcgtcaccagttcagacagtgacaagcgcggaggagtcaagtgctgatgttccactgttgggggaggaagagcatgttctgggaaccatttcaagcgcctctatgggattggaacataaccataatggcgtcattcttgtggagcctgaagtgacttcaactcccctggaggaagttgtagacgacctatcggaaaagaccgaagagatcacatctacggagggggacttgaaagggaccgctgctcccaccctaataagtgagccttacgaacctagtcccacacttcacaccttggacaccgtgtacgagaagcccacccacgaggaaacagccactgagggatggtctgccgcagacgttggaagttcgccagaacccacatcatccgaatatgaacctccattagacgccgtgagcctcgcagaaagtgagcctatgcaatactttgatcctgatctggagactaagagccagcccgatgaggataaaatgaaggaggacaccttcgcccacctcacacccactcccaccatctgggtaaatgactcttctacaagtcagctgttcgaggattccaccataggggagcccggagtacccggtcagtcacatctacagggtctgacggataatattcatctggttaagagttccctctctacccaggatacactgctgattaagaaggggatgaaggaaatgtcccagaccctccaaggcggtaacatgttggagggggaccctacgcactccaggtccagcgaatccgaaggccaggagtctaagagtatcacactgcctgacagcacgctgggtatcatgtcttccatgagcccagtgaaaaaacccgctgaaaccactgtcggcacacttttggacaaagatactactaccgccaccacaactccccgacagaaggtcgctccctcgagcacgatgtcaacgcatccctctcggagaaggcctaatgggaggcgccgtttgcggccaaataagttccgccatcggcacaagcagaccccgcctacaacctttgcaccctctgagaccttttccacacagcccacccaagctcccgacatcaagatcagctcccaggttgagtcttccctggttcccacagcctgggtggacaacacagtcaacactccaaaacagctggaaatggaaaagaatgctgagccgacttccaaaggcacccctcgtagaaagcatggcaagaggccaaataagcatagatacacccctagcacagtgtcaagcagggccagtggatcaaaacccagccctagccccgagaacaaacaccggaacatcgtcacaccaagctccgagaccatcctgctcccgaggacggttagtctgaagacagaaggaccttatgacagccttgactacatgacaaccacgaggaagatctactccagctatcctaaagtacaagaaacgctgcctgtgacctataaaccaactagtgacggcaaagagattaaggatgatgtggccaccaatgtcgacaagcacaaatctgacatcctggttacgggggagagcattactaacgctattccaacgtctcgctctttggtttccacgatgggggagttcaaagaggaatcttctcctgtggggttccctggcacgcccacgtggaaccctagtcgaacagcacagccaggtcgcctgcagactggaatccccgttacgacaagcggcgaaaaccttactgacccacctctgctcaaagaactcgaagatgtggactttacgagtgaatttctcagttcgttaaccgtttctactcccttccaccaggaagaggcaggatctagcactacccttagctccataaaagtcgaagttgcatcatctcaggcggagaccacaactttggatcaagaccacctcgagaccacagtcgcgattttgctgtctgagacgagacctcagaaccacacaccaacagcagcgaggatgaaagagcctgcctcctcctcccccagcacgatcttgatgtcactgggccaaaccactaccaccaaacccgctttgccaagcccacggataagccaggcgagtagagattccaaggaaaatgtgtttctgaactatgtgggtaatcctgaaacagaagccacacctgtgaataatgagggcactcaacacatgtcaggcccaaatgagttatctacaccttcctcggaccaggacgcgttcaatttatccactaaactggagctggaaaaacaggtcttcggctcccgatcactgccccgtgggccagacagtcagcggcaggatgggagggtgcacgcctcccatcagctgaccagagtccccgcaaagccaatcctgcccaccgcaaccgtgcgattaccggaaatgtcaacacagagcgcctcccggtactttgttacaagccagtccccccgacactggaccaataagcccgagattactacgtaccctagtggggctctccctgagaacaaacaatttaccacacccaggttatcatcaactactatccctctgccccttcacatgtctaagccatcaatacccagtaaattcactgacagacggacagatcagttcaacggatatagtaaagtgttcgggaataacaacattccggaggccaggaatcccgtcggtaaacctccgtctccacgcatccctcactacagcaacgggaggttacctttttttacaaacaagacactgtctttcccccagttaggggttactcggagaccccagattcccacttcccctgcaccagtaatgagagagcgaaaagtgatccctggatcctataaccgcattcacagtcactcaacatttcatctggattttggcccacccgctcctccactcctccatactccccagactacggggtccccatctactaacttgcagaacatccccatggtgtcttcaacccagtctagcatcagcttcatcaccagctccgttcagtctagtgggagcttccatcagagctccagcaagttcttcgcagggggtccacccgctagcaagttctggtcactgggcgagaaaccacaaatattgaccaagtccccacagacggtgtccgtgaccgccgaaactgatacagtcttcccttgcgaagccaccggcaaaccgaagccctttgtgacatggacaaaagtttcgaccggagctctcatgacaccgaatacccggatccagaggtttgaggtgcttaagaacggcacactggttattagaaaggttcaggtgcaggatcggggacagtacatgtgtacggccagcaatctgcatggccttgatagaatggtggtactgctgtctgttactgttcagcagcctcagatcctcgcatcccactatcaggacgtcaccgtgtatctgggtgacacaatcgccatggagtgcctggcaaaaggcacacccgctccacagatcagttggatattccctgataggagagtgtggcagaccgtgtcccccgtagaaggcaggattactctgcatgaaaatcgtactctatctattaaagaggcttctttttctgataggggagtctacaaatgtgtggccagcaacgcagcgggtgccgattccctcgccatcaggctccacgttgcagccttgcccccagtgatacaccaggagaagctggaaaacatctcccttccaccaggactcagcattcatatccactgtaccgccaaggccgctccattgcctagtgttagatgggttctcggcgatggaacccagatcaggcccagtcagttcctgcacgggaatctatttgtatttccaaatggaaccctgtacatcagaaatctggcccctaaagattctgggaggtatgagtgtgtagccgctaacctggtagggtcagcacgcaggacagttcagttaaatgtgcagagggccgctgctaatgcgagaattacaggcactagccctcgaagaacagatgtgaggtatggaggaaccctgaaactggactgcagcgcaagcggcgacccttggcctaggatactctggagattgcctagtaaaagaatgattgacgcactgttttcattcgatagcaggataaaggtttttgctaatggcactctggtggttaagtcagtcaccgacaaggacgcgggagactacctgtgcgtggcacgcaataaggtgggggatgactacgtcgtgctcaaagtcgacgttgtaatgaagccagccaagatcgaacacaaggaagagaatgatcataaggtgttctacggaggtgatctgaaagtggactgtgtcgctacagggcttcccaacccagaaatctcgtggtccctgccagatgggagccttgttaatagctttatgcagagcgacgattcaggaggacgcacaaagcgatacgtcgtctttaataatggaacactatactttaatgaggtcgggatgagagaggaaggggactacacgtgttttgccgagaaccaggtgggaaaagatgagatgcgcgtgcgggtcaaagttgtcacggccccagctactatccggaacaaaacttatctggctgtacaggtgccatacggtgacgttgtgactgttgcttgcgaggcaaagggagaacctatgccgaaagtcacctggctctctcccacaaacaaagttatacccacgagctctgagaaataccagatataccaggacggtacactattgattcagaaggcacagaggagcgacagcggcaattacacatgtctggtccgtaactccgctggtgaagacaggaagaccgtgtggatacacgttaacgtgcagcctcccaaaatcaacggcaaccccaacccaataacaactgtgcgcgagattgcagcgggtgggtcccgcaaactaattgattgtaaggcagaaggaatccctacccccagggtcctgtgggcctttcctgagggggtggtgctgcctgccccatactacggcaataggatcacagtgcacggtaacgggtccctagacatcaggtcccttcgaaaatctgactcagtgcagctcgtctgtatggcaaggaatgaagggggtgaagccaggctgatcttgcagctcaccgtgctggagccaatggaaaaaccgatctttcatgacccgattagcgaaaagatcacagcgatggctggtcatactatctcactgaactgctctgccgcaggtacccctacccccagcctggtgtgggttctgcccaacggcaccgacctgcagtctggccaacaactgcagcgcttctaccataaggcagacggcatgctccatatcagcggactcagttccgtagacgccggtgcctacaggtgcgttgcgaggaacgcggcagggcacacggaaagactggtttcacttaaggtcggattaaaacccgaggccaataagcagtaccacaacctagtctcaattattaacggcgagaccttaaaactgccttgtaccccgcctggcgcaggacagggccgtttctcttggaccctgcctaatggaatgcatctggagggccctcagacccttggtcgggtctcgctgctcgacaacgggactctcaccgtgagagaagcgagcgtgtttgaccggggaacgtacgtttgccggatggagactgaatatggaccaagcgtgactagcattcctgtcattgttattgcctatccacccagaattaccagcgaacctactcccgttatctacacaagaccaggcaacaccgtgaaattgaactgtatggcaatgggcattcccaaggcagatattacctgggaactccctgacaagagccatttaaaggccggtgtgcaagccaggctgtacggaaatcggttccttcacccacagggctctcttactatccaacacgcaactcagagggacgcaggattctacaaatgcatggccaagaatatcctgggttctgatagtaaaactacgtacattcatgtcttctac

SEQ ID NO: 186628 - DNA, 8487 bp, Artificial Sequence
  derived and/or modified sequence
atgcctaagcgggcccattggggagcattatccgtggtgctgatacttctttggggtcatccccgggtagctctggcttgcccccatccgtgtgcctgctacgtgcccagcgaagtccactgtacttttagatccctggccagcgtccccgcagggatagcaaaacacgtggagcgcatcaacctgggatttaattctatccaagccttgtccgaaacgtcctttgctggtctcaccaaacttgaacttctaatgatccacgggaatgagatccctagcattccagacggtgccctcagggacttatcctcattacaagtattcaagttttcttataacaagctcagggtcattactgggcagaccctgcagggcctttcaaaccttatgagactccatatcgaccataacaagattgaattcatccacccgcaagcgtttaatggcctgactagtcttaggctgcttcatctcgaagggaatcttctccaccagcttcacccgtcaaccttttctaccttcactttcctggattacttccgccttagcaccatccgacatttatacctggcggagaacatggtgcgaactctgcccgcaagcatgctccgcaacatgccactgttagagaatctgtatctgcagggtaacccttggacatgtgactgcgagatgagatggttccttgagtgggatgccaagtcccgcggtattctcaaatgtaaaaaagacaaggcatacgagggtgggcaactttgcgccatgtgctttagtccaaagaagctctacaagcacgaaatccataagctaaaagacatgacatgtctgaagccaagcatcgagtcgcctcttaggcaaaatagaagtaggagcatagaggaggagcaggagcaggaggaagatgggggcagccaattgatcttagaaaaattccaattacctcagtggagcatctcattaaacatgactgatgaacacgggaacatggtgaacttggtgtgcgacattaaaaaacctatggatgtttacaagattcacctgaaccagactgatcctcccgatatcgacatcaacgcaacggtagcgcttgacttcgaatgtcccatgacaagagaaaactacgagaagttatggaagctcatagcttattactcagaagtcccagtaaaactgcatagagaactgatgttgagcaaggacccaagagtgagttaccagtacaggcaagacgccgacgaagaggctttatactatacaggagtgcgggcccagatcctcgcagagccggagtgggtgatgcagccaagcattgacatacaactaaatcgacggcaatccacagctaagaaagttctgttaagctactacacacagtactcccaaacaatttccaccaaagatacaagacaggctagaggccgctcttgggtcatgattgaaccaagcggcgcggtccagcgagaccagactgtactagagggcggcccatgtcaactgtcctgtaatgtgaaagcctctgagtcccccagcatcttctgggtgctgcccgacggctctattttaaaagcccccatggacgatcccgacagcaagttttcaatcctttcatcaggatggcttaggatcaagtccatggaaccttctgatagcggcctgtaccaatgcatagcccaggtgcgagacgaaatggataggatggtgtatcgcgtcctggtgcagtctccatctactcagcctgccgagaaggacaccgtgactatcggaaaaaaccctggggagtcagtaaccctgccatgcaacgcgcttgccatcccagaggcccatctgtcctggatcttaccgaacagacgaattataaacgacctggccaacaccagtcacgtgtacatgcttcctaatggcacactctccatacccaaagtccaggttagtgatagcggttactatcgatgtgtggccgtaaaccaacaaggggcagaccacttcaccgttggcataacagtgactaaaaaaggtagcggcctgccttctaaacgcggtcggagacctggagcaaaagcccttagtcgggtgagagaagatatcgtcgaggacgagggcggctccggaatgggggacgaagaaaacacttccaggagattattgcaccctaaggatcaagaggtgtttctgaaaaccaaggacgacgcaatcaacggcgacaagaaagctaaaaagggaagacggaagcttaagttgtggaaacactctgaaaaggagcctgaaactaacgtggcagaggggcgccgagtttttgagtctagaaggcgcataaatatggctaataagcagatcaaccccgagcgatgggccgacatcctcgctaaggtacgcgggaaaaacctgcccaaaggcaccgaagtccctcctctgatcaagaccacaagcccaccctcccttagtcttgaagtgacaccaccgtttcccgccatttcgcccccatccgctagccctgtccagacggttacttccgccgaggagagcagcgctgacgtcccgttgttgggggaagaggagcatgtactgggaaccattagcagtgcttctatgggacttgagcacaatcacaatggggtgattctcgtcgaacccgaggtgaccagcacgcccctggaggaggtggtggacgacctgtctgagaaaaccgaagaaattacttcaactgaaggtgatttgaaaggtaccgccgctccaacactgatcagcgaaccctacgaaccttcgcctacactccatacactggacactgtatatgaaaagccaacacacgaagaaactgccacggaagggtggagcgccgcagatgtcggctcttctcccgagcctaccagttccgaatatgaaccaccattagatgccgtctccctggcagagtccgaaccaatgcaatattttgaccccgatcttgagactaagagtcagccagatgaggacaagatgaaggaagacacgttcgcccatttaacacccactcccacaatctgggtgaacgactcgagcactagccagctattcgaggactcaactatcggcgagcctggagtccctgggcagagccatctgcaggggctgacggataatattcacctcgtgaaatccagcctgtcaacacaggataccctccttattaaaaaaggtatgaaggagatgtctcagacactgcagggtggcaacatgctggagggggaccctacccactctcgctcgtccgagagcgaaggccaggagtcaaagtcaattacactgcccgatagcaccctgggtatcatgtcctcgatgtctcctgtgaagaaacccgctgagactaccgttggaacccttctcgacaaagatactaccacagcaactacgacgccgagacagaaggtggctccatccagcacaatgagtacccacccctcccgccggagaccaaatggccgtaggcgcctaagaccaaataaatttaggcatcgtcataagcagaccccacctacaacttttgccccaagcgagacctttagtacccaacctactcaggcgcctgacatcaaaatcagcagccaggttgagtctagcctcgtaccaacagcctgggtggacaacaccgttaacactccaaaacagctcgaaatggagaaaaacgcggaacccacatcaaagggtacaccaagaaggaagcatgggaaaagaccaaacaagcatcgctataccccctccacagtcagttctcgtgcatctggctccaagccatccccctcgcctgagaataaacaccgcaacatagtgacacctagctctgaaacgatcctactgccacgaaccgtgagtttaaaaactgaaggtccctacgactcccttgactatatgactacaaccagaaagatttatagttcttatcctaaggtgcaggagacactacccgtgacgtacaagcctactagtgatggcaaggagatcaaagatgacgtggcaaccaacgtggataagcacaagtctgacattctggtgacgggtgagagtattactaatgctattccgacctcgcggagccttgtcagtactatgggcgaattcaaggaagagtcgtcccccgtgggctttcccggaacccctacatggaatccctctagaacagcccagcctggccggctgcagaccgggattccggttaccacatccggtgaaaacctcaccgatcctcccctgctcaaggagctcgaggatgtggactttactagtgaatttctgtcctccctgacagtatccactcctttccatcaggaggaagccggctcttcgaccaccctttcatctattaaagtggaagtagcctctagccaggccgagaccacaacactggatcaggaccacctggagacaaccgtcgccattcttctgagcgaaacccgtcctcagaaccataccccaaccgccgccaggatgaaggaacccgcctctagttctccgtccacaatactcatgtcactgggtcagaccacgaccaccaaacccgcactgccatcacctaggataagccaggcatctcgcgatagcaaagagaatgtcttcttgaattacgtggggaatcccgagactgaggctacacccgtaaacaacgagggcactcagcacatgtcaggccctaatgagctctctactccttcaagcgaccaagacgccttcaatctgagcacaaagttggagcttgagaaacaggtctttgggtccagaagcctcccccgcggcccagactctcagcggcaggacggtcgagtgcatgcaagtcatcagctcacccgggtgcctgctaaacctatcctgcccaccgccaccgtgcgcttaccggaaatgagcactcagagcgcttcacggtatttcgtgacttcccagtcaccccgccattggacgaataagcccgaaattacaacctacccctctggagcccttcccgagaataagcagtttactaccccccgtctgtcttctacaacaatccctctcccacttcacatgagcaagcccagcatcccgtctaagtttacagatcggagaacggatcaatttaacggctactcaaaggtgttcggtaacaacaacatacccgaggccagaaacccagtgggaaaacctcccagtcctcggatcccacactacagcaatgggagactgcctttcttcacgaataagacattgagttttcctcagctcggagtcacccgacgcccacagattcccaccagcccagccccagtaatgcgtgaacggaaggtcatcccaggaagctacaacaggatccactcgcacagcaccttccacctcgactttggcccaccagccccaccattactgcatacaccccaaactacaggttctccaagcactaatctccagaacatacctatggtttcttctacgcaaagttctatttcttttataacatcttccgtgcagtcctcaggatcgttccatcagtcttccagtaagtttttcgcgggaggccccccagcctccaagttctggtctcttggtgagaaaccacaaatactcactaaatcaccacagacagtttctgttaccgccgaaactgacactgtttttccctgcgaagcaactgggaagccaaagcctttcgtcacctggacgaaggtctctaccggtgctcttatgacacctaataccaggattcagcggttcgaggttttgaagaatggtacacttgtgataaggaaggtgcaggtgcaagaccgcgggcagtacatgtgcacggcctcaaatttgcacggtctggaccggatggtcgtcctgctgtccgtaacagtgcagcagccacagatcctggcctctcattatcaggacgtcacagtctatcttggtgacacgattgccatggaatgcttggctaagggaacaccagcacctcaaatcagttggattttcccggatagaagagtgtggcagacggtaagccctgtcgaaggacgaatcaccttacatgagaaccgcacactaagtatcaaggaagcgtcatttagtgaccgcggcgtttataagtgtgttgccagcaatgccgctggagccgatagtcttgcgatacgtctgcatgtagcggctttgccccctgtcatacatcaggagaaactggagaacattagtctgccgcccggtctctccatacatatccattgcaccgctaaggccgcccccctccctagcgtcaggtgggtgctcggggatggcacacagatcagacccagccagttcctacacggcaatctgttcgtgttcccaaacggcacactgtacatcagaaacctagccccaaaggattcgggccgctatgagtgtgtggctgccaatttggtcgggtctgcgagacgcaccgttcagctgaacgtgcaacgggcggctgcgaatgcacggattactggtaccagcccccggagaactgacgtgcggtatggcggaaccttgaaactggattgctcggcctcaggagacccttggccacggatcctgtggagactcccttctaagcggatgatagatgccctgttttcatttgactccaggatcaaagtgttcgctaacggcactcttgtggtgaagtctgtgacagacaaggacgccggggactacctgtgtgtcgcacgaaacaaggtgggagacgattacgtcgtactcaaagtggatgtcgttatgaaacccgctaagatcgagcataaagaggagaacgaccacaaggtcttttacggcggggatctgaaagttgattgcgttgctaccgggctgccgaacccagaaatttcttggtcactaccagatggatctctggtgaattccttcatgcaaagcgatgacagtggtggtcgcaccaaacgttacgtcgtttttaacaacgggaccctatacttcaacgaagtgggaatgcgagaggagggggactatacatgttttgccgaaaatcaagtgggcaaagacgaaatgagagttcgcgtgaaagttgtgacagctcccgcaactatccggaacaagacctatctagccgtccaggtgccttacggagatgtcgttacagtcgcatgtgaggccaagggcgaacctatgccaaaggtgacttggctctcgccgacgaacaaggtgatcccaaccagcagtgagaaatatcagatctaccaagacggcacactgctgatccagaaagcccagcgctccgactctgggaactacacctgcctggtccggaatagtgcgggcgaagacagaaaaacggtctggattcatgtgaacgtgcagcccccgaaaattaacggcaaccccaaccctattacaacagtgagagagattgccgcgggtgggtctcgtaaactgattgactgtaaggctgaaggaattcctacaccccgagttttgtgggccttcccggaaggtgtagtgttgcccgccccttactatggcaatcggatcaccgtgcatggcaacggttcacttgacataagaagtctgaggaagagtgactcagtgcaactggtgtgcatggctagaaatgaaggaggagaggcacgtttgatcctgcagctgaccgtgcttgaacctatggagaagccaatattccacgacccaattagcgagaagattacagcaatggccgggcacacgattagtctcaattgttccgccgccggtacgccaacacctagtcttgtatgggtactccctaacgggacagacctacagtctggtcaacagctacagcgcttttaccataaggccgatgggatgcttcatatcagtggcctatcatccgtcgatgcaggagcttatcggtgcgtcgctcgcaatgctgcaggacataccgaacggctggttagcttgaaggttggacttaaaccagaagcaaacaaacagtatcataacctggtgagtattattaacggcgaaacattaaaactgccatgcacgccaccaggcgcaggacagggcaggttttcttggacgctcccgaacgggatgcacctggaaggaccgcagacactcggccgcgtgagcctgctcgacaacggtaccctcacagtgagagaagcatctgtgtttgatagagggacatacgtatgtagaatggagaccgagtacggcccatcagtgacatccatacccgttattgtgattgcttacccacctagaattacatccgaacccacaccagttatttacacgcggccaggcaacacagtgaaactgaactgtatggccatggggatccccaaggctgatatcacgtgggagctgcccgacaagtcgcatttaaaggcgggcgttcaggctcggttgtatgggaatcgatttcttcaccctcaaggaagcctgaccatccagcatgcaacacagagggatgccggcttctacaagtgtatggccaaaaatattctggggtctgactctaaaaccacttatattcacgttttttag

SEQ ID NO: 186629 - DNA, 8487 bp, Artificial Sequence
  derived and/or modified sequence
atgcccaaaagggcccattggggtgctctgagcgtcgtgctcattttgctgtgggggcacccccgcgtggccctggcttgccctcatccttgcgcctgctacgttccctctgaagtgcactgcacatttagatcattagcctcggtacctgccggaatcgccaaacacgtcgagcgcatcaacttaggcttcaactccatccaagcattatccgagacatcctttgcaggcctgacaaaactcgagcttttaatgatacatggaaacgaaattccttctattcccgacggtgccctcagagacctttcctctcttcaagtttttaagttctcttacaacaaactgcgcgtcatcaccggccaaactttacagggactaagcaatctcatgcggctgcatatcgaccacaacaaaatcgagtttattcatcctcaggcgtttaacgggctgacatcactgcgcctcctgcacttagagggtaatctccttcatcagctacatccctcgacttttagtaccttcacgtttctagattactttaggctttctaccatcagacatttgtatctagccgagaacatggttcgaacactgccagcatcaatgctcagaaatatgccgctgctggaaaacctctacctgcaaggaaacccgtggacgtgcgactgtgagatgaggtggtttctcgaatgggacgccaaatcccgcggcattctgaaatgcaagaaagataaagcttatgaagggggacagctatgcgcaatgtgcttctcccccaagaaactatataaacatgaaatccacaaattgaaagatatgacgtgtctgaaaccctctattgaatccccgctgcgccaaaaccgttctaggtctatagaagaggaacaggaacaagaagaagacggcggctcacaactaatcctggaaaaattccaacttccccaatggagcatctccctgaacatgactgatgagcacggaaatatggttaatctcgtctgcgatatcaagaagcccatggacgtgtataaaatacacctgaaccagacggatcctcccgatatcgacatcaatgccacagtggcccttgactttgagtgcccaatgacccgagaaaattacgaaaagctctggaaacttatcgcgtactactcagaagtgcctgtgaaactacaccgagaactgatgctaagtaaagacccaagagtgagttaccagtacaggcaagacgccgacgaagaggctttatactatacaggagtgcgggcccagatcctcgcagagccggagtgggtgatgcagccaagcattgacatacaactaaatcgacggcaatccacagctaagaaagttctgttaagctactacacacagtactcccaaacaatttccaccaaagatacaagacaggctagaggccgctcttgggtcatgattgaaccaagcggcgcggtccagcgagaccagactgtactagagggcggcccatgtcaactgtcctgtaacgtaaaagcaagcgagtctccttccattttctgggtcctacctgacgggtcaattcttaaagcgccaatggatgatccagattcaaagttttcaattctatcctccgggtggctacgaatcaaatcaatggaaccctcggactcaggattgtatcagtgcatcgcacaggtgcgggacgaaatggacagaatggtttatcgggtcttggtgcagagcccttctactcagccagctgagaaggacacagtgacaattggtaaaaatcctggagagagcgtcaccctgccctgtaacgctcttgctatccccgaggcccatcttagctggattttgcccaacagacggattataaatgatctcgcaaacacctcccatgtgtacatgctgccaaatggaactctaagcatccccaaagtgcaagtcagcgatagtggatactatagatgtgtcgccgtaaaccagcagggcgcagaccatttcaccgtgggtatcacagtcacaaaaaaaggctctggcctgccctcaaagcgcggccgccgtcccggagcaaaggctctcagtcgggtccgagaagacatcgttgaagatgaagggggcagcggcatgggggatgaggaaaacacctcaaggaggctcctgcacccaaaggaccaggaagtgtttctgaagactaaagatgacgcaattaatggagataagaaggcaaaaaaggggagaaggaagctgaagttatggaaacattccgaaaaggagcccgaaactaacgtggccgagggaaggcgggtgtttgaatccaggcgtagaataaacatggcaaataaacaaatcaacccggagaggtgggctgatatcttagccaaggttcgtggaaaaaacctccctaaaggaacagaagtgccccctctgatcaagaccacttctccccctagcctgtcccttgaagttactcctccctttcccgccatatcaccgccttcagccagccccgtacaaacagttaccagtgcggaggagagctctgcagatgtgcccctgttaggagaagaggagcatgtcctcggcaccatttctagcgcttctatgggcttagaacacaaccacaatggcgtcatcttagtcgagccggaagtcacctcaacccctttggaagaggtcgtggacgatctgtctgagaagaccgaggaaattacctctaccgaaggagacctcaaaggaacggcagctccaacactaatcagcgaaccctacgaacccagccccactctgcacaccctggacaccgtgtacgaaaagccaactcacgaagaaaccgccaccgaaggctggtccgctgctgacgttggcagctcccccgaacccacctcttctgaatatgaaccccctttggatgctgtttctttagccgaatctgagcccatgcagtactttgaccctgacctagagacaaagagccaaccagacgaggacaaaatgaaggaagatacctttgctcacctgacccccacccctaccatttgggtaaacgatagtagcacatctcaactattcgaagattccacaattggtgaacctggagtccccggccagtctcacttacaggggctgacggacaacattcaccttgtcaagagtagtctcagcacacaggacacccttctaataaaaaaaggaatgaaggaaatgagccagaccttacagggcggcaatatgctggaaggcgatccaacacacagtcgcagctcagaatcagagggacaagaatcaaaatcaattaccttacccgacagtacattggggatcatgagcagcatgagtcccgttaagaagcccgccgagactactgtggggaccctcctggataaagatacaacaacagctactacaaccccccgccaaaaggtcgcacctagttccaccatgtcaacacacccatcacgaagacgaccgaacggccgccgacgcctcaggccaaacaaattcagacatcggcacaagcagacccctcccacgactttcgccccctctgagaccttctccacccaaccgacacaggcaccagatatcaagatctcatctcaggtcgaatcatcgctagttcccactgcatgggttgataataccgtgaatacccctaagcagctcgaaatggagaagaatgctgagcccacctccaaaggcacgccccgccgaaaacatggcaaaagacctaacaagcacagatacacgccatccaccgtctcttcaagagcatcaggatcaaagccatcacctagcccagaaaacaagcatcgaaacattgtcacaccgagctcagaaaccatcctgctgccccgtaccgtctccttgaagacagaaggtccatacgacagtctggactatatgaccaccaccaggaaaatctattcatcttacccaaaagtacaagaaaccctgccagtgacttacaagcccacctccgacgggaaagagatcaaagacgatgtagctacaaatgtggataagcataagagcgatattctggtcacgggcgagtcgattacaaacgctattccaacatcccggagtcttgtgtcaacaatgggagaattcaaagaggaaagttcgcccgtcggtttccccggaactccaacttggaacccctctcggaccgcacaaccaggccggttgcagacaggtattcccgttaccacaagcggcgagaacctaactgaccctccgctactgaaggaacttgaggatgtcgactttacgagcgagtttctctcatctctaacggtgagcactccattccaccaagaggaggccggctcttctaccactctgagctccattaaagtggaagtggcttcttcacaagctgagactacaactcttgaccaggatcacttagagacaactgtagcaattctactaagcgagacacggccccagaatcacaccccaacagccgcccggatgaaagagcccgcaagttcaagccccagtaccatcttgatgtccctcggacagacaactacaacaaagccagccctcccttctcctcgcatttcgcaggcctccagggacagcaaagagaatgttttcctcaactatgttggaaatccagaaacagaggcaacgccagtcaacaacgaaggcacgcagcacatgagcgggccaaacgaattaagcacacccagctctgaccaagacgcttttaacctgagtacaaaactggaactcgagaaacaagttttcggcagccgatctttgccacggggccccgattcccagcgccaggatggccgagtgcatgcctcccaccaacttacgagggtgcctgcgaaacctattctgccaactgccactgtcagactcccagaaatgtccactcagtccgcttctcgctacttcgtgacgtcacaatctccccgccattggacaaacaaaccagagattacaacatatcctagtggggcactccctgagaacaagcagttcaccacacctcgcctttcatctactactatacccctgccgctccatatgtcaaaaccctccattccatctaaattcaccgaccgtagaactgatcagttcaacggctactcaaaggtattcggtaataataacattcctgaagcaagaaaccccgtgggaaaaccacccagcccccgtatccctcattattccaatggtcggcttcccttcttcacaaataaaacactgagcttcccacagttgggagtcacaagacgcccacaaattcctaccagtcctgctcccgttatgagagagagaaaagtaattccaggctcctataacagaatacattcgcattcaacctttcatcttgattttggccctcccgcccctcccctcctgcacacaccacagaccaccgggagcccctcaacaaaccttcagaacatccccatggtctcctccacacaatcatccatttctttcatcactagttcagtccagtccagcggctcctttcatcagtccagttccaagtttttcgccgggggtccccccgctagcaagttctggtctctgggagaaaaacctcaaatactgaccaaatccccccagacagtcagcgttacggcagaaaccgacaccgtctttccctgcgaggccacgggaaaacctaaacccttcgttacatggacaaaagtttctacgggggctctcatgacccctaacactagaatccaaagattcgaagtactgaaaaatgggaccctcgttatccgcaaagtccaggttcaagatcgcgggcagtatatgtgtacggcgtcaaatttacatggtctcgatcgcatggtcgtactgctgagcgtaactgtgcagcagccacagattctggcctctcactaccaggatgttaccgtctatttaggcgacacaatagctatggagtgcttagctaaaggtaccccagcccctcagattagttggatattccccgatcgaagagtttggcagactgtttcccctgtagaaggaagaattaccctgcacgaaaaccgcaccctctctataaaagaagccagcttctcagaccggggcgtctataagtgtgttgcctctaatgcagcaggtgccgactcccttgccattagattgcacgtggcggccctcccacccgtcatccaccaagagaaattggagaacatttctctgcctcctggcctgtccattcacatacactgcaccgcaaaggccgcaccgctgccttccgttcgatgggtattgggggatggaactcaaattagaccatcacagtttttacatgggaatctgtttgtatttcccaacggcaccctatatatacgcaatcttgctcccaaggactcaggtagatatgagtgtgttgccgctaacctagtgggttctgcccggaggaccgtccaactcaacgtccagcgtgcagctgctaacgcgcgaattaccggcacgagtccacgacgaacagatgtgcgttatggtggtactctgaaacttgactgcagcgccagcggggatccttggccacgaatactttggcgtcttcccagcaagaggatgatcgatgctctcttctcgttcgattcgaggattaaggtgttcgcgaacgggactctcgttgttaaaagcgttaccgataaggacgctggcgattacctttgtgtagcaagaaacaaggtaggagatgactatgtggtgctgaaggttgacgtggttatgaagccggccaaaattgagcataaagaggagaacgatcacaaagtattctatggcggggacctcaaagtggattgcgtagcaacaggcctgccgaacccagaaatctcttggagcttgccggatggaagtttggtcaactcctttatgcagtctgatgatagcggaggcagaacgaaacgctatgtggtcttcaataatggaacactgtactttaacgaagtgggcatgagagaggagggggattacacctgctttgcagagaaccaggttggaaaggacgagatgagggttagggtgaaggttgttacagctcctgctacgattagaaataagacatatcttgcggtccaagtgccctatggggacgtcgtcaccgtagcttgtgaggcaaaaggcgagcctatgcccaaggtgacctggctgagccccactaacaaagtgatccctacatcaagcgaaaaataccagatctatcaggatggaaccctcttaattcagaaggcccaaagatctgactctggaaattatacttgtctggttcggaactccgccggtgaggatcgcaaaaccgtttggatccacgttaatgtccagccacccaagattaatggcaaccccaaccctatcaccaccgtgcgagaaatagctgctggggggtctagaaagctcatcgattgcaaagccgaaggcattcccacaccacgcgtcctctgggcattccccgagggagttgtgcttcccgcaccttactacggaaacaggatcacagtacatgggaatggctcactcgacattaggtctcttcgaaaatccgacagcgtgcagttagtttgtatggcacgcaatgaaggtggtgaagcgcgcttgattctgcagctcacagtgttagagccgatggagaaacctatatttcacgaccccattagcgagaagattacagctatggccggtcacactatttctttaaattgttcagccgcgggcactccaacaccctccttggtctgggtactcccaaatggaaccgatctacaatctggacagcagttgcagaggttctatcataaagcagacgggatgctccatattagtggtctaagcagtgtggatgctggggcatacaggtgcgtagcccggaacgcagcaggacacacagaaaggctggttagcctgaaagtcggcctgaaacccgaagccaataagcagtaccacaatctcgtgagtatcatcaacggtgaaacactgaaattgccctgtacaccccccggcgccggccaagggaggttcagttggacactacccaatgggatgcatctcgaggggccacagactctgggacgagtttccctcctggacaatggcacactcactgtgcgcgaagcctccgtctttgatagaggcacttatgtatgcaggatggagaccgaatacggaccttctgtcacctctattcctgtgatagtgatagcctatccaccaaggataacatctgaaccgacgcctgtgatctatactagacccggcaataccgtgaaacttaactgtatggccatgggtattccaaaagccgatattacctgggaactgcctgacaaaagccatcttaaagccggagtacaagccagactctacgggaaccggtttctgcaccctcaaggatctctaactatacagcacgccacccaaagagacgccggtttttacaaatgtatggcaaagaacatcctgggcagcgattctaaaacaacttacatacacgttttttag

SEQ ID NO: 186630 - DNA, 8486 bp, Artificial Sequence
  derived and/or modified sequence
atgcccaaaagggcacattggggggcattgtccgttgttctgatcctgttgtgggggcaccccagagtggccttggcttgtcctcacccatgcgcatgctatgtgccgtctgaagtccactgcacgttcagatctctcgcaagcgtgcccgcaggaatagctaagcatgtggagcgaatcaatctcgggttcaattccatccaggcgttaagcgagacttcttttgctggactgactaaactggagctcctgatgatccacggtaacgaaatcccttccattcccgacggtgcccttagggacttgtcgtcccttcaagtgtttaagttctcatacaacaagcttagagtgatcactggacagacactccagggcctctccaatctgatgaggctccacatcgaccataacaagattgagttcattcacccacaggctttcaacggactcacctccctgcgtcttctccacctggaagggaacctgttgcatcagttgcatccaagtacattttcaacctttacgtttcttgactacttccggctatcaacaataaggcatctgtacctggccgaaaacatggtgagaactctgccggcttcaatgctacgtaatatgccactgcttgagaatctctatctccaggggaatccctggacgtgcgactgtgaaatgagatggttcctcgagtgggacgccaaatccagaggtattctgaagtgtaaaaaagacaaggcttacgaaggcggacagctgtgcgctatgtgtttcagccccaaaaagctttataaacacgagatccataagctcaaggatatgacatgtcttaagcccagcatcgagagtcctctcagacagaacaggtcgcgctctatcgaagaagaacaggagcaagaagaagacggaggaagccagcttattctggaaaaatttcaactccctcagtggtcaatctcattaaatatgaccgacgagcatggtaacatggtgaacttagtatgtgacatcaagaagccaatggatgtttataaaatccatttaaatcagaccgatcctcccgacatcgacataaacgccaccgtcgctctggatttcgaatgtccaatgacgagagaaaactacgagaaactctggaaactgatcgcctattactctgaggtcccagtgaaactgcaccgtgaactcatgctgagtaaagaccctcgcgtgagctatcaatacagacaggatgctgacgaagaagccctatactatactggggttcgcgcacagatcctggccgagcccgaatgggtgatgcagccctcgatcgatattcagctaaacaggaggcagagcactgctaagaaggtgttactgtcttattacacacaatatagtcaaaccatcagcactaaagacacgagacaggctcgcggaagaagttgggtcatgattgaacccagcggtgccgttcagagagatcagaccgttctcgagggcggtccatgccagctgtcctgtaatgttaaagcttcagagtcgccatcgatcttctgggtcctccccgatggatccattcttaaggccccaatggatgatccagattcaaaattttctatactctcctccggctggttgaggatcaagagcatggagccctctgatagcggcttgtatcagtgtatcgctcaagtgcgcgatgagatggaccgcatggtctacagggtgctagtgcagagcccttcaacccaaccagccgaaaaggacaccgtgaccatcgggaagaatccaggtgaaagcgttaccctcccgtgcaacgctctggcaatcccagaggcacacttgtcatggatcctacctaatcggagaatcatcaacgatctcgcaaacacatcgcacgtttacatgctccccaatggcacgctcagcatcccgaaagtccaggtgagcgactcaggctactaccgctgcgtagccgtaaatcagcaaggcgctgaccacttcactgttggcatcacagttaccaagaagggctctggacttccttctaaaagggggcgtagacctggcgctaaagcgctgtccagagtcagggaagacattgtggaagacgagggtggttcagggatgggagacgaagaaaacacctcgcgcagactgttacaccccaaagaccaggaagtatttctcaagacaaaggatgatgccatcaatggagacaagaaggccaagaaaggtcgtcgcaaattgaagttgtggaagcatagcgaaaaggaacctgaaaccaacgttgccgagggacgcagggtgtttgaaagcagacgccgtataaatatggctaacaagcagattaatcctgagagatgggccgatatcctagctaaagtacgaggcaagaatttgcctaaggggacagaggtcccacctctgatcaagactacctcaccaccttcactctctttggaggttacacctccgtttcctgcgataagtccgcctagtgcgtctcccgtgcagaccgtgacttcagctgaggaatcatccgcggatgtgccactcctcggggaggaggagcatgtgctaggcacgatatcctccgccagtatgggacttgaacataaccacaatggggtaatcttggtggagcccgaggtcaccagtactcccctcgaggaagtggttgacgatttatccgaaaagacggaggagattacatcaactgaaggcgatctcaagggaaccgccgctcccacccttattagtgagccctacgagccatcccccactctgcacacactcgataccgtctacgagaaaccgacccacgaagagactgcaaccgagggctggtccgctgctgatgtcggaagcagcccggagcccacctcaagcgaatacgagccacccctggacgctgtgagtttggctgagtcagagccaatgcaatatttcgatcctgacttggagaccaagagtcagccagatgaggataaaatgaaggaggacacattcgctcacttgactcccaccccaacgatctgggtcaacgattcatctacctcccagctatttgaggatagtaccattggcgaaccaggcgtgcccggacagagccacctacagggcctaacagataatatccacctggttaagagctccttgtcaacccaggatacgctgctgataaagaaaggtatgaaggaaatgtctcaaaccctgcaggggggaaacatgcttgagggggatcccacacactctaggagcagtgagagtgaaggtcaagaaagtaagagcataaccttgcctgatagtactctggggattatgagcagtatgagcccggtcaagaagcctgctgaaacaactgttggcactctgctggacaaggacactacaaccgccactaccacgccacgacagaaagtggcaccttcaagtaccatgtcaacccatccttctcgcaggcgaccaaatggccgacgccgactccgcccaaataagtttaggcacagacacaaacagaccccaccaaccactttcgctccctccgagaccttttccactcagcctacccaagccccagatattaagattagtagtcaggttgagagctccctggtcccaacagcctgggtagacaacacggtgaatacccctaagcagttggagatggagaaaaacgcagagccaacgagtaagggcacccctaggcgcaaacatggcaagaggccaaataagcatcgttatactccatccacagtctcctccagagcctcagggagtaaaccatccccttccccagaaaacaagcacaggaacatcgtgacaccttcaagtgagaccatcctcctccctcgaacagtaagtctcaaaaccgagggtccttatgattccctggattatatgaccacaacaaggaagatctattcttcctaccccaaggtgcaggagacactgcctgtcacctacaagcccacaagtgatgggaaggagatcaaggacgacgtcgccaccaatgttgacaagcataagagcgacatcctcgttactggagagagcattaccaacgcgattcccactagtcgatcactggttagcacaatgggggagttcaaggaggagtccagtcccgttggattccctggcacgcctacttggaacccctctaggactgcacagcccggacggctgcagaccggcattcccgtgactacaagcggagagaacctcacagatcctccgcttctgaaagaacttgaggacgttgacttcacaagcgaattcctgtcttccctgactgtaagcacaccatttcatcaggaggaagccggtagcagcacaactctgtcctccatcaaggttgaagttgcctcttcgcaggccgaaaccacaacattagaccaggatcatctagaaacaacagtggccatccttctttctgagactaggccgcaaaatcatacacctacagccgcacgaatgaaagagcccgcatcttcatcgccttcaacaatcctgatgtccctaggacaaaccacgactactaagcccgcacttccatcccctaggatctcccaggctagtcgcgactcaaaagaaaatgttttcctcaactatgtgggaaatcctgaaacagaggcaacgccagtcaataatgaaggaacccagcacatgagcggacccaatgaactctcaacaccctctagtgaccaggacgcatttaatttgagcacgaagctggaacttgagaaacaggtctttggcagtaggagtctgccccgaggcccagactcccagcgccaggacggcagggttcatgcatcacaccagttgacgcgagtgcccgcaaaacctatattgcctaccgctactgtgcggctccccgagatgtctactcaaagtgcttccagatatttcgtaacatctcaaagccctcggcattggactaataaacctgaaattactacatacccatctggggctctgccagagaataagcagtttacaacaccaagactgagttcgacgacaatccccctacccctgcatatgtccaaaccctccatcccttccaaattcaccgatcgcagaactgaccagttcaacggctacagcaaggtgttcggcaataacaacatccctgaagcaagaaaccctgtcggcaagcccccatctcccagaataccacattactctaacgggaggctaccttttttcaccaataaaaccctgagcttccctcagctcggtgttacccgaagaccccagatcccaacgagcccagctcctgttatgagagagcgaaaagtgatacccggttcctataatagaattcacagtcacagcacttttcatctcgatttcggccctcctgccccacctctgctccacacacctcagacaacgggatcacctagcacaaatctgcagaatattccaatggtgtccagtacacagagcagcatctctttcattacctcatctgtgcaatctagcggtagcttccatcagagttccagcaagttttttgctggtggaccccctgccagtaaattctggtccctaggcgagaaaccacagattctcacgaagtccccacagacggtgtccgtgactgccgagactgacactgttttcccgtgtgaggctaccgggaagcccaagcctttcgtgacctggacaaaggtgtccacaggagccctgatgaccccgaatacccgcattcagcgctttgaggttttgaagaatggaacactagtaattcgaaaagtgcaggtacaggatcgagggcagtacatgtgcacagcttcaaacttacacggattggaccggatggtggtccttttatcagtgaccgtgcagcagccccaaattttagcttctcattaccaggatgtgaccgtatatctgggcgacaccatcgcgatggagtgtttagccaaaggtaccccagcgccacaaatctcgtggatattccctgatcgtcgagtttggcaaaccgtgagtcctgtcgaggggaggatcactttgcacgagaacaggaccctgtcaatcaaggaagcgtctttctctgacagaggagtttataagtgcgtggcgtctaacgcagccggagcggatagtttggccattcgcctacacgttgccgcactgccccctgtgattcaccaagagaaacttgaaaatatttcgttgcccccaggcctgagcatccacattcactgcaccgctaaggcagcaccccttccttccgtacgatgggtactaggcgacggaacacaaatccgacctagccagtttctgcatgggaatctgttcgtgttccctaatgggacgctgtatatacgtaacctggccccaaaagattctggcaggtatgagtgtgttgcggctaacctggtcggttctgctcgcagaacagtgcagttgaacgtgcagagggctgctgccaacgccaggataaccgggacctcccccaggagaacggatgtcaggtacgggggaacactgaaactggattgtagcgcttctggggatccttggccccgaattctgtggcggctgccttccaagaggatgatcgacgctctgttttctttcgattccaggatcaaagtcttcgccaacggaactctagtggttaagtcagtcaccgacaaagatgctggagactatctgtgtgttgcgcgtaacaaggtaggtgacgactacgttgtgcttaaggttgatgtagtcatgaaacccgcaaagatcgaacacaaagaagaaaacgaccacaaggtcttctatgggggtgatctcaaagtggactgcgtggccacaggcctacccaaccccgagatatcctggtcattacccgacggatcattagttaattcattcatgcaatctgacgactcaggcggacgtactaagcggtatgtggtattcaacaatggcacattatacttcaatgaagtgggaatgagggaggaaggtgactacacctgtttcgccgagaatcaggtgggtaaagatgaaatgagggtgagggtgaaggtagttactgctcccgcaactatcaggaacaagacctatctggccgtgcaagtgccgtacggcgacgtcgtaacagtggcctgtgaggctaagggtgagccaatgccaaaagtgacctggctcagtccaactaataaggtgattccaacttctagcgagaaataccagatctaccaggatgggaccctgttaatccagaaagcacaaagaagtgattccggcaattacacctgtctggtgagaaatagtgcaggcgaagacagaaagacggtgtggattcacgtgaacgtgcagccaccaaaaatcaatggcaaccccaacccgataaccactgtccgcgaaattgccgctggcggaagccggaagttaattgattgcaaggccgagggcattccaacgccaagggtcctctgggcgttcccagagggagtcgtcttacctgccccatattatggtaaccgaatcacagtgcatggaaatgggtccttggacatccgttcactgagaaagtccgatagtgtccagctggtatgtatggccaggaacgagggaggcgaggctcggctgatcctacaactcacagtgctggaaccaatggaaaaacctatctttcatgatccaatatccgaaaagataactgctatggcaggtcataccattagccttaattgtagcgccgcagggacacccaccccaagcctggtctgggtactgcccaatgggactgacctgcaatctggtcaacagctccaaaggttctaccataaggccgacggaatgctgcacatctctggactgagtagcgtggacgccggtgcctatagatgcgtggctaggaacgccgcagggcataccgaaagactagttagtctaaaggttggacttaagcctgaagcaaacaaacagtatcacaacctcgttagcatcattaacggcgaaaccctgaagttgccttgtacccccccaggtgccggacagggtaggttctcttggacgctgcccaacggcatgcacctggaaggccctcagacactagggagggtcagcctcttagataacggcaccctgaccgtgcgggaggcaagcgtattcgaccggggtacatacgtgtgccgaatggaaaccgagtatgggcctagcgtgacctcaattcccgtaatcgtgatcgcctacccccctcggatcacaagtgaacctacacctgtgatatatacccgcccaggtaacacagtcaaattgaactgtatggcgatgggaatccctaaggcggacattacctgggagctgcctgacaagtcccacctgaaggctggcgtgcaagcccgactatatggaaacagatttctccacccgcaggggtccctgacaattcagcatgccacccagcgagatgccggtttctacaaatgcatggccaaaaacattctgggtagcgattctaagacgacttacatccacgttttcta

SEQ ID NO: 186631 - DNA, 8487 bp, Artificial Sequence
  derived and/or modified sequence
atgccaaagagggctcactggggagcgctgagcgttgtacttatcctactgtggggtcaccctcgtgttgctctggcatgtccccatccgtgtgcttgctacgttcctagcgaagtgcactgtactttccgatcgctcgcttcagtccctgccggaatagctaagcacgtcgaacggattaacctgggcttcaactccatacaagctctgtccgaaacatcgttcgctgggctcacaaagctggagctacttatgattcacggaaatgagatcccctcgatccctgacggcgccctgcgcgacctgtcgagtcttcaagttttcaaattctcctataacaaactgagggtcattacgggtcaaacacttcaggggctctctaacttaatgcggttgcacatcgaccacaacaagatcgaattcattcatccccaagcgttcaacggtcttaccagtctcagacttctccacctagaagggaatttgctgcaccagttgcatccgtccactttttctacattcacctttttggactattttaggctatccacaatccgccatctgtacctggcagagaatatggttagaacactcccggcatctatgctgcgtaacatgccacttctggaaaatctctacttgcagggtaacccatggacctgcgactgtgaaatgaggtggttccttgagtgggatgcaaagtctagggggattctaaagtgtaagaaagacaaagcgtatgagggaggccagctgtgcgcaatgtgcttctctccaaagaaactgtataagcacgagatacataagctcaaggatatgacctgcctcaaacccagtatcgaatctccgctgcgacagaatcggtcaaggagtatcgaggaagaacaggaacaggaggaggacggcggatcccagttaatccttgaaaagttccaactcccgcagtggagcattagcctcaatatgaccgatgaacacggcaacatggtgaatttagtctgcgacatcaagaagcctatggacgtttacaagatccacctcaatcagaccgacccacccgatatcgacattaacgccactgtggccctagacttcgagtgtccaatgacccgagaaaactacgagaagctttggaaattgatcgcctactactccgaggtgcctgtcaagctgcaccgcgaactgatgttgtcaaaagatccacgggtgtcatatcagtatcgacaggacgctgatgaagaggccctgtactatacaggcgtcagggcgcagatcctggccgaacccgaatgggtgatgcagcccagtatcgacatccagctcaatcgtcggcagagcaccgccaaaaaagttctcctgagctactatacccaatattcacagactatatcaactaaggacacacgccaggccaggggtcgatcttgggtgatgatcgaaccttctggcgcggtccagagggatcagactgtgctcgaggggggaccttgccaactcagctgtaacgttaaggcctcagaatccccaagtattttctgggttctgcctgacggctccatccttaaggcccctatggatgacccagattctaaattctcaattctttcctcagggtggctgcggatcaagtccatggagccttccgacagtggattatatcagtgtatcgcccaggtacgcgatgaaatggaccgaatggtgtaccgggtactggtgcaatcaccctcaacgcaaccagccgaaaaggacacagtcactataggaaagaatccaggcgaaagcgtcactctgccatgcaacgcactggcgatcccagaagcccacctcagttggatcctacccaaccgaagaattattaatgatttggctaacacgtctcacgtgtacatgctaccgaatggtactctgagcatccccaaggtgcaggtcagcgactcaggttattacaggtgtgtcgccgtcaatcaacagggtgccgaccattttactgtgggtatcaccgtaaccaagaaaggatctggcctacctagcaaaaggggcaggaggccaggtgcaaaggcattgagccgagtgcgggaggacatcgtggaggatgagggcggaagcggaatgggtgatgaagaaaatacatcacgcaggctcttgcaccctaaagaccaggaggtcttcctgaagacaaaggacgacgccatcaatggcgataagaaggcgaagaagggaaggagaaaactgaagctctggaagcactctgaaaaagagcccgagacgaatgtcgcagaaggtaggcgcgtgtttgagtctcggcgcaggatcaatatggctaataagcagatcaatccagaacgttgggccgatatcctcgccaaggtcagggggaagaacctgcctaaggggaccgaagttccaccccttatcaagaccacttcgccgccatcactttctctcgaagtcacccctccttttccagcgatttctccgccatccgcctcccccgtgcagacagtgaccagtgccgaggagtcatcggcagatgtgcccctgctgggtgaggaggaacacgttctggggacgatcagttcagctagcatgggcctagaacacaaccataatggtgtgattctcgtggagcccgaagtcactagcaccccacttgaggaagttgtagacgacctcagtgagaaaacagaggagataacatcgacagagggggacctgaagggaaccgccgcaccgaccctcatcagtgaaccctacgaaccaagccccaccttgcacacactggatactgtctacgaaaagcctacgcatgaggaaaccgccacagagggttggagcgccgccgatgtcgggtctagccctgagcctacatcatctgagtatgagccgcccctcgatgcagtgtctttagctgagtctgagcctatgcaatattttgacccggatttagagactaaatcccagcccgacgaggataagatgaaagaagataccttcgcacatctgactccgaccccaaccatatgggtgaacgactctagcacctctcagctgttcgaggactccactatcggagagcctggcgtgcctggtcaatcacacctccagggtcttaccgacaacatccacttggtcaaatcatcactgtcaacacaggacacacttttgattaaaaaaggtatgaaagaaatgagtcagacgttgcaggggggaaacatgctggaaggcgaccccactcattctcgcagctctgagtcggaaggtcaggagtccaagtcgattactcttcctgacagcacactgggtatcatgagttctatgagccctgtgaagaagccagccgagacaacagttggtaccttattggataaggataccactaccgccacaacaacacctcgccagaaggtggccccatcaagcaccatgtctacacatccttctaggaggagacctaacggtcggaggcggctgcgcccgaacaaatttaggcaccggcacaagcaaacaccaccaaccacttttgctccgtctgagacatttagtacgcagcccactcaagctcctgacatcaagatctcctcgcaggtggaaagctccctagttccaacagcctgggtggacaatacagtaaacacgcccaagcagctggagatggagaaaaatgcggagcctacgtctaagggcaccccaaggcgaaaacatggtaagcgccccaacaagcataggtacaccccttcaacagtgtcgagccgcgcatccggttccaaaccgtcaccgagcccagaaaacaagcatagaaatattgtcacaccatcaagcgagaccatcctgctgccacgaactgtgagcctcaagaccgaaggaccttatgattctttagactatatgactacaactcggaagatctacagttcctatcctaaggtccaggaaacacttcctgtgacctacaagcctacctctgatggtaaagaaattaaagatgatgtagctaccaacgtcgataaacacaagtcagatatcctggtgactggcgaatccataacaaatgccatccctacctcacgcagtttggtttcgacaatgggcgagtttaaagaggagtcctcaccagtggggttcccaggcacccccacatggaacccttcacgaaccgctcagcctggtcgcctccagacaggcatcccagtgactacctcgggggagaacctcactgaccctcccctactgaaggagctggaggatgttgactttacttctgaatttctttctagcctgacagtttctacaccgttccaccaggaggaagctggctcatcaaccacacttagttcaatcaaggtcgaggtcgcttcatcacaggccgagacaacgaccctggatcaggatcacctggaaacaaccgttgccattctgctttccgagacacgtccacagaaccacactcctaccgctgctcgcatgaaggaaccggccagcagttccccttcaaccatactgatgagcctgggtcagaccaccaccactaaacccgcactccccagccctagaatctcacaggcaagtcgcgactctaaagaaaatgttttcctcaactatgtgggaaatccagaaacggaggcaacacccgtgaacaatgaaggaacgcagcatatgtcgggacccaatgagctctcaacaccttcatcagaccaggacgcattcaacttatctactaagttagaactggagaaacaggtgtttgggtcaagaagcttgcctagaggtcctgactctcaacgacaagacggacgggtgcatgctagccaccagctgacacgcgttccagctaaaccaatccttcctacagctaccgttcggttgcctgaaatgtccacccagtcggccagtcggtatttcgtaacctcacagagccccaggcactggaccaacaagcctgaaatcactacctatcccagcggcgctctgcccgaaaacaaacagtttactacgccccgcctgagtagtaccacaattccacttcccctgcacatgagtaaaccatccatcccgagtaaattcaccgaccggcggaccgatcaatttaacggctactcgaaagttttcggtaataacaacatcccagaggcacggaatccagttggcaagccgccatctcctcgaatcccacactattcaaatggtagacttccctttttcactaacaagaccctcagtttcccacaactgggtgtaacgcggaggcctcagatacctactagtcctgcgcctgttatgagagagagaaaagtaattccaggcagctacaatcgtattcacagtcactccacctttcacttagacttcggacccccggcccctcctctgcttcatacacctcaaacaacagggtccccatccactaatcttcagaacattccgatggtgagttccacccaatcttctatatccttcatcactagttccgtccagagcagcggctctttccaccaaagctctagtaaattttttgctggtggaccgccagctagtaaattttggtcccttggagaaaaaccacagatccttacaaagtctccacagactgtgtccgtaactgccgaaaccgacaccgtgttcccctgtgaagctaccgggaaacccaaaccattcgtaacctggacaaaggtcagcactggcgcactgatgacacccaatacgagaatacaacgctttgaggttctgaagaatggtacactagtgattaggaaagtacaagtccaagataggggccagtatatgtgcactgcgtccaatctgcacggcctggataggatggtggtgctactcagcgtgactgttcagcagccccaaatactggcatcccattaccaggatgtcaccgtgtatctgggcgataccatagccatggagtgcctggcaaaaggcacccccgcgcctcaaatcagctggatctttccagaccggcgggtgtggcaaactgtgtcccctgtagagggtcgtattactttgcatgagaaccgcacactctctatcaaagaggcatcgttcagcgatcggggcgtgtacaaatgcgttgcttccaacgccgctggagccgattcactggcaatcagactgcatgtggccgccctgccacctgtcattcaccaggaaaagctggagaacatctcattaccacctggcctgagcatacacatacactgcacagcaaaggctgcgccgctgcctagcgttcgatgggtattgggcgatgggacacagatacggccatctcagttcctgcacggcaatctgtttgtctttcctaacgggaccctgtacattcgcaatctcgctcctaaagactctggacgctatgaatgtgtggcggctaatctggtcggctccgcccggaggaccgtacaattgaatgttcagagagccgctgccaacgcgcgcatcacaggcaccagcccacgcaggacagatgtgaggtatggaggtacccttaaacttgattgctcagcctccggggatccttggcctcgaattctctggcgcttgccaagtaagcgcatgatagatgccctgttttccttcgactcgcggatcaaagtgtttgccaatggaactctggtcgtcaagtcagtaacagataaagacgccggggattacctctgcgtggcccgaaacaaggttggggacgattacgtcgtgctgaaggtggatgtcgtgatgaaacctgcgaaaatcgagcacaaagaggagaacgatcataaagtgttttatggaggtgatctcaaagttgattgtgtcgctaccggtctaccaaacccggaaataagctggtcactgccggacggatccctcgtcaacagcttcatgcagagtgacgactcaggaggtagaaccaagcgttacgtcgtttttaacaatggtaccctatactttaacgaggtgggtatgagggaggagggcgattacacatgcttcgccgagaatcaggtcggaaaggacgaaatgcgagtcagagtgaaagtggtgactgctccagcaactattcgaaataagacatatctcgctgttcaggtgccttatggtgatgtggtgactgtggcctgcgaggctaagggagaacccatgccaaaagtgacttggctgtcaccaacaaacaaagttattcctacaagtagtgaaaagtaccagatttaccaggatggaacgctcctgatccagaaagcccagcggagcgactcaggtaattatacatgcctggtgaggaattctgctggggaggatagaaagacggtctggatacacgtgaatgtgcagccacctaaaataaacggcaaccccaaccctatcactaccgttcgcgagattgccgccggcgggtcacgcaagctcattgactgtaaggcggagggcatcccaacaccccgcgtactgtgggcattcccagagggcgtcgtactccctgccccatactatgggaatagaatcactgttcacggcaatggaagcctggatattcgcagcctaagaaagagcgactctgttcagttggtgtgcatggcaaggaatgagggcggtgaggcgaggctgatccttcagttgaccgtgctcgagccgatggaaaaaccaatcttccacgatcctatctccgaaaagatcacagctatggccggacatactatttccttgaactgtagcgccgccggtacaccgacaccttcccttgtctgggtcctacctaatggaaccgatctccagtcagggcaacagttgcagaggttctatcataaagcagacggtatgctccacatcagtggactgagctctgtggacgctggggcctacagatgtgttgcccgcaacgcagccggccatacggagagattggtaagtttaaaggtgggactgaagcctgaagcaaataagcaataccataatttggtctcgattattaatggcgaaactttgaagctgccctgtactccccccggagcagggcaggggcgcttttcgtggactcttcccaacggtatgcacttagagggtccacagactttagggcgtgtgtcgctgctggataacggcacactgacagtcagagaagcatcagtgttcgaccggggtacttacgtctgcagaatggaaacggagtacggaccctctgttactagcattccagtgatcgtaatcgcttaccctccacgtatcacttctgagcccactcccgttatatacactaggcccggaaacaccgttaagcttaattgcatggccatggggatcccgaaggccgatattacatgggagttaccagataaatctcatcttaaagctggcgtacaggctcgactttacgggaatcggtttttgcaccctcagggcagcctaacaatccagcacgccacacagagagacgcagggttctataaatgcatggcaaagaacattttagggtccgacagcaaaaccacttacatccacgtattctag

SEQ ID NO: 186632 - DNA, 8487 bp, Artificial Sequence
  derived and/or modified sequence
atgccaaagagggctcactggggagcgctgagcgttgtacttatcctactgtggggtcaccctcgtgttgctctggcatgtccccatccgtgtgcttgctacgttcctagcgaagtgcactgtactttccgatcgctcgcttcagtccctgccggaatagctaagcacgtcgaacggattaacctgggcttcaactccatacaagctctgtccgaaacatcgttcgctgggctcacaaagctggagctacttatgattcacggaaatgagatcccctcgatccctgacggcgccctgcgcgatttatctagtctgcaagttttcaaattttcctataacaaacttagagtgatcacaggacagacgttacaaggcctctccaatttgatgaggcttcacatcgaccacaataaaatagaatttatccaccctcaagcttttaacggcctcacaagcctcaggctcctccatctggaagggaacctcttgcatcaactccaccctagtactttcagcacattcaccttcttagattattttcgcctctccacaattcgccacctgtatctggcggaaaacatggtacgtaccctgcccgcttctatgttgaggaatatgcccttgttagaaaacctataccttcaaggaaatccctggacatgcgactgtgaaatgagatggttcctcgaatgggacgccaagtctagaggcattctcaaatgcaagaaggataaggcctacgagggaggacagctgtgcgccatgtgcttttcccctaagaaattatataaacacgaaatccataagctcaaagacatgacgtgcttaaagccatctatagaaagcccactccgccagaataggtccaggagcattgaagaggagcaggaacaggaagaggacggaggcagtcaactgattttagagaagttccagttgcctcagtggtctattagcttaaacatgactgacgaacatgggaatatggtaaacctagtgtgtgatatcaagaagcccatggatgtatacaaaatccaccttaaccagaccgaccctccagatatagacatcaatgccaccgtggcccttgacttcgaatgccccatgacgcgcgagaactacgaaaagctttggaaattaatagcctattattcggaggtacccgttaagctgcaccgcgagctaatgttgagcaaagaccctcgcgtctcttaccagtaccgccaggacgccgacgaggaagctctttattacacaggcgtgagggcccaaatcttggccgaacctgagtgggtgatgcagcctagtattgacattcagctaaatcgcagacaaagtacagccaaaaaagtgctcttatcctactacactcaatattcacagactatctccaccaaagacacaaggcaagcgcgtggtaggtcatgggtgatgattgaaccatcaggcgccgtgcagagggatcagactgttctggagggaggcccatgccagctgtcttgtaatgtgaaagcctccgaaagcccctccattttttgggttctcccagacggatcaatcttgaaagctccaatggatgaccctgatagcaagttttccatattgtcatctggctggctgagaatcaagtctatggagccctccgattctggactgtaccagtgcattgcacaggtcagagatgagatggataggatggtttacagagtcctggtgcaatctccatccacgcagcccgcagaaaaagatacagttacgatcgggaagaacccaggtgaatctgttaccctgccatgtaacgcactggctatccccgaagcccatctttcttggattctgccaaatcggagaatcataaacgacctagccaatactagtcacgtgtatatgcttcccaatggaacattatccattcctaaagttcaggtttcagatagcgggtactacagatgcgtggcggtgaaccagcagggcgccgaccacttcacagttggaattacagtgacaaagaaaggctcggggttaccatcaaaaagagggcggcggccgggtgctaaggctctatcaagagtgagggaggatatcgtggaggatgaggggggtagcggaatgggggatgaggagaatacaagccggagacttctgcatcccaaggaccaggaggtgtttctgaaaaccaaagacgatgcgatcaatggggataaaaaagctaaaaaagggcgtcggaagctgaagctttggaagcatagtgagaaggagcctgaaactaacgtggctgagggtaggcgcgtgttcgaaagtaggagacgcattaacatggctaataagcagataaatcctgaacggtgggccgacatactggccaaggtcagagggaaaaacttgccaaaagggacagaggtccctcccctaatcaaaaccacatcccccccatccttatctttagaggttacacctccattccctgccatctcaccgccgagtgcctcgcctgttcaaactgtgacatccgccgaagaatcaagcgctgatgtcccgctgcttggtgaggaagaacatgtattgggtaccatctccagcgcgtcaatgggactagagcacaaccacaacggggtgattttggtcgaacccgaggtaactagtacccccctcgaggaagttgtggatgatctgagcgagaaaaccgaagagatcacctctacagagggcgatctcaaaggaacagcagcacccacactgatttctgaaccctacgaacccagtcctaccttgcatactttagacacagtctacgaaaaaccaacacacgaagagacagcaactgagggttggtctgccgcagatgtgggaagttctccagaaccaacttcttccgaatacgagcccccacttgacgccgttagccttgcagagagcgaaccaatgcagtactttgaccctgatctggaaacaaaatcccagcctgatgaggacaaaatgaaagaagacacatttgcgcatctgacgcctactccgacgatttgggttaacgactccagcacatcccaattattcgaggactcaactatcggtgagcctggtgtgcctggacagagccacttacagggattgacagacaatatccatctagtaaaatcttccctgtccacgcaggatacactgctgatcaagaagggcatgaaggagatgagccagacacttcaaggggggaatatgttagaaggtgaccccacacactcccgctcaagcgagtcagagggccaggagagcaaatctatcacactgcccgactccaccctgggcattatgtcttcaatgtcccctgtaaaaaaaccagccgagaccaccgtgggaactctgttggataaagacacaaccaccgccacaacgacccccagacaaaaagtcgctcccagttcaacaatgtccacacacccgtctagacggaggcctaatggacgaaggagactgcgcccgaataaatttagacacagacataagcagacaccacctaccacctttgctccctccgaaacgttttcaacacagccaacccaagcacctgatataaagatctcatcacaggttgagtctagtctcgtccccaccgcttgggtcgacaatacggtgaacacacctaagcagctggaaatggagaaaaatgccgaacccacaagtaaagggacacccagaagaaagcatggcaagagacccaacaagcaccggtacaccccgtcaaccgtgtcgtcaagagcctcaggatccaaaccatcgccatcccccgagaataaacatcgaaatatcgtcacccctagctcagagaccatcttgttgcccagaaccgtgagcctgaaaactgagggaccatatgatagtctagactacatgacaaccacacgtaagatttactcttcttatccaaaggtacaagaaaccctccctgtgacctacaagcccaccagcgatggcaaagaaatcaaggacgatgtggctaccaatgtggataagcacaaatctgacattctcgtcaccggagaaagtataactaacgctattcccaccagccgatctctagtgagcacgatgggggagtttaaagaggaatcatctccagtcggattccctggcacaccaacctggaacccttcccgaaccgcccaaccaggcaggctgcagactggcatccctgttacaacaagcggcgaaaacctgacagaccctccactccttaaagaactcgaagatgtggattttacctctgagttcctttccagtctgacagtgtccacaccgttccatcaggaagaagctggctcctcaactacgctctcttcgattaaggtggaggttgcgtcaagccaggccgagaccacaaccctcgatcaggatcatctcgaaaccaccgttgccatcctgctctccgagacaaggccccagaaccacactcctaccgccgctcgcatgaaagaaccagcctcaagttcacccagtaccatactgatgtcccttggacagactaccaccaccaaacctgctctgccatcccctcgcatctcccaggcaagccgcgacagtaaggagaatgtatttttaaactatgtcggcaatccggaaacagaagccacacccgttaataatgaaggcacgcagcacatgtccggcccaaacgaactgtccacccctagctctgaccaggacgcctttaatcttagtactaagctggaactcgaaaagcaagtttttggcagcagatctttgccccgcgggcctgattcccagcgtcaggatgggcgcgtccacgcaagtcatcagctcacccgcgttcctgcaaagcccattcttcctacagctacagttcggctcccagagatgtccacccagtccgcctcccgatatttcgtcacatcccagtcgccccgccactggactaacaaacccgaaattactacttatccttcaggagctctacccgagaataagcagtttaccaccccccgcctttccagtaccacaatccctcttcccctgcacatgtctaagccttcgatacccagtaagttcaccgatcggcggacagaccagttcaacggctatagtaaggtgtttggaaataacaacatcccagaagcacgaaatcctgtcggcaagcccccaagcccaagaatccctcattacagcaatggacgccttcccttctttactaacaagacactgtcatttccgcagctaggagtcactaggagaccgcaaatcccaacctcccctgcccccgtcatgcgtgagaggaaagtcatccctggttcatacaaccgaattcactctcactctaccttccacttggacttcggccccccagcacctcctttgctgcatacacctcagactactggcagcccaagcactaatcttcagaacattccgatggtgagttccacccaatcttctatatccttcatcactagttccgtccagagcagcggctctttccaccaaagctctagtaaattttttgctggtggaccgccagctagtaaattttggtcccttggagaaaaaccacagatccttacaaagtctccacagactgtgtccgtaactgccgaaaccgacaccgtgttcccctgtgaagctaccgggaaacccaaaccattcgtaacctggacaaaggtcagcactggcgcactgatgacacccaatacgagaatacagcggtttgaagtgctgaaaaacgggacccttgtgattagaaaggtacaggtgcaagatagagggcagtacatgtgcaccgcctctaacctccacggtttagaccgtatggtagtgctactatccgtgaccgtgcaacagccgcagattctggcctcacactatcaggatgtgaccgtatacctgggagacactattgccatggagtgcctcgccaagggcacaccagcgccccagattagctggatcttccccgaccgccgtgtgtggcagacagtttcacccgtcgaaggacgcataaccctacacgagaacagaaccctcagcatcaaagaggcatcatttagcgataggggagtttacaagtgcgtggcctctaacgccgccggagccgactcattagctattcgccttcatgtcgccgcactgcctcccgtgatacaccaggaaaaattggaaaatatatcccttccccctggcctttccattcacatccattgtaccgccaaagctgcccctcttcccagtgtgcgatgggttttaggcgatgggacccaaatccgtccgtcacagttcctgcacggcaatctgttcgtgttcccaaatggtacgctatacatccggaacttagctcctaaagacagtggaagatacgaatgtgtggcggctaacctggtcggatctgctagaaggactgtgcagctgaacgtgcagagggctgcagctaacgctcgaataactggcacctcacctcgccgcaccgatgttcgctacggcggcaccctaaaactagattgctccgcttcaggcgatccttggcctcgtatcctctggcggttgccttcaaaacgtatgatagatgccctcttttcctttgactctaggatcaaggttttcgcaaatggtacattagttgtgaagagcgtcacagacaaagatgccggagattacctgtgtgtggctaggaataaagtgggtgacgattacgtggtgttaaaggtcgatgtcgtgatgaagcctgcgaaaattgagcataaagaagagaatgatcataaggttttctatggcggcgaccttaaagtcgattgtgtggctaccggactccctaatccagaaattagctggtcactgcctgacggctccctggtcaacagctttatgcagagcgacgatagtggagggaggacaaagcgctacgtggtatttaacaacggaaccttgtacttcaatgaagtgggaatgagagaggaaggagactacacatgctttgcggaaaatcaggtagggaaagatgagatgagagtgcgagtgaaagtggtgactgcgcccgccacgattcgaaataaaacatatttggcagtccaggtgccgtatggagatgtggtaacggtagcttgcgaggcgaagggggaaccgatgcctaaggtaacatggctgagccccacgaacaaagtgatccccacatcctctgaaaaatatcagatatatcaggacgggacattactcattcagaaggcgcagaggagcgattcgggcaattatacctgtctcgtacgtaacagtgctggcgaggaccgcaaaactgtgtggatccatgtcaatgttcaacctccaaaaattaatggcaaccccaatcctattacaaccgtccgagaaatagccgccgggggctctagaaagctgatagattgcaaggcagaaggcatcccaactcccagagtgctgtgggcctttcccgagggcgttgtgctgccagcaccatactacggcaatcgcataaccgttcacggcaatgggtcactcgacatcagatccctaaggaaaagcgattctgtgcagctggtctgcatggcacgcaatgaaggaggcgaagcaaggttgatcctacaattgactgtcctcgagccaatggaaaagcctattttccacgatcctatctcagagaagatcaccgccatggcaggtcacacaatttccctgaactgctccgcagctggaacaccgactccctcactcgtgtgggtcctcccaaatggtaccgacctgcaatccggccagcaacttcagcgtttctatcataaagcggatggaatgttacacatttccgggttatcttccgtggacgcgggcgcctacagatgtgtcgcccgtaatgccgccggacacacagaacgactcgtcagcctcaaggtgggtctcaaacccgaagctaataaacagtatcataacctggtgtctataattaacggtgaaacacttaagctcccctgtacccctccaggggctggacaagggcggttctcttggacacttcccaatggaatgcatcttgaaggtcctcagacactgggaagagtgtccctgttggataatggaacacttaccgtgcgggaagcgtcagtttttgacagaggcacatatgtatgtcgcatggaaaccgaatatgggcctagcgtgacctcaatccctgtaatcgtaatcgcctatcctcctaggatcacctcagaaccaacgcccgtaatttatacaagacccgggaataccgtcaaactgaattgcatggctatgggcattcccaaggcagacatcacctgggagcttcctgataaatcccacttgaaagcaggagttcaggccagactctatggcaaccgcttcctccacccgcagggctccttaactatccagcacgccacacaaagggacgctggcttctacaagtgcatggctaaaaacatcctgggctccgattccaaaaccacttacatacacgtattctag

SEQ ID NO: 186633 - DNA, 8487 bp, Artificial Sequence
  derived and/or modified sequence
atgcctaaacgagcacactggggcgccttgagtgttgtgcttatactgttatggggccaccccagagtagcactggcctgccctcacccatgcgcgtgttacgttcctagtgaggttcattgtacttttcggagcctagctagcgtgcctgcgggcatagctaaacacgtagagagaatcaacctgggttttaatagtatccaagcactttccgaaacaagctttgccggacttacgaagctcgagctcctgatgatccacggaaacgaaataccctccatccctgacggtgccctgcgagacctgtcatcgcttcaggtctttaagttttcctataataaactgagagtgattactgggcagacgctccagggcctgagcaaccttatgagactccacattgatcacaataagattgagtttatccatccacaggcctttaatgggctcactagtcttaggctcctccacctggaggggaatctgctgcaccagctgcatccttctaccttctcaacatttacgtttctggactatttcagactttctacgattagacacctgtatcttgccgagaacatggtgcggactcttcccgcgtctatgttaagaaacatgccacttctagagaatctctatctgcagggaaacccatggacctgtgactgtgaaatgcggtggttcctggagtgggacgccaaaagccgtggcattctgaaatgtaagaaggataaggcttatgagggggggcaactctgtgcaatgtgttttagccccaagaagctatataagcacgagatccataaacttaaggacatgacgtgtttaaagccttcaatcgagtctcccctgcgacagaatcgaagccgcagcatcgaggaggaacaggaacaggaggaagatggcgggtctcaactcattttggagaagtttcagctgccccagtggtctattagcctgaacatgacagatgagcacggaaacatggttaatctggtctgcgacatcaagaagccaatggacgtctacaagatccatctgaatcagacagatcctcccgacatcgatatcaacgcaacagtggccctcgactttgagtgccccatgacacgtgaaaattacgaaaaactatggaagctcattgcgtattactcggaggtccctgtcaagctccatagagagttaatgctgagtaaggatccccgtgtttcataccaatatcggcaggatgccgatgaggaggctctgtactacacgggcgtaagagctcagattctcgctgagcccgaatgggtcatgcagccatctatcgacattcagctgaatcggcgccagagcacagccaaaaaggtgctgctctcttattacacacagtattctcaaactatttcgaccaaagatactcgacaggcccgcgggcggtcttgggttatgatcgagccttcaggcgccgtccaaagagaccagactgttctcgagggcggtccttgccagctatcatgtaacgtgaaggctagtgagtcccctagtatattttgggtgctccccgatggctccattttaaaagctcctatggacgatcccgacagtaagttttctattctttcctcaggttggctcagaattaaatctatggagccttccgatagtgggctgtaccagtgtatcgcccaagtgcgagatgaaatggatcgcatggtttaccgggttctggtgcaatctccctccacgcagcctgccgagaaggatacggtgaccatcggcaaaaatcctggtgaaagcgtgacattaccttgtaacgccctggccattcctgaagctcacttgtcttggatccttcccaatcgccgtatcataaacgatctggcgaacactagccacgtttatatgctgcccaatggaaccctgtccatccccaaagtacaggtgagcgactctgggtactaccggtgcgtggccgtgaaccaacaaggcgctgatcatttcactgtcggtatcacggtaactaagaaaggaagcggacttccctctaagagggggagaagaccaggggcaaaggctttatcaagggtcagggaggacatagtggaggacgagggaggcagtggaatgggcgacgaagaaaatacttctcggaggttactgcacccgaaggatcaggaggtatttctgaagaccaaagacgatgctatcaacggcgacaagaaggctaagaaaggcagacgaaagctcaagctgtggaagcacagtgagaaggagcccgagaccaacgtcgctgaggggcgccgggtcttcgaatcacgtaggcggataaacatggcaaacaaacagattaaccccgagaggtgggcagatatattggctaaggtcagaggaaaaaatctgcctaaaggtaccgaggtgcctccactcatcaaaactacttcccctccttctctctcactggaagttacgcctcccttccccgctatttcaccgcctagcgcttcgcctgtccagacagtcacctccgcagaggagtccagcgccgatgtgccattattgggagaggaggagcatgtactgggcacaatcagctccgccagtatggggctggagcacaatcacaatggcgtgattctcgttgagccagaggtgacttcaacacccttggaggaagttgttgatgatctcagcgagaagactgaggagatcacatcaactgaaggcgaccttaagggcacggctgccccaaccttaatatctgaaccttatgagcctagccccacccttcacactctggatacagtgtatgaaaagccaacccatgaagagacagcgacagagggctggtccgctgccgatgttgggtccagtccggagccgacatcctcagaatacgagcccccactggatgctgtctctctggctgagagcgagccgatgcaatattttgatccggacttagagacaaaaagccagcccgacgaagataaaatgaaggaagacacctttgcccacctgacgcccactcccacaatctgggtcaatgactcttctacgagccaacttttcgaagactctaccattggcgaaccaggcgtgccaggtcagtcacacctgcagggcctgacagataacatacatctggtgaagtctagcctgtctacccaggacacacttctgatcaaaaagggaatgaaggagatgtctcagacactacagggaggcaatatgctagagggagaccccacacattcacgctcctcagagagcgagggccaggaatccaagagcatcaccctgcctgatagtactctgggcatcatgagttcgatgagcccagtgaagaagcctgcagagactaccgtgggtactcttctggacaaggatactacgaccgctactaccactcctcgccagaaagtggcacccagctccactatgtcgacccatcccagccggcggcgccccaacggaaggaggcgcttgcggcctaacaaattcagacatcggcacaagcaaaccccacctaccacatttgccccctcggagaccttttccacgcaaccaactcaagcccctgatattaagatttccagccaagttgagtcgtccctggtacccacagcatgggtggataatacagttaacactcccaagcagttagaaatggaaaagaacgctgaaccgacgagtaaggggaccccgcgacggaagcacgggaagaggcccaataaacacaggtacacaccaagcacggttagcagcagggcttctggaagcaagccctcgcctagtcccgaaaacaagcataggaatattgtaactccttcctccgagacaatattgctaccaagaaccgttagcttgaaaactgagggcccgtatgacagccttgactacatgacgactacacgaaaaatttactcaagctatcctaaagttcaagagacgctgcccgtgacctataagcctactagtgacggcaaagagattaaggacgacgtggctactaatgtggacaagcataaatccgacatcctcgtgactggtgagtctattaccaatgccattcctacgagtaggtctttggtgtccacgatgggtgagtttaaggaagagagttcacctgtggggttcccaggaacccccacttggaatccctcccggactgcccaacccgggagactgcagactggtattcctgtgacaacatccggagaaaatctgactgatcccccgctgttgaaagaactcgaagacgtagacttcaccagtgagtttttgtcctccctgaccgtttccacaccttttcatcaggaagaagccggatctagcacgaccctttctagcatcaaagtggaagtcgccagcagccaggctgagactacgacactggatcaggaccatttagaaactacggtggcaattctactgtccgaaacccgcccccagaatcatacccctaccgccgcccgtatgaaggaacctgctagctctagcccatcgactatactaatgagcctgggtcaaaccaccaccactaagcctgcattgccctcacctcgaatcagccaggcttcgagggatagcaaggaaaatgtatttctgaactatgtcgggaatcctgaaaccgaagcaaccccagtgaataacgaaggcactcaacatatgagtggtcccaacgaattgtctaccccatctagtgaccaggatgctttcaacctgtctacaaagctggagctcgaaaagcaggtttttggcagtagatcacttccacgtgggccagactctcagaggcaagacggacgagttcatgcctcacaccaactcaccagggttcccgcgaagcctattctgccaactgcgacagttcggctgccagagatgagcacacagagcgcatctaggtacttcgtgacaagccagagtccgcgccactggacaaataagccagagatcacaacatacccgagtggggccctccccgaaaacaagcagtttaccacgccacggctgagtagtaccaccatcccactccccctccacatgtctaagccttcaattcccagcaaattcacagatcgccggaccgatcaattcaatggatattccaaggtctttgggaataacaatatccctgaggctagaaaccccgtgggtaagcccccgtcccccaggatcccacattattccaacgggagactccccttttttaccaacaaaacgctgtcctttccgcagctcggcgtgaccaggcgaccccagatcccaacttcacccgcgcctgtcatgcgtgagagaaaggttattcccgggagttacaaccgcatccacagtcacagcacttttcacctggatttcgggccacctgcaccgccgctgctgcacacaccccagactacagggtcaccgagcacaaacctccaaaacattcctatggtgtcctcaacccagtccagcatcagcttcataacttcttcggtgcagagcagtggtagctttcaccaaagctcatcaaagttttttgcaggcggaccacctgcatcaaaattttggtccctgggagagaagccccagatcctcaccaagagccctcagaccgtgtctgtgacagcagaaacagacactgtcttcccatgcgaggccactggtaagcccaagccattcgttacctggacaaaagtttcgactggggcactcatgacgcctaatacacgcatccaacgcttcgaagtcctaaaaaatggtaccctagtgattcgcaaggtacaagtgcaagatcgcggccagtatatgtgtaccgcctcaaatctgcatggcctcgatcgcatggtcgtcctgctttccgtgacagtccagcagcctcagatcctggcctcccattaccaggatgtgacagtgtatttaggcgacactatagccatggaatgcctcgctaaagggacccccgccccgcagatatcatggatcttcccggataggagagtgtggcaaactgtgtctcccgtggagggaagaattaccctacacgagaataggacgctctcgatcaaagaagcctctttcagcgacagaggggtctacaaatgcgtggcgagcaatgcagccggcgccgactcactggctatccgattgcacgtggcggccctgccaccagttattcatcaagaaaaactggaaaacatttccctgcctcctggcctgagcatccacatacattgcactgccaaagccgctcctttgccttcagtccggtgggtactgggagatgggacccaaattcggccttctcagtttttgcatggtaatcttttcgtgttcccaaatggaactttatacatccgaaatctggctccaaaggattcaggacgttacgaatgcgtcgctgccaatctggtagggtcagctagacgcacagtccagctcaatgtgcagagagcagctgccaacgcacgcatcacaggcacttcccctaggcgaacggacgtccgttacggcgggactctgaaactggactgttccgccagcggcgacccgtggccaaggatcctatggcgcctgcccagcaaacgcatgattgacgccttgttctctttcgactcacgaatcaaagtctttgctaacggcacactcgtcgtgaaatccgtgacagacaaagatgcaggagactacttatgcgtcgccaggaataaggttggtgatgattacgttgtcttgaaggtggatgtggtcatgaaacctgccaagatagaacataaagaggaaaacgatcacaaggtgttttatgggggggacctgaaagtcgattgcgtggccaccggcctccccaatccagaaatctcctggtccttgccagatggttcactggtgaactcctttatgcagagcgacgactctggcggccgaacaaaacggtacgttgttttcaacaacggcacactatacttcaatgaggtgggaatgagggaggaaggcgactatacctgcttcgccgagaatcaggtaggcaaggacgaaatgcgggtcagagtgaaagttgtcaccgcccctgccacgattaggaacaagacttatctggccgtccaagtgccctatggagatgtggtcaccgtagcttgtgaagccaagggggagcctatgcctaaggtgacctggctgtctcctaccaataaggttattcccaccagctcggagaaataccagatctaccaagatgggaccctgttgatccagaaggctcagcgctcagactcaggaaactatacatgtttggtgaggaattctgcaggagaagacagaaagacagtgtggatccacgtcaatgttcaaccacccaaaataaatgggaacccgaacccaattaccaccgtgcgagagattgcagctggggggtcacggaagctcattgactgtaaggccgaaggaatccctacacctagggtgctgtgggccttccccgagggggtggtgctgccagctccatactacggcaatcgaatcacagtgcacggcaacgggtcactagacatccggagcttgcgtaagtcggactctgtacagctggtctgtatggcacgcaatgaagggggggaggcccgactgattttgcagctgacggtcctggagcccatggaaaaacccatctttcacgatcctatatcggaaaagatcaccgctatggccggtcatactataagtcttaattgttccgccgctggcaccccgacaccttcactggtatgggtccttccaaatggtaccgacctgcagagtggccagcagcttcagagattctaccacaaggcagacggtatgttgcacatcagtggactgtcctcagtggatgccggcgcctatcgctgcgtcgccagaaatgctgccggacacacagagaggctggtctctttaaaggttggactcaaacccgaggcgaacaagcagtaccataatttagtctccattatcaacggagagaccctgaaactgccttgtaccccaccaggggctgggcagggtcgtttttcctggaccctgccaaatggtatgcatttagaggggccacagaccctggggagggtgtcacttctggacaacggcaccctgacagtacgcgaagccagcgtgtttgaccgcggaacatatgtttgtagaatggagaccgagtacggccctagtgtgaccagcattcccgtgatcgtgatcgcttatcctcccaggataacaagtgagccaactccagttatttacacacgccccgggaatacggttaagctgaactgtatggctatggggattccaaaagccgatattacatgggaacttccggacaaatctcatttaaaagctggagtacaggcaagactgtatggaaaccggttcctacatccccagggctcgctgaccatacagcatgccacacagcgtgacgctggcttctataagtgtatggctaaaaacatactgggctcagattccaagacgacgtacatccacgtgttttag

SEQ ID NO: 186634 - DNA, 8487 bp, Artificial Sequence
  derived and/or modified sequence
atgcccaagcgggcccactggggcgccctgagcgtggtgctgatcctactgtgggggcaccctagagtggcgctggcctgtccacacccctgtgcctgctacgtcccttccgaagttcattgcacttttaggtctcttgcttccgtacccgcgggaatcgccaaacacgtggaacgaattaaccttggctttaattctattcaggctcttagcgaaacctccttcgcgggactcaccaagctggagttactcatgatacacgggaacgagatcccctccatccccgacggggcgctgagggatctgtcttcactgcaagttttcaaattctcgtataacaagcttcgcgtgattaccgggcaaaccctgcaaggcctcagcaacctcatgaggctgcatatcgatcacaacaaaattgagtttattcatccacaggcctttaacggcctcacttctctgcgcctgcttcatttggaaggcaaccttctgcaccagttgcacccgtctacgtttagcacatttaccttcctggattactttaggttatctactatacgacatctgtacttagccgagaacatggttagaaccttgccggcctccatgctcagaaacatgccactgctggagaacctgtatctgcagggaaatccatggacttgcgactgtgagatgcgttggttcctggaatgggacgccaagagcagaggcatattaaaatgcaaaaaggacaaggcctacgaagggggacagctttgcgccatgtgtttctcccccaagaaactttacaagcacgaaattcataaactgaaggacatgacttgtctgaagccctcaattgagtcgcccctgcggcagaaccgtagtcggagtatagaagaggaacaggaacaagaggaggacggcggcagccaactgatattagaaaaatttcagctgccacagtggagtatctccctgaacatgacagatgagcatggtaacatggtcaatcttgtttgtgacatcaaaaaacctatggacgtttataaaatacacctcaatcagacagatcccccagacatcgatatcaatgcaacagtggctctagatttcgaatgcccgatgactagagagaactatgagaagttgtggaaacttatagcctattactctgaggtcccagtgaaactgcaccgtgaactgatgcttagtaaggacccccgcgtgtcatatcagtaccggcaagacgccgacgaggaagccctgtactatacaggagtgagagctcagatactagcagaaccagaatgggttatgcagcctagcatcgatattcagctgaaccgaagacagtcaactgcaaagaaagtcctcctgtcatattacacacaatatagccagaccatctccactaaggacacaagacaagccagaggcaggtcctgggtgatgatcgaaccttccggagctgtacaacgggatcagaccgtgctggaagggggaccctgccagctcagctgtaatgtaaaagcctcagagtctccctcaattttttgggtcctccctgacgggagtatactgaaggctccaatggacgatcctgattccaaattttctattttgtcttccggttggctgcgtattaagagtatggagcctagtgactcagggctgtaccagtgcatcgctcaggtgagagacgagatggataggatggtgtacagggtgttggtgcagagcccttccacgcaacccgccgagaaagataccgtgacaattggaaaaaatccgggcgagagcgtgaccctgccatgcaacgctctggcgatcccagaggcccacctgtcgtggattctgccaaatcgtcggatcattaacgacttagctaacactagtcatgtatacatgttgcccaatggcacactatccattcccaaggtgcaagtgagcgatagcggttattatcgctgtgtggcagttaatcagcaaggcgccgaccatttcacagtggggatcacagtcactaaaaagggctctggcctgccaagtaagagaggtcgcagacctggtgcgaaagcactctcaagggtgcgcgaggatatagtggaagacgaaggcggatccggaatgggagacgaggaaaacacatctcggcggctgctgcaccccaaggaccaagaggtgtttctgaaaactaaggatgacgccattaacggagacaaaaaagccaaaaagggacgccgtaagcttaagctgtggaaacattccgaaaaggaacctgaaaccaatgttgccgagggccgcagggtctttgaaagccgccgccgcattaacatggctaacaaacagattaaccccgaaaggtgggcagacatactcgccaaggttcgaggaaagaaccttccgaaagggaccgaggttccacctcttatcaagactacaagccctccttcgttatcgctcgaggtgacgcctccattccctgcgatatcgccaccgagtgcatctcccgtgcaaactgtgacatccgctgaagaaagctccgcggatgttcccctgctcggggaggaagaacacgttctagggactatttcatcagccagcatgggtctggagcataatcacaatggagtgatactggttgagcccgaggtgacctccacacccctggaagaggtggttgatgatctatcagaaaaaaccgaagagatcacatcgaccgaaggtgaccttaaggggaccgccgctcccacactgatctctgagccatatgagcctagccccaccttgcacacccttgatacagtctacgaaaagccgacacacgaggagactgctacagaaggctggagtgccgcggatgtggggtcaagtcccgaaccgacttctagcgagtacgagcctcccctagatgctgtgagcctcgccgaatccgagcctatgcagtattttgacccagatctggaaacaaaaagccagcctgatgaagataaaatgaaggaagacacattcgctcatctgactccaactccgacgatatgggtcaacgacagctccacttcacagttatttgaggattcaactataggggagccaggagtacccggccaaagccacctgcagggtttaaccgacaatatccatctcgtcaagagcagcctgtccacccaggacacactacttatcaagaaaggtatgaaagagatgtcacagacactgcagggcggcaacatgttggagggggaccctacacactccaggagctccgagagcgaagggcaggagtctaaatcaattacgctgccagattccactctgggcattatgagcagcatgtcccccgtcaaaaagcctgccgaaaccaccgtgggcacactcttagataaagacacaaccaccgccacgaccacgcctaggcagaaggtggctccttcctccaccatgtcaacccaccccagccggcggcgtccgaatgggcgacgtaggttgcgccctaacaaattcaggcacagacataaacagactcctcccacaactttcgcccccagcgagaccttctccacccagcctacccaagcccccgatattaagataagttcgcaggtggagtcctcccttgtgccaactgcttgggtcgataataccgtgaacacaccaaaacaacttgaaatggagaagaatgccgaacccacgtccaagggtaccccgcgtcgcaaacatgggaaaagacctaacaagcatcgctacactccttctaccgtctcgtctcgggcgtcagggtccaagcccagccctagcccagaaaacaagcatcgcaatatagtgacacctagctctgaaaccattcttctgccacggacggtcagtctcaaaactgaggggccctacgactccctggactacatgaccaccacacgaaagatctattcctcataccccaaagtgcaggagactctgcctgtcacctataagcccacgtctgacggcaaagagataaaggacgacgtggctaccaatgtcgataagcataaatccgacatattagttaccggggaaagcatcactaatgccatccctacctctaggtcactggtgtctaccatgggagaattcaaggaggagtcatcccccgttggctttcccggtaccccaacttggaaccccagtcgtaccgcccagccaggcaggctccagacgggaattccagttacaacgtctggggagaatttaacagaccccccactccttaaggaactggaggacgttgacttcacatcagaatttctgtccagtctcaccgtgagcacacctttccatcaagaggaggccggaagtagcacgactttatctagcatcaaagtggaggtagctagctcacaagctgaaaccactactctggaccaggatcacctggaaaccacagtggccattctattatctgaaacacgcccacagaaccatacccccactgctgctcgaatgaaagagcccgcctctagctccccgagtaccattctcatgagtcttggccagactaccaccaccaagccagcactgcctagcccccggatctcccaagctagtagggattccaaggaaaatgtttttctcaactatgtggggaatcctgagacagaggcaacacccgtgaacaacgaagggacccagcatatgagtggtcccaatgaactctctacacccagctcggatcaggatgcatttaacctctcaactaaactggaactcgagaaacaagttttcggttccagatccctgccccgcggcccggattcccaacggcaggacgggagggtgcacgctagccatcagctcacgcgagtgcccgcgaagccaattcttccaaccgcaaccgtgcgcctcccggagatgagcacacagtccgcttcacggtattttgttacctcccagtctccgcggcactggactaacaaaccagaaataacgacttacccaagcggggcgcttcccgagaataaacagtttaccaccccacggttgtcttccaccacaattcctctgcctctgcacatgtccaagccatccattccatccaaattcacagatcggcgaactgatcagttcaatggttattctaaagtgtttgggaataacaacatcccagaagcccgtaatccagtgggtaaacctccttcccctcggatcccacactattcaaacggcagactccccttttttaccaataaaactctgtcatttccgcagctgggcgtgacccgccggcctcagattcctacgtctccagctcctgtgatgagggaaagaaaagtgatacccggcagctataatcgaatccattcccattcaacctttcatttagactttggaccacccgcgcctcccctccttcacacccctcagaccacagggtctccctcaacaaacctccagaacatcccaatggtgtccagtacccagtcctccatttcttttatcacaagttccgtccagagctcaggttccttccaccagagctctagcaagttttttgctggcgggcctccagcgagcaagttttggtctctgggagagaagcctcaaattctaactaaatcaccccagaccgtgtccgtgactgctgagaccgacaccgtgtttccatgcgaggcaactggtaaaccaaagccttttgtcacgtggaccaaagtctccactggcgcattgatgactccaaataccagaatccagcgatttgaggtgctgaaaaacggaactctggtgattcgaaaagtgcaggtgcaggatcgcggccaatatatgtgtaccgccagcaacctgcacggcttagaccgcatggtcgttctgctatctgtcactgtgcagcagcctcagatcctggcctctcactaccaagatgtgactgtctatttgggggacaccatcgcaatggagtgcctggccaaaggaactccagcgccgcagatatcttggatctttcccgaccggagagtgtggcagactgtaagcccggtggaggggagaattactttgcatgagaaccggaccctgtccattaaggaggcatctttttcggacaggggcgtatacaaatgcgtcgcatctaacgcagccggagctgatagcttggctattaggttacacgtggctgctttacctcccgtgatccaccaggaaaaactggaaaatatctcgctccctcctggcctgtccatccatattcattgtacagccaaagctgcacccttgcccagcgtgagatgggtgctgggagacgggactcaaatccgcccatcccagtttctccacgggaatctgtttgtgttccctaatggaaccctgtatatccgaaacctggcccctaaagacagcggacggtacgaatgcgtggccgcgaatctggttggttcagctaggaggactgtccagctaaatgtccagcgcgcggccgcgaatgcgcgcataactggtactagcccacgtcgtactgatgtacgatacgggggcactctgaagctcgattgtagcgcctccggcgacccttggccacgaattttatggaggctcccctctaagaggatgatagacgccctgttttcttttgacagtaggattaaggttttcgctaatggcacgctcgtcgtgaagagcgtaacagacaaggacgccggcgactacctctgcgttgcgcggaataaggtaggcgatgactatgtggttctcaaggtggatgtggtcatgaaacccgccaaaattgaacacaaagaggaaaacgatcacaaagtgttctatggaggcgatcttaaagtggactgcgtggctaccggcctccctaatcccgagattagctggtcactgccagacggtagtttggtgaactcgtttatgcagagcgatgactcaggaggacgcaccaagagatatgtggtgttcaacaacggcactctgtatttcaacgaggtgggaatgcgggaggaaggcgactacacctgcttcgcggaaaatcaggtgggcaaggacgagatgcgcgtccgggtgaaggtggtcaccgctcccgccacaatccggaacaaaacttacctggccgttcaggtaccatacggcgatgtggtcaccgtcgcctgcgaggccaagggcgaacctatgccgaaagttacgtggctgtcccccacaaataaggtcattccaacttccagtgagaagtaccagatttaccaagacggtaccttgcttattcaaaaagctcagcgaagcgactctggaaactacacctgtctggtgcgaaactcggcaggcgaagacaggaaaactgtatggatccacgttaacgttcaaccacctaaaattaacgggaatcctaatccaatcaccacagtgagggagatcgccgccggcggctctagaaagctcatcgattgcaaagccgaagggatccccactcccagggtactgtgggcctttccggagggggtcgtcttgcccgccccctattatgggaatagaataaccgtgcatggaaatggatctctcgacattcgatcgctgaggaaatccgatagcgtgcagctggtgtgcatggctaggaacgagggcggggaggccagactgatactgcaactgactgttttggagccaatggagaaaccaatctttcatgatccgattagtgagaaaattacggctatggccgggcacacaatcagtctcaattgctctgctgctgggacgccaacaccctctttggtatgggtccttcccaatggcaccgatcttcagtcaggccagcagctccagcggttttaccacaaagctgatgggatgcttcacatcagcggactgagtagtgtagatgccggagcctataggtgtgtggcccgtaacgcagctggtcatactgaacggctggttagcctgaaagtgggtctgaaacccgaagccaataagcaatatcacaacctcgtcagtataataaacggggaaaccttgaaacttccttgcacaccaccgggcgcaggacaagggcggttcagctggaccctgccaaatggcatgcatctggaaggacctcagactctgggcagggtaagtttgctggataacggcactctaactgtcagggaggccagtgtctttgaccgcggcacatacgtgtgtagaatggagacggaatacggacccagtgtgacctcaatccccgtgattgtcatcgcctatccccctcgtattacaagcgaacccacgccagtaatctatacgcgtcctggcaataccgtgaagctgaattgcatggctatgggtatccccaaggccgatattacctgggaactgcccgacaaatcccacctgaaagccggcgtgcaggcccgcttgtacgggaacagatttctgcatccgcagggctcattgactatccagcatgccactcaacgggacgccgggttttataagtgcatggcgaagaacattctcggaagcgactcgaaaaccacatatattcatgtcttttag

SEQ ID NO: 186635 - RNA, 8487 nt, Artificial Sequence
  derived and/or modified sequence
augccuaagcgggcccauuggggagcauuauccguggugcugauacuucuuuggggucauccccggguagcucuggcuugcccccauccgugugccugcuacgugcccagcgaaguccacuguacuuuuagaucccuggccagcguccccgcagggauagcaaaacacguggagcgcaucaaccugggauuuaauucuauccaagccuuguccgaaacguccuuugcuggucucaccaaacuugaacuucuaaugauccacgggaaugagaucccuagcauuccagacggugcccucagggacuuauccucauuacaaguauucaaguuuucuuauaacaagcucagggucauuacugggcagacccugcagggccuuucaaaccuuaugagacuccauaucgaccauaacaagauugaauucauccacccgcaagcguuuaauggccugacuagucuuaggcugcuucaucucgaagggaaucuucuccaccagcuucacccgucaaccuuuucuaccuucacuuuccuggauuacuuccgccuuagcaccauccgacauuuauaccuggcggagaacauggugcgaacucugcccgcaagcaugcuccgcaacaugccacuguuagagaaucuguaucugcaggguaacccuuggacaugugacugcgagaugagaugguuccuugagugggaugccaagucccgcgguauucucaaauguaaaaaagacaaggcauacgagggugggcaacuuugcgccaugugcuuuaguccaaagaagcucuacaagcacgaaauccauaagcuaaaagacaugacaugucugaagccaagcaucgagucgccucuuaggcaaaauagaaguaggagcauagaggaggagcaggagcaggaggaagaugggggcagccaauugaucuuagaaaaauuccaauuaccucaguggagcaucucauuaaacaugacugaugaacacgggaacauggugaacuuggugugcgacauuaaaaaaccuauggauguuuacaagauucaccugaaccagacugauccucccgauaucgacaucaacgcaacgguagcgcuugacuucgaaugucccaugacaagagaaaacuacgagaaguuauggaagcucauagcuuauuacucagaagucccaguaaaacugcauagagaacugauguugagcaaggacccaagagugaguuaccaguacaggcaagacgccgacgaagaggcuuuauacuauacaggagugcgggcccagauccucgcagagccggagugggugaugcagccaagcauugacauacaacuaaaucgacggcaauccacagcuaagaaaguucuguuaagcuacuacacacaguacucccaaacaauuuccaccaaagauacaagacaggcuagaggccgcucuugggucaugauugaaccaagcggcgcgguccagcgagaccagacuguacuagagggcggcccaugucaacuguccuguaaugugaaagccucugagucccccagcaucuucugggugcugcccgacggcucuauuuuaaaagcccccauggacgaucccgacagcaaguuuucaauccuuucaucaggauggcuuaggaucaaguccauggaaccuucugauagcggccuguaccaaugcauagcccaggugcgagacgaaauggauaggaugguguaucgcguccuggugcagucuccaucuacucagccugccgagaaggacaccgugacuaucggaaaaaacccuggggagucaguaacccugccaugcaacgcgcuugccaucccagaggcccaucuguccuggaucuuaccgaacagacgaauuauaaacgaccuggccaacaccagucacguguacaugcuuccuaauggcacacucuccauacccaaaguccagguuagugauagcgguuacuaucgauguguggccguaaaccaacaaggggcagaccacuucaccguuggcauaacagugacuaaaaaagguagcggccugccuucuaaacgcggucggagaccuggagcaaaagcccuuagucgggugagagaagauaucgucgaggacgagggcggcuccggaaugggggacgaagaaaacacuuccaggagauuauugcacccuaaggaucaagagguguuucugaaaaccaaggacgacgcaaucaacggcgacaagaaagcuaaaaagggaagacggaagcuuaaguuguggaaacacucugaaaaggagccugaaacuaacguggcagaggggcgccgaguuuuugagucuagaaggcgcauaaauauggcuaauaagcagaucaaccccgagcgaugggccgacauccucgcuaagguacgcgggaaaaaccugcccaaaggcaccgaagucccuccucugaucaagaccacaagcccacccucccuuagucuugaagugacaccaccguuucccgccauuucgcccccauccgcuagcccuguccagacgguuacuuccgccgaggagagcagcgcugacgucccguuguugggggaagaggagcauguacugggaaccauuagcagugcuucuaugggacuugagcacaaucacaauggggugauucucgucgaacccgaggugaccagcacgccccuggaggaggugguggacgaccugucugagaaaaccgaagaaauuacuucaacugaaggugauuugaaagguaccgccgcuccaacacugaucagcgaacccuacgaaccuucgccuacacuccauacacuggacacuguauaugaaaagccaacacacgaagaaacugccacggaaggguggagcgccgcagaugucggcucuucucccgagccuaccaguuccgaauaugaaccaccauuagaugccgucucccuggcagaguccgaaccaaugcaauauuuugaccccgaucuugagacuaagagucagccagaugaggacaagaugaaggaagacacguucgcccauuuaacacccacucccacaaucugggugaacgacucgagcacuagccagcuauucgaggacucaacuaucggcgagccuggagucccugggcagagccaucugcaggggcugacggauaauauucaccucgugaaauccagccugucaacacaggauacccuccuuauuaaaaaagguaugaaggagaugucucagacacugcaggguggcaacaugcuggagggggacccuacccacucucgcucguccgagagcgaaggccaggagucaaagucaauuacacugcccgauagcacccuggguaucauguccucgaugucuccugugaagaaacccgcugagacuaccguuggaacccuucucgacaaagauacuaccacagcaacuacgacgccgagacagaagguggcuccauccagcacaaugaguacccaccccucccgccggagaccaaauggccguaggcgccuaagaccaaauaaauuuaggcaucgucauaagcagaccccaccuacaacuuuugccccaagcgagaccuuuaguacccaaccuacucaggcgccugacaucaaaaucagcagccagguugagucuagccucguaccaacagccuggguggacaacaccguuaacacuccaaaacagcucgaaauggagaaaaacgcggaacccacaucaaaggguacaccaagaaggaagcaugggaaaagaccaaacaagcaucgcuauacccccuccacagucaguucucgugcaucuggcuccaagccaucccccucgccugagaauaaacaccgcaacauagugacaccuagcucugaaacgauccuacugccacgaaccgugaguuuaaaaacugaaggucccuacgacucccuugacuauaugacuacaaccagaaagauuuauaguucuuauccuaaggugcaggagacacuacccgugacguacaagccuacuagugauggcaaggagaucaaagaugacguggcaaccaacguggauaagcacaagucugacauucuggugacgggugagaguauuacuaaugcuauuccgaccucgcggagccuugucaguacuaugggcgaauucaaggaagagucgucccccgugggcuuucccggaaccccuacauggaaucccucuagaacagcccagccuggccggcugcagaccgggauuccgguuaccacauccggugaaaaccucaccgauccuccccugcucaaggagcucgaggauguggacuuuacuagugaauuucuguccucccugacaguauccacuccuuuccaucaggaggaagccggcucuucgaccacccuuucaucuauuaaaguggaaguagccucuagccaggccgagaccacaacacuggaucaggaccaccuggagacaaccgucgccauucuucugagcgaaacccguccucagaaccauaccccaaccgccgccaggaugaaggaacccgccucuaguucuccguccacaauacucaugucacugggucagaccacgaccaccaaacccgcacugccaucaccuaggauaagccaggcaucucgcgauagcaaagagaaugucuucuugaauuacguggggaaucccgagacugaggcuacacccguaaacaacgagggcacucagcacaugucaggcccuaaugagcucucuacuccuucaagcgaccaagacgccuucaaucugagcacaaaguuggagcuugagaaacaggucuuuggguccagaagccucccccgcggcccagacucucagcggcaggacggucgagugcaugcaagucaucagcucacccgggugccugcuaaaccuauccugcccaccgccaccgugcgcuuaccggaaaugagcacucagagcgcuucacgguauuucgugacuucccagucaccccgccauuggacgaauaagcccgaaauuacaaccuaccccucuggagcccuucccgagaauaagcaguuuacuaccccccgucugucuucuacaacaaucccucucccacuucacaugagcaagcccagcaucccgucuaaguuuacagaucggagaacggaucaauuuaacggcuacucaaagguguucgguaacaacaacauacccgaggccagaaacccagugggaaaaccucccaguccucggaucccacacuacagcaaugggagacugccuuucuucacgaauaagacauugaguuuuccucagcucggagucacccgacgcccacagauucccaccagcccagccccaguaaugcgugaacggaaggucaucccaggaagcuacaacaggauccacucgcacagcaccuuccaccucgacuuuggcccaccagccccaccauuacugcauacaccccaaacuacagguucuccaagcacuaaucuccagaacauaccuaugguuucuucuacgcaaaguucuauuucuuuuauaacaucuuccgugcaguccucaggaucguuccaucagucuuccaguaaguuuuucgcgggaggccccccagccuccaaguucuggucucuuggugagaaaccacaaauacucacuaaaucaccacagacaguuucuguuaccgccgaaacugacacuguuuuucccugcgaagcaacugggaagccaaagccuuucgucaccuggacgaaggucucuaccggugcucuuaugacaccuaauaccaggauucagcgguucgagguuuugaagaaugguacacuugugauaaggaaggugcaggugcaagaccgcgggcaguacaugugcacggccucaaauuugcacggucuggaccggauggucguccugcuguccguaacagugcagcagccacagauccuggccucucauuaucaggacgucacagucuaucuuggugacacgauugccauggaaugcuuggcuaagggaacaccagcaccucaaaucaguuggauuuucccggauagaagaguguggcagacgguaagcccugucgaaggacgaaucaccuuacaugagaaccgcacacuaaguaucaaggaagcgucauuuagugaccgcggcguuuauaaguguguugccagcaaugccgcuggagccgauagucuugcgauacgucugcauguagcggcuuugcccccugucauacaucaggagaaacuggagaacauuagucugccgcccggucucuccauacauauccauugcaccgcuaaggccgccccccucccuagcgucaggugggugcucggggauggcacacagaucagacccagccaguuccuacacggcaaucuguucguguucccaaacggcacacuguacaucagaaaccuagccccaaaggauucgggccgcuaugaguguguggcugccaauuuggucgggucugcgagacgcaccguucagcugaacgugcaacgggcggcugcgaaugcacggauuacugguaccagcccccggagaacugacgugcgguauggcggaaccuugaaacuggauugcucggccucaggagacccuuggccacggauccuguggagacucccuucuaagcggaugauagaugcccuguuuucauuugacuccaggaucaaaguguucgcuaacggcacucuuguggugaagucugugacagacaaggacgccggggacuaccugugugucgcacgaaacaaggugggagacgauuacgucguacucaaaguggaugucguuaugaaacccgcuaagaucgagcauaaagaggagaacgaccacaaggucuuuuacggcggggaucugaaaguugauugcguugcuaccgggcugccgaacccagaaauuucuuggucacuaccagauggaucucuggugaauuccuucaugcaaagcgaugacagugguggucgcaccaaacguuacgucguuuuuaacaacgggacccuauacuucaacgaagugggaaugcgagaggagggggacuauacauguuuugccgaaaaucaagugggcaaagacgaaaugagaguucgcgugaaaguugugacagcucccgcaacuauccggaacaagaccuaucuagccguccaggugccuuacggagaugucguuacagucgcaugugaggccaagggcgaaccuaugccaaaggugacuuggcucucgccgacgaacaaggugaucccaaccagcagugagaaauaucagaucuaccaagacggcacacugcugauccagaaagcccagcgcuccgacucugggaacuacaccugccugguccggaauagugcgggcgaagacagaaaaacggucuggauucaugugaacgugcagcccccgaaaauuaacggcaaccccaacccuauuacaacagugagagagauugccgcgggugggucucguaaacugauugacuguaaggcugaaggaauuccuacaccccgaguuuugugggccuucccggaagguguaguguugcccgccccuuacuauggcaaucggaucaccgugcauggcaacgguucacuugacauaagaagucugaggaagagugacucagugcaacuggugugcauggcuagaaaugaaggaggagaggcacguuugauccugcagcugaccgugcuugaaccuauggagaagccaauauuccacgacccaauuagcgagaagauuacagcaauggccgggcacacgauuagucucaauuguuccgccgccgguacgccaacaccuagucuuguauggguacucccuaacgggacagaccuacagucuggucaacagcuacagcgcuuuuaccauaaggccgaugggaugcuucauaucaguggccuaucauccgucgaugcaggagcuuaucggugcgucgcucgcaaugcugcaggacauaccgaacggcugguuagcuugaagguuggacuuaaaccagaagcaaacaaacaguaucauaaccuggugaguauuauuaacggcgaaacauuaaaacugccaugcacgccaccaggcgcaggacagggcagguuuucuuggacgcucccgaacgggaugcaccuggaaggaccgcagacacucggccgcgugagccugcucgacaacgguacccucacagugagagaagcaucuguguuugauagagggacauacguauguagaauggagaccgaguacggcccaucagugacauccauacccguuauugugauugcuuacccaccuagaauuacauccgaacccacaccaguuauuuacacgcggccaggcaacacagugaaacugaacuguauggccauggggauccccaaggcugauaucacgugggagcugcccgacaagucgcauuuaaaggcgggcguucaggcucgguuguaugggaaucgauuucuucacccucaaggaagccugaccauccagcaugcaacacagagggaugccggcuucuacaaguguauggccaaaaauauucuggggucugacucuaaaaccacuuauauucacguuuuuuag

SEQ ID NO: 186636 - RNA, 8487 nt, Artificial Sequence
  derived and/or modified sequence
augcccaaaagggcccauuggggugcucugagcgucgugcucauuuugcugugggggcacccccgcguggcccuggcuugcccucauccuugcgccugcuacguucccucugaagugcacugcacauuuagaucauuagccucgguaccugccggaaucgccaaacacgucgagcgcaucaacuuaggcuucaacuccauccaagcauuauccgagacauccuuugcaggccugacaaaacucgagcuuuuaaugauacauggaaacgaaauuccuucuauucccgacggugcccucagagaccuuuccucucuucaaguuuuuaaguucucuuacaacaaacugcgcgucaucaccggccaaacuuuacagggacuaagcaaucucaugcggcugcauaucgaccacaacaaaaucgaguuuauucauccucaggcguuuaacgggcugacaucacugcgccuccugcacuuagaggguaaucuccuucaucagcuacaucccucgacuuuuaguaccuucacguuucuagauuacuuuaggcuuucuaccaucagacauuuguaucuagccgagaacaugguucgaacacugccagcaucaaugcucagaaauaugccgcugcuggaaaaccucuaccugcaaggaaacccguggacgugcgacugugagaugaggugguuucucgaaugggacgccaaaucccgcggcauucugaaaugcaagaaagauaaagcuuaugaagggggacagcuaugcgcaaugugcuucucccccaagaaacuauauaaacaugaaauccacaaauugaaagauaugacgugucugaaacccucuauugaauccccgcugcgccaaaaccguucuaggucuauagaagaggaacaggaacaagaagaagacggcggcucacaacuaauccuggaaaaauuccaacuuccccaauggagcaucucccugaacaugacugaugagcacggaaauaugguuaaucucgucugcgauaucaagaagcccauggacguguauaaaauacaccugaaccagacggauccucccgauaucgacaucaaugccacaguggcccuugacuuugagugcccaaugacccgagaaaauuacgaaaagcucuggaaacuuaucgcguacuacucagaagugccugugaaacuacaccgagaacugaugcuaaguaaagacccaagagugaguuaccaguacaggcaagacgccgacgaagaggcuuuauacuauacaggagugcgggcccagauccucgcagagccggagugggugaugcagccaagcauugacauacaacuaaaucgacggcaauccacagcuaagaaaguucuguuaagcuacuacacacaguacucccaaacaauuuccaccaaagauacaagacaggcuagaggccgcucuugggucaugauugaaccaagcggcgcgguccagcgagaccagacuguacuagagggcggcccaugucaacuguccuguaacguaaaagcaagcgagucuccuuccauuuucuggguccuaccugacgggucaauucuuaaagcgccaauggaugauccagauucaaaguuuucaauucuauccuccggguggcuacgaaucaaaucaauggaacccucggacucaggauuguaucagugcaucgcacaggugcgggacgaaauggacagaaugguuuaucgggucuuggugcagagcccuucuacucagccagcugagaaggacacagugacaauugguaaaaauccuggagagagcgucacccugcccuguaacgcucuugcuauccccgaggcccaucuuagcuggauuuugcccaacagacggauuauaaaugaucucgcaaacaccucccauguguacaugcugccaaauggaacucuaagcauccccaaagugcaagucagcgauaguggauacuauagaugugucgccguaaaccagcagggcgcagaccauuucaccguggguaucacagucacaaaaaaaggcucuggccugcccucaaagcgcggccgccgucccggagcaaaggcucucagucggguccgagaagacaucguugaagaugaagggggcagcggcaugggggaugaggaaaacaccucaaggaggcuccugcacccaaaggaccaggaaguguuucugaagacuaaagaugacgcaauuaauggagauaagaaggcaaaaaaggggagaaggaagcugaaguuauggaaacauuccgaaaaggagcccgaaacuaacguggccgagggaaggcggguguuugaauccaggcguagaauaaacauggcaaauaaacaaaucaacccggagaggugggcugauaucuuagccaagguucguggaaaaaaccucccuaaaggaacagaagugcccccucugaucaagaccacuucucccccuagccugucccuugaaguuacuccucccuuucccgccauaucaccgccuucagccagccccguacaaacaguuaccagugcggaggagagcucugcagaugugccccuguuaggagaagaggagcauguccucggcaccauuucuagcgcuucuaugggcuuagaacacaaccacaauggcgucaucuuagucgagccggaagucaccucaaccccuuuggaagaggucguggacgaucugucugagaagaccgaggaaauuaccucuaccgaaggagaccucaaaggaacggcagcuccaacacuaaucagcgaacccuacgaacccagccccacucugcacacccuggacaccguguacgaaaagccaacucacgaagaaaccgccaccgaaggcugguccgcugcugacguuggcagcucccccgaacccaccucuucugaauaugaacccccuuuggaugcuguuucuuuagccgaaucugagcccaugcaguacuuugacccugaccuagagacaaagagccaaccagacgaggacaaaaugaaggaagauaccuuugcucaccugacccccaccccuaccauuuggguaaacgauaguagcacaucucaacuauucgaagauuccacaauuggugaaccuggaguccccggccagucucacuuacaggggcugacggacaacauucaccuugucaagaguagucucagcacacaggacacccuucuaauaaaaaaaggaaugaaggaaaugagccagaccuuacagggcggcaauaugcuggaaggcgauccaacacacagucgcagcucagaaucagagggacaagaaucaaaaucaauuaccuuacccgacaguacauuggggaucaugagcagcaugagucccguuaagaagcccgccgagacuacuguggggacccuccuggauaaagauacaacaacagcuacuacaaccccccgccaaaaggucgcaccuaguuccaccaugucaacacacccaucacgaagacgaccgaacggccgccgacgccucaggccaaacaaauucagacaucggcacaagcagaccccucccacgacuuucgcccccucugagaccuucuccacccaaccgacacaggcaccagauaucaagaucucaucucaggucgaaucaucgcuaguucccacugcauggguugauaauaccgugaauaccccuaagcagcucgaaauggagaagaaugcugagcccaccuccaaaggcacgccccgccgaaaacauggcaaaagaccuaacaagcacagauacacgccauccaccgucucuucaagagcaucaggaucaaagccaucaccuagcccagaaaacaagcaucgaaacauugucacaccgagcucagaaaccauccugcugccccguaccgucuccuugaagacagaagguccauacgacagucuggacuauaugaccaccaccaggaaaaucuauucaucuuacccaaaaguacaagaaacccugccagugacuuacaagcccaccuccgacgggaaagagaucaaagacgauguagcuacaaauguggauaagcauaagagcgauauucuggucacgggcgagucgauuacaaacgcuauuccaacaucccggagucuugugucaacaaugggagaauucaaagaggaaaguucgcccgucgguuuccccggaacuccaacuuggaaccccucucggaccgcacaaccaggccgguugcagacagguauucccguuaccacaagcggcgagaaccuaacugacccuccgcuacugaaggaacuugaggaugucgacuuuacgagcgaguuucucucaucucuaacggugagcacuccauuccaccaagaggaggccggcucuucuaccacucugagcuccauuaaaguggaaguggcuucuucacaagcugagacuacaacucuugaccaggaucacuuagagacaacuguagcaauucuacuaagcgagacacggccccagaaucacaccccaacagccgcccggaugaaagagcccgcaaguucaagccccaguaccaucuugaugucccucggacagacaacuacaacaaagccagcccucccuucuccucgcauuucgcaggccuccagggacagcaaagagaauguuuuccucaacuauguuggaaauccagaaacagaggcaacgccagucaacaacgaaggcacgcagcacaugagcgggccaaacgaauuaagcacacccagcucugaccaagacgcuuuuaaccugaguacaaaacuggaacucgagaaacaaguuuucggcagccgaucuuugccacggggccccgauucccagcgccaggauggccgagugcaugccucccaccaacuuacgagggugccugcgaaaccuauucugccaacugccacugucagacucccagaaauguccacucaguccgcuucucgcuacuucgugacgucacaaucuccccgccauuggacaaacaaaccagagauuacaacauauccuaguggggcacucccugagaacaagcaguucaccacaccucgccuuucaucuacuacuauaccccugccgcuccauaugucaaaacccuccauuccaucuaaauucaccgaccguagaacugaucaguucaacggcuacucaaagguauucgguaauaauaacauuccugaagcaagaaaccccgugggaaaaccacccagcccccguaucccucauuauuccaauggucggcuucccuucuucacaaauaaaacacugagcuucccacaguugggagucacaagacgcccacaaauuccuaccaguccugcucccguuaugagagagagaaaaguaauuccaggcuccuauaacagaauacauucgcauucaaccuuucaucuugauuuuggcccucccgccccuccccuccugcacacaccacagaccaccgggagccccucaacaaaccuucagaacauccccauggucuccuccacacaaucauccauuucuuucaucacuaguucaguccaguccagcggcuccuuucaucaguccaguuccaaguuuuucgccggggguccccccgcuagcaaguucuggucucugggagaaaaaccucaaauacugaccaaauccccccagacagucagcguuacggcagaaaccgacaccgucuuucccugcgaggccacgggaaaaccuaaacccuucguuacauggacaaaaguuucuacgggggcucucaugaccccuaacacuagaauccaaagauucgaaguacugaaaaaugggacccucguuauccgcaaaguccagguucaagaucgcgggcaguauauguguacggcgucaaauuuacauggucucgaucgcauggucguacugcugagcguaacugugcagcagccacagauucuggccucucacuaccaggauguuaccgucuauuuaggcgacacaauagcuauggagugcuuagcuaaagguaccccagccccucagauuaguuggauauuccccgaucgaagaguuuggcagacuguuuccccuguagaaggaagaauuacccugcacgaaaaccgcacccucucuauaaaagaagccagcuucucagaccggggcgucuauaaguguguugccucuaaugcagcaggugccgacucccuugccauuagauugcacguggcggcccucccacccgucauccaccaagagaaauuggagaacauuucucugccuccuggccuguccauucacauacacugcaccgcaaaggccgcaccgcugccuuccguucgauggguauugggggauggaacucaaauuagaccaucacaguuuuuacaugggaaucuguuuguauuucccaacggcacccuauauauacgcaaucuugcucccaaggacucagguagauaugaguguguugccgcuaaccuaguggguucugcccggaggaccguccaacucaacguccagcgugcagcugcuaacgcgcgaauuaccggcacgaguccacgacgaacagaugugcguuauggugguacucugaaacuugacugcagcgccagcggggauccuuggccacgaauacuuuggcgucuucccagcaagaggaugaucgaugcucucuucucguucgauucgaggauuaagguguucgcgaacgggacucucguuguuaaaagcguuaccgauaaggacgcuggcgauuaccuuuguguagcaagaaacaagguaggagaugacuauguggugcugaagguugacgugguuaugaagccggccaaaauugagcauaaagaggagaacgaucacaaaguauucuauggcggggaccucaaaguggauugcguagcaacaggccugccgaacccagaaaucucuuggagcuugccggauggaaguuuggucaacuccuuuaugcagucugaugauagcggaggcagaacgaaacgcuauguggucuucaauaauggaacacuguacuuuaacgaagugggcaugagagaggagggggauuacaccugcuuugcagagaaccagguuggaaaggacgagaugaggguuagggugaagguuguuacagcuccugcuacgauuagaaauaagacauaucuugcgguccaagugcccuauggggacgucgucaccguagcuugugaggcaaaaggcgagccuaugcccaaggugaccuggcugagccccacuaacaaagugaucccuacaucaagcgaaaaauaccagaucuaucaggauggaacccucuuaauucagaaggcccaaagaucugacucuggaaauuauacuugucugguucggaacuccgccggugaggaucgcaaaaccguuuggauccacguuaauguccagccacccaagauuaauggcaaccccaacccuaucaccaccgugcgagaaauagcugcuggggggucuagaaagcucaucgauugcaaagccgaaggcauucccacaccacgcguccucugggcauuccccgagggaguugugcuucccgcaccuuacuacggaaacaggaucacaguacaugggaauggcucacucgacauuaggucucuucgaaaauccgacagcgugcaguuaguuuguauggcacgcaaugaagguggugaagcgcgcuugauucugcagcucacaguguuagagccgauggagaaaccuauauuucacgaccccauuagcgagaagauuacagcuauggccggucacacuauuucuuuaaauuguucagccgcgggcacuccaacacccuccuuggucuggguacucccaaauggaaccgaucuacaaucuggacagcaguugcagagguucuaucauaaagcagacgggaugcuccauauuaguggucuaagcaguguggaugcuggggcauacaggugcguagcccggaacgcagcaggacacacagaaaggcugguuagccugaaagucggccugaaacccgaagccaauaagcaguaccacaaucucgugaguaucaucaacggugaaacacugaaauugcccuguacaccccccggcgccggccaagggagguucaguuggacacuacccaaugggaugcaucucgaggggccacagacucugggacgaguuucccuccuggacaauggcacacucacugugcgcgaagccuccgucuuugauagaggcacuuauguaugcaggauggagaccgaauacggaccuucugucaccucuauuccugugauagugauagccuauccaccaaggauaacaucugaaccgacgccugugaucuauacuagacccggcaauaccgugaaacuuaacuguauggccauggguauuccaaaagccgauauuaccugggaacugccugacaaaagccaucuuaaagccggaguacaagccagacucuacgggaaccgguuucugcacccucaaggaucucuaacuauacagcacgccacccaaagagacgccgguuuuuacaaauguauggcaaagaacauccugggcagcgauucuaaaacaacuuacauacacguuuuuuag

SEQ ID NO: 186637 - RNA, 8487 nt, Artificial Sequence
  derived and/or modified sequence
augccaaagagggcucacuggggagcgcugagcguuguacuuauccuacuguggggucacccucguguugcucuggcauguccccauccgugugcuugcuacguuccuagcgaagugcacuguacuuuccgaucgcucgcuucagucccugccggaauagcuaagcacgucgaacggauuaaccugggcuucaacuccauacaagcucuguccgaaacaucguucgcugggcucacaaagcuggagcuacuuaugauucacggaaaugagauccccucgaucccugacggcgcccugcgcgaccugucgagucuucaaguuuucaaauucuccuauaacaaacugagggucauuacgggucaaacacuucaggggcucucuaacuuaaugcgguugcacaucgaccacaacaagaucgaauucauucauccccaagcguucaacggucuuaccagucucagacuucuccaccuagaagggaauuugcugcaccaguugcauccguccacuuuuucuacauucaccuuuuuggacuauuuuaggcuauccacaauccgccaucuguaccuggcagagaauaugguuagaacacucccggcaucuaugcugcguaacaugccacuucuggaaaaucucuacuugcaggguaacccauggaccugcgacugugaaaugaggugguuccuugagugggaugcaaagucuagggggauucuaaaguguaagaaagacaaagcguaugagggaggccagcugugcgcaaugugcuucucuccaaagaaacuguauaagcacgagauacauaagcucaaggauaugaccugccucaaacccaguaucgaaucuccgcugcgacagaaucggucaaggaguaucgaggaagaacaggaacaggaggaggacggcggaucccaguuaauccuugaaaaguuccaacucccgcaguggagcauuagccucaauaugaccgaugaacacggcaacauggugaauuuagucugcgacaucaagaagccuauggacguuuacaagauccaccucaaucagaccgacccacccgauaucgacauuaacgccacuguggcccuagacuucgaguguccaaugacccgagaaaacuacgagaagcuuuggaaauugaucgccuacuacuccgaggugccugucaagcugcaccgcgaacugauguugucaaaagauccacgggugucauaucaguaucgacaggacgcugaugaagaggcccuguacuauacaggcgucagggcgcagauccuggccgaacccgaaugggugaugcagcccaguaucgacauccagcucaaucgucggcagagcaccgccaaaaaaguucuccugagcuacuauacccaauauucacagacuauaucaacuaaggacacacgccaggccaggggucgaucuugggugaugaucgaaccuucuggcgcgguccagagggaucagacugugcucgaggggggaccuugccaacucagcuguaacguuaaggccucagaauccccaaguauuuucuggguucugccugacggcuccauccuuaaggccccuauggaugacccagauucuaaauucucaauucuuuccucaggguggcugcggaucaaguccauggagccuuccgacaguggauuauaucaguguaucgcccagguacgcgaugaaauggaccgaaugguguaccggguacuggugcaaucacccucaacgcaaccagccgaaaaggacacagucacuauaggaaagaauccaggcgaaagcgucacucugccaugcaacgcacuggcgaucccagaagcccaccucaguuggauccuacccaaccgaagaauuauuaaugauuuggcuaacacgucucacguguacaugcuaccgaaugguacucugagcauccccaaggugcaggucagcgacucagguuauuacaggugugucgccgucaaucaacagggugccgaccauuuuacuguggguaucaccguaaccaagaaaggaucuggccuaccuagcaaaaggggcaggaggccaggugcaaaggcauugagccgagugcgggaggacaucguggaggaugagggcggaagcggaaugggugaugaagaaaauacaucacgcaggcucuugcacccuaaagaccaggaggucuuccugaagacaaaggacgacgccaucaauggcgauaagaaggcgaagaagggaaggagaaaacugaagcucuggaagcacucugaaaaagagcccgagacgaaugucgcagaagguaggcgcguguuugagucucggcgcaggaucaauauggcuaauaagcagaucaauccagaacguugggccgauauccucgccaaggucagggggaagaaccugccuaaggggaccgaaguuccaccccuuaucaagaccacuucgccgccaucacuuucucucgaagucaccccuccuuuuccagcgauuucuccgccauccgccucccccgugcagacagugaccagugccgaggagucaucggcagaugugccccugcugggugaggaggaacacguucuggggacgaucaguucagcuagcaugggccuagaacacaaccauaauggugugauucucguggagcccgaagucacuagcaccccacuugaggaaguuguagacgaccucagugagaaaacagaggagauaacaucgacagagggggaccugaagggaaccgccgcaccgacccucaucagugaacccuacgaaccaagccccaccuugcacacacuggauacugucuacgaaaagccuacgcaugaggaaaccgccacagaggguuggagcgccgccgaugucgggucuagcccugagccuacaucaucugaguaugagccgccccucgaugcagugucuuuagcugagucugagccuaugcaauauuuugacccggauuuagagacuaaaucccagcccgacgaggauaagaugaaagaagauaccuucgcacaucugacuccgaccccaaccauaugggugaacgacucuagcaccucucagcuguucgaggacuccacuaucggagagccuggcgugccuggucaaucacaccuccagggucuuaccgacaacauccacuuggucaaaucaucacugucaacacaggacacacuuuugauuaaaaaagguaugaaagaaaugagucagacguugcaggggggaaacaugcuggaaggcgaccccacucauucucgcagcucugagucggaaggucaggaguccaagucgauuacucuuccugacagcacacuggguaucaugaguucuaugagcccugugaagaagccagccgagacaacaguugguaccuuauuggauaaggauaccacuaccgccacaacaacaccucgccagaagguggccccaucaagcaccaugucuacacauccuucuaggaggagaccuaacggucggaggcggcugcgcccgaacaaauuuaggcaccggcacaagcaaacaccaccaaccacuuuugcuccgucugagacauuuaguacgcagcccacucaagcuccugacaucaagaucuccucgcagguggaaagcucccuaguuccaacagccuggguggacaauacaguaaacacgcccaagcagcuggagauggagaaaaaugcggagccuacgucuaagggcaccccaaggcgaaaacaugguaagcgccccaacaagcauagguacaccccuucaacagugucgagccgcgcauccgguuccaaaccgucaccgagcccagaaaacaagcauagaaauauugucacaccaucaagcgagaccauccugcugccacgaacugugagccucaagaccgaaggaccuuaugauucuuuagacuauaugacuacaacucggaagaucuacaguuccuauccuaagguccaggaaacacuuccugugaccuacaagccuaccucugaugguaaagaaauuaaagaugauguagcuaccaacgucgauaaacacaagucagauauccuggugacuggcgaauccauaacaaaugccaucccuaccucacgcaguuugguuucgacaaugggcgaguuuaaagaggaguccucaccagugggguucccaggcacccccacauggaacccuucacgaaccgcucagccuggucgccuccagacaggcaucccagugacuaccucgggggagaaccucacugacccuccccuacugaaggagcuggaggauguugacuuuacuucugaauuucuuucuagccugacaguuucuacaccguuccaccaggaggaagcuggcucaucaaccacacuuaguucaaucaaggucgaggucgcuucaucacaggccgagacaacgacccuggaucaggaucaccuggaaacaaccguugccauucugcuuuccgagacacguccacagaaccacacuccuaccgcugcucgcaugaaggaaccggccagcaguuccccuucaaccauacugaugagccugggucagaccaccaccacuaaacccgcacuccccagcccuagaaucucacaggcaagucgcgacucuaaagaaaauguuuuccucaacuaugugggaaauccagaaacggaggcaacacccgugaacaaugaaggaacgcagcauaugucgggacccaaugagcucucaacaccuucaucagaccaggacgcauucaacuuaucuacuaaguuagaacuggagaaacagguguuugggucaagaagcuugccuagagguccugacucucaacgacaagacggacgggugcaugcuagccaccagcugacacgcguuccagcuaaaccaauccuuccuacagcuaccguucgguugccugaaauguccacccagucggccagucgguauuucguaaccucacagagccccaggcacuggaccaacaagccugaaaucacuaccuaucccagcggcgcucugcccgaaaacaaacaguuuacuacgccccgccugaguaguaccacaauuccacuuccccugcacaugaguaaaccauccaucccgaguaaauucaccgaccggcggaccgaucaauuuaacggcuacucgaaaguuuucgguaauaacaacaucccagaggcacggaauccaguuggcaagccgccaucuccucgaaucccacacuauucaaaugguagacuucccuuuuucacuaacaagacccucaguuucccacaacuggguguaacgcggaggccucagauaccuacuaguccugcgccuguuaugagagagagaaaaguaauuccaggcagcuacaaucguauucacagucacuccaccuuucacuuagacuucggacccccggccccuccucugcuucauacaccucaaacaacaggguccccauccacuaaucuucagaacauuccgauggugaguuccacccaaucuucuauauccuucaucacuaguuccguccagagcagcggcucuuuccaccaaagcucuaguaaauuuuuugcugguggaccgccagcuaguaaauuuuggucccuuggagaaaaaccacagauccuuacaaagucuccacagacuguguccguaacugccgaaaccgacaccguguuccccugugaagcuaccgggaaacccaaaccauucguaaccuggacaaaggucagcacuggcgcacugaugacacccaauacgagaauacaacgcuuugagguucugaagaaugguacacuagugauuaggaaaguacaaguccaagauaggggccaguauaugugcacugcguccaaucugcacggccuggauaggaugguggugcuacucagcgugacuguucagcagccccaaauacuggcaucccauuaccaggaugucaccguguaucugggcgauaccauagccauggagugccuggcaaaaggcacccccgcgccucaaaucagcuggaucuuuccagaccggcggguguggcaaacuguguccccuguagagggucguauuacuuugcaugagaaccgcacacucucuaucaaagaggcaucguucagcgaucggggcguguacaaaugcguugcuuccaacgccgcuggagccgauucacuggcaaucagacugcauguggccgcccugccaccugucauucaccaggaaaagcuggagaacaucucauuaccaccuggccugagcauacacauacacugcacagcaaaggcugcgccgcugccuagcguucgauggguauugggcgaugggacacagauacggccaucucaguuccugcacggcaaucuguuugucuuuccuaacgggacccuguacauucgcaaucucgcuccuaaagacucuggacgcuaugaauguguggcggcuaaucuggucggcuccgcccggaggaccguacaauugaauguucagagagccgcugccaacgcgcgcaucacaggcaccagcccacgcaggacagaugugagguauggagguacccuuaaacuugauugcucagccuccggggauccuuggccucgaauucucuggcgcuugccaaguaagcgcaugauagaugcccuguuuuccuucgacucgcggaucaaaguguuugccaauggaacucuggucgucaagucaguaacagauaaagacgccggggauuaccucugcguggcccgaaacaagguuggggacgauuacgucgugcugaagguggaugucgugaugaaaccugcgaaaaucgagcacaaagaggagaacgaucauaaaguguuuuauggaggugaucucaaaguugauugugucgcuaccggucuaccaaacccggaaauaagcuggucacugccggacggaucccucgucaacagcuucaugcagagugacgacucaggagguagaaccaagcguuacgucguuuuuaacaaugguacccuauacuuuaacgagguggguaugagggaggagggcgauuacacaugcuucgccgagaaucaggucggaaaggacgaaaugcgagucagagugaaaguggugacugcuccagcaacuauucgaaauaagacauaucucgcuguucaggugccuuauggugauguggugacuguggccugcgaggcuaagggagaacccaugccaaaagugacuuggcugucaccaacaaacaaaguuauuccuacaaguagugaaaaguaccagauuuaccaggauggaacgcuccugauccagaaagcccagcggagcgacucagguaauuauacaugccuggugaggaauucugcuggggaggauagaaagacggucuggauacacgugaaugugcagccaccuaaaauaaacggcaaccccaacccuaucacuaccguucgcgagauugccgccggcgggucacgcaagcucauugacuguaaggcggagggcaucccaacaccccgcguacugugggcauucccagagggcgucguacucccugccccauacuaugggaauagaaucacuguucacggcaauggaagccuggauauucgcagccuaagaaagagcgacucuguucaguuggugugcauggcaaggaaugagggcggugaggcgaggcugauccuucaguugaccgugcucgagccgauggaaaaaccaaucuuccacgauccuaucuccgaaaagaucacagcuauggccggacauacuauuuccuugaacuguagcgccgccgguacaccgacaccuucccuugucuggguccuaccuaauggaaccgaucuccagucagggcaacaguugcagagguucuaucauaaagcagacgguaugcuccacaucaguggacugagcucuguggacgcuggggccuacagauguguugcccgcaacgcagccggccauacggagagauugguaaguuuaaaggugggacugaagccugaagcaaauaagcaauaccauaauuuggucucgauuauuaauggcgaaacuuugaagcugcccuguacuccccccggagcagggcaggggcgcuuuucguggacucuucccaacgguaugcacuuagaggguccacagacuuuagggcgugugucgcugcuggauaacggcacacugacagucagagaagcaucaguguucgaccgggguacuuacgucugcagaauggaaacggaguacggacccucuguuacuagcauuccagugaucguaaucgcuuacccuccacguaucacuucugagcccacucccguuauauacacuaggcccggaaacaccguuaagcuuaauugcauggccauggggaucccgaaggccgauauuacaugggaguuaccagauaaaucucaucuuaaagcuggcguacaggcucgacuuuacgggaaucgguuuuugcacccucagggcagccuaacaauccagcacgccacacagagagacgcaggguucuauaaaugcauggcaaagaacauuuuaggguccgacagcaaaaccacuuacauccacguauucuag

SEQ ID NO: 186638 - RNA, 8487 nt, Artificial Sequence
  derived and/or modified sequence
augccaaagagggcucacuggggagcgcugagcguuguacuuauccuacuguggggucacccucguguugcucuggcauguccccauccgugugcuugcuacguuccuagcgaagugcacuguacuuuccgaucgcucgcuucagucccugccggaauagcuaagcacgucgaacggauuaaccugggcuucaacuccauacaagcucuguccgaaacaucguucgcugggcucacaaagcuggagcuacuuaugauucacggaaaugagauccccucgaucccugacggcgcccugcgcgauuuaucuagucugcaaguuuucaaauuuuccuauaacaaacuuagagugaucacaggacagacguuacaaggccucuccaauuugaugaggcuucacaucgaccacaauaaaauagaauuuauccacccucaagcuuuuaacggccucacaagccucaggcuccuccaucuggaagggaaccucuugcaucaacuccacccuaguacuuucagcacauucaccuucuuagauuauuuucgccucuccacaauucgccaccuguaucuggcggaaaacaugguacguacccugcccgcuucuauguugaggaauaugcccuuguuagaaaaccuauaccuucaaggaaaucccuggacaugcgacugugaaaugagaugguuccucgaaugggacgccaagucuagaggcauucucaaaugcaagaaggauaaggccuacgagggaggacagcugugcgccaugugcuuuuccccuaagaaauuauauaaacacgaaauccauaagcucaaagacaugacgugcuuaaagccaucuauagaaagcccacuccgccagaauagguccaggagcauugaagaggagcaggaacaggaagaggacggaggcagucaacugauuuuagagaaguuccaguugccucaguggucuauuagcuuaaacaugacugacgaacaugggaauaugguaaaccuagugugugauaucaagaagcccauggauguauacaaaauccaccuuaaccagaccgacccuccagauauagacaucaaugccaccguggcccuugacuucgaaugccccaugacgcgcgagaacuacgaaaagcuuuggaaauuaauagccuauuauucggagguacccguuaagcugcaccgcgagcuaauguugagcaaagacccucgcgucucuuaccaguaccgccaggacgccgacgaggaagcucuuuauuacacaggcgugagggcccaaaucuuggccgaaccugagugggugaugcagccuaguauugacauucagcuaaaucgcagacaaaguacagccaaaaaagugcucuuauccuacuacacucaauauucacagacuaucuccaccaaagacacaaggcaagcgcgugguaggucaugggugaugauugaaccaucaggcgccgugcagagggaucagacuguucuggagggaggcccaugccagcugucuuguaaugugaaagccuccgaaagccccuccauuuuuuggguucucccagacggaucaaucuugaaagcuccaauggaugacccugauagcaaguuuuccauauugucaucuggcuggcugagaaucaagucuauggagcccuccgauucuggacuguaccagugcauugcacaggucagagaugagauggauaggaugguuuacagaguccuggugcaaucuccauccacgcagcccgcagaaaaagauacaguuacgaucgggaagaacccaggugaaucuguuacccugccauguaacgcacuggcuauccccgaagcccaucuuucuuggauucugccaaaucggagaaucauaaacgaccuagccaauacuagucacguguauaugcuucccaauggaacauuauccauuccuaaaguucagguuucagauagcggguacuacagaugcguggcggugaaccagcagggcgccgaccacuucacaguuggaauuacagugacaaagaaaggcucgggguuaccaucaaaaagagggcggcggccgggugcuaaggcucuaucaagagugagggaggauaucguggaggaugagggggguagcggaaugggggaugaggagaauacaagccggagacuucugcaucccaaggaccaggagguguuucugaaaaccaaagacgaugcgaucaauggggauaaaaaagcuaaaaaagggcgucggaagcugaagcuuuggaagcauagugagaaggagccugaaacuaacguggcugaggguaggcgcguguucgaaaguaggagacgcauuaacauggcuaauaagcagauaaauccugaacggugggccgacauacuggccaaggucagagggaaaaacuugccaaaagggacagaggucccuccccuaaucaaaaccacaucccccccauccuuaucuuuagagguuacaccuccauucccugccaucucaccgccgagugccucgccuguucaaacugugacauccgccgaagaaucaagcgcugaugucccgcugcuuggugaggaagaacauguauuggguaccaucuccagcgcgucaaugggacuagagcacaaccacaacggggugauuuuggucgaacccgagguaacuaguaccccccucgaggaaguuguggaugaucugagcgagaaaaccgaagagaucaccucuacagagggcgaucucaaaggaacagcagcacccacacugauuucugaacccuacgaacccaguccuaccuugcauacuuuagacacagucuacgaaaaaccaacacacgaagagacagcaacugaggguuggucugccgcagaugugggaaguucuccagaaccaacuucuuccgaauacgagcccccacuugacgccguuagccuugcagagagcgaaccaaugcaguacuuugacccugaucuggaaacaaaaucccagccugaugaggacaaaaugaaagaagacacauuugcgcaucugacgccuacuccgacgauuuggguuaacgacuccagcacaucccaauuauucgaggacucaacuaucggugagccuggugugccuggacagagccacuuacagggauugacagacaauauccaucuaguaaaaucuucccuguccacgcaggauacacugcugaucaagaagggcaugaaggagaugagccagacacuucaaggggggaauauguuagaaggugaccccacacacucccgcucaagcgagucagagggccaggagagcaaaucuaucacacugcccgacuccacccugggcauuaugucuucaauguccccuguaaaaaaaccagccgagaccaccgugggaacucuguuggauaaagacacaaccaccgccacaacgacccccagacaaaaagucgcucccaguucaacaauguccacacacccgucuagacggaggccuaauggacgaaggagacugcgcccgaauaaauuuagacacagacauaagcagacaccaccuaccaccuuugcucccuccgaaacguuuucaacacagccaacccaagcaccugauauaaagaucucaucacagguugagucuagucucguccccaccgcuugggucgacaauacggugaacacaccuaagcagcuggaaauggagaaaaaugccgaacccacaaguaaagggacacccagaagaaagcauggcaagagacccaacaagcaccgguacaccccgucaaccgugucgucaagagccucaggauccaaaccaucgccaucccccgagaauaaacaucgaaauaucgucaccccuagcucagagaccaucuuguugcccagaaccgugagccugaaaacugagggaccauaugauagucuagacuacaugacaaccacacguaagauuuacucuucuuauccaaagguacaagaaacccucccugugaccuacaagcccaccagcgauggcaaagaaaucaaggacgauguggcuaccaauguggauaagcacaaaucugacauucucgucaccggagaaaguauaacuaacgcuauucccaccagccgaucucuagugagcacgaugggggaguuuaaagaggaaucaucuccagucggauucccuggcacaccaaccuggaacccuucccgaaccgcccaaccaggcaggcugcagacuggcaucccuguuacaacaagcggcgaaaaccugacagacccuccacuccuuaaagaacucgaagauguggauuuuaccucugaguuccuuuccagucugacaguguccacaccguuccaucaggaagaagcuggcuccucaacuacgcucucuucgauuaagguggagguugcgucaagccaggccgagaccacaacccucgaucaggaucaucucgaaaccaccguugccauccugcucuccgagacaaggccccagaaccacacuccuaccgccgcucgcaugaaagaaccagccucaaguucacccaguaccauacugaugucccuuggacagacuaccaccaccaaaccugcucugccauccccucgcaucucccaggcaagccgcgacaguaaggagaauguauuuuuaaacuaugucggcaauccggaaacagaagccacacccguuaauaaugaaggcacgcagcacauguccggcccaaacgaacuguccaccccuagcucugaccaggacgccuuuaaucuuaguacuaagcuggaacucgaaaagcaaguuuuuggcagcagaucuuugccccgcgggccugauucccagcgucaggaugggcgcguccacgcaagucaucagcucacccgcguuccugcaaagcccauucuuccuacagcuacaguucggcucccagagauguccacccaguccgccucccgauauuucgucacaucccagucgccccgccacuggacuaacaaacccgaaauuacuacuuauccuucaggagcucuacccgagaauaagcaguuuaccaccccccgccuuuccaguaccacaaucccucuuccccugcacaugucuaagccuucgauacccaguaaguucaccgaucggcggacagaccaguucaacggcuauaguaagguguuuggaaauaacaacaucccagaagcacgaaauccugucggcaagcccccaagcccaagaaucccucauuacagcaauggacgccuucccuucuuuacuaacaagacacugucauuuccgcagcuaggagucacuaggagaccgcaaaucccaaccuccccugcccccgucaugcgugagaggaaagucaucccugguucauacaaccgaauucacucucacucuaccuuccacuuggacuucggccccccagcaccuccuuugcugcauacaccucagacuacuggcagcccaagcacuaaucuucagaacauuccgauggugaguuccacccaaucuucuauauccuucaucacuaguuccguccagagcagcggcucuuuccaccaaagcucuaguaaauuuuuugcugguggaccgccagcuaguaaauuuuggucccuuggagaaaaaccacagauccuuacaaagucuccacagacuguguccguaacugccgaaaccgacaccguguuccccugugaagcuaccgggaaacccaaaccauucguaaccuggacaaaggucagcacuggcgcacugaugacacccaauacgagaauacagcgguuugaagugcugaaaaacgggacccuugugauuagaaagguacaggugcaagauagagggcaguacaugugcaccgccucuaaccuccacgguuuagaccguaugguagugcuacuauccgugaccgugcaacagccgcagauucuggccucacacuaucaggaugugaccguauaccugggagacacuauugccauggagugccucgccaagggcacaccagcgccccagauuagcuggaucuuccccgaccgccguguguggcagacaguuucacccgucgaaggacgcauaacccuacacgagaacagaacccucagcaucaaagaggcaucauuuagcgauaggggaguuuacaagugcguggccucuaacgccgccggagccgacucauuagcuauucgccuucaugucgccgcacugccucccgugauacaccaggaaaaauuggaaaauauaucccuucccccuggccuuuccauucacauccauuguaccgccaaagcugccccucuucccagugugcgauggguuuuaggcgaugggacccaaauccguccgucacaguuccugcacggcaaucuguucguguucccaaaugguacgcuauacauccggaacuuagcuccuaaagacaguggaagauacgaauguguggcggcuaaccuggucggaucugcuagaaggacugugcagcugaacgugcagagggcugcagcuaacgcucgaauaacuggcaccucaccucgccgcaccgauguucgcuacggcggcacccuaaaacuagauugcuccgcuucaggcgauccuuggccucguauccucuggcgguugccuucaaaacguaugauagaugcccucuuuuccuuugacucuaggaucaagguuuucgcaaaugguacauuaguugugaagagcgucacagacaaagaugccggagauuaccuguguguggcuaggaauaaagugggugacgauuacgugguguuaaaggucgaugucgugaugaagccugcgaaaauugagcauaaagaagagaaugaucauaagguuuucuauggcggcgaccuuaaagucgauuguguggcuaccggacucccuaauccagaaauuagcuggucacugccugacggcucccuggucaacagcuuuaugcagagcgacgauaguggagggaggacaaagcgcuacgugguauuuaacaacggaaccuuguacuucaaugaagugggaaugagagaggaaggagacuacacaugcuuugcggaaaaucagguagggaaagaugagaugagagugcgagugaaaguggugacugcgcccgccacgauucgaaauaaaacauauuuggcaguccaggugccguauggagaugugguaacgguagcuugcgaggcgaagggggaaccgaugccuaagguaacauggcugagccccacgaacaaagugauccccacauccucugaaaaauaucagauauaucaggacgggacauuacucauucagaaggcgcagaggagcgauucgggcaauuauaccugucucguacguaacagugcuggcgaggaccgcaaaacuguguggauccaugucaauguucaaccuccaaaaauuaauggcaaccccaauccuauuacaaccguccgagaaauagccgccgggggcucuagaaagcugauagauugcaaggcagaaggcaucccaacucccagagugcugugggccuuucccgagggcguugugcugccagcaccauacuacggcaaucgcauaaccguucacggcaaugggucacucgacaucagaucccuaaggaaaagcgauucugugcagcuggucugcauggcacgcaaugaaggaggcgaagcaagguugauccuacaauugacuguccucgagccaauggaaaagccuauuuuccacgauccuaucucagagaagaucaccgccauggcaggucacacaauuucccugaacugcuccgcagcuggaacaccgacucccucacucguguggguccucccaaaugguaccgaccugcaauccggccagcaacuucagcguuucuaucauaaagcggauggaauguuacacauuuccggguuaucuuccguggacgcgggcgccuacagaugugucgcccguaaugccgccggacacacagaacgacucgucagccucaaggugggucucaaacccgaagcuaauaaacaguaucauaaccuggugucuauaauuaacggugaaacacuuaagcuccccuguaccccuccaggggcuggacaagggcgguucucuuggacacuucccaauggaaugcaucuugaagguccucagacacugggaagagugucccuguuggauaauggaacacuuaccgugcgggaagcgucaguuuuugacagaggcacauauguaugucgcauggaaaccgaauaugggccuagcgugaccucaaucccuguaaucguaaucgccuauccuccuaggaucaccucagaaccaacgcccguaauuuauacaagacccgggaauaccgucaaacugaauugcauggcuaugggcauucccaaggcagacaucaccugggagcuuccugauaaaucccacuugaaagcaggaguucaggccagacucuauggcaaccgcuuccuccacccgcagggcuccuuaacuauccagcacgccacacaaagggacgcuggcuucuacaagugcauggcuaaaaacauccugggcuccgauuccaaaaccacuuacauacacguauucuag

SEQ ID NO: 186639 - protein, 597 aa, Artificial Sequence
  derived and/or modified sequence
MQWPPPWRRSPLVSATPPPGPTRGLLCPRRVSEAGDSSTEGARTGHRHYVTPAESAMEGRSQPLPSLRPASPTNAPAHGRGSDCTAKEPPLANVCRQNYGAAQDPVEPAGRRSASHVTGSSLGKAEVACGRRWRWAELLADTSWSPAGRATEMKVKMLSRNPDNYVRETKLDLQRVPRNYDPALHPFEVPREYIRALNATKLERVFAKPFLASLDGHRDGVNCLAKHPEKLATVLSGACDGEVRIWNLTQRNCIRTIQAHEGFVRGICTRFCGTSFFTVGDDKTVKQWKMDGPGYGDEEEPLHTILGKTVYTGIDHHWKEAVFATCGQQVDIWDEQRTNPICSMTWGFDSISSVKFNPIETFLLGSCASDRNIVLYDMRQATPLKKVILDMRTNTICWNPMEAFIFTAANEDYNLYTFDMRALDTPVMVHMDHVSAVLDVDYSPTGKEFVSASFDKSIRIFPVDKSRSREVYHTKRMQHVICVKWTSDSKYIMCGSDEMNIRLWKANASEKLGVLTSREKAAKDYNQKLKEKFQHYPHIKRIARHRHLPKSIYSQIQEQRIMKEARRRKEVNRIKHSKPGSVPLVSEKKKHVVAVVK

SEQ ID NO: 186640 - protein, 96 aa, Artificial Sequence
  derived and/or modified sequence
MKVKMLSRNPDNYVRETKLDLQRVPRNYDPALHPFEVPREYIRALNATKLERVFAKPFLASLDGHRDGVNCLAKHPEKLATVLSGACDGELNMIKL

SEQ ID NO: 186641 - DNA, 1794 bp, Artificial Sequence
  derived and/or modified sequence
atgcaatggccccccccatggagacgtagtccgctggtgtccgccacaccccctcctggcccaacccggggcttactgtgtccacgcagggtgagcgaagccggtgatagctctactgaaggcgcccgcactggccaccgccactatgtgaccccagctgaatccgccatggaaggacggtcacagccactaccaagcctacgacccgcatcgcccaccaacgcaccagcccacgggaggggatctgactgtaccgctaaagagcctcctctagccaatgtgtgccgtcagaattacggtgctgcgcaagatcccgtcgagcccgctggacgccgctctgcttctcacgtcacaggctcctcactgggtaaggcagaggtggcatgtggtagaagatggaggtgggccgagttgctggcagacacctcatggagtcccgccggccgggctacagagatgaaggtcaaaatgttatctagaaatccggacaattacgtgcgagaaacaaaactggacctgcagagggtaccacggaactatgaccctgccctgcatcccttcgaggtgccacgggaatatatccgggccctcaacgcaaccaaactggagagggtgtttgcaaaaccatttctcgcttctctggatggccatcgcgacggagtaaattgccttgccaaacacccagaaaagctggccactgtcctctccggcgcatgtgatggtgaagtacgcatttggaacctcacccagaggaattgtatccgtactattcaggctcacgaagggttcgttagggggatttgcactaggttctgcgggacaagctttttcaccgttggagatgataagaccgtgaaacagtggaaaatggacggccccgggtatggggacgaagaagaacctctgcacaccatacttggtaaaacagtgtataccggcatagatcatcattggaaggaagcagtgttcgcaacatgtggacaacaagtcgatatctgggacgagcaacgaactaaccctatttgctccatgacctggggctttgactccatctcctctgtgaaatttaaccccatcgagacatttctcttgggctcttgcgcctcagatcggaatatcgtattatacgatatgcgacaggctacacctctgaaaaaagtcatcctggacatgcggaccaacaccatctgttggaatcctatggaggccttcatcttcaccgccgcgaacgaagactacaacctgtatacattcgacatgagggctctggatacacctgtgatggtccatatggatcacgtgtcagccgttctagacgtagactactcgccgaccgggaaagagttcgtcagcgcttcgttcgacaagagtataagaatttttccagtcgacaagtcacggtcacgagaagtttaccacacaaaaaggatgcagcacgtgatttgcgtcaagtggacttccgactcaaaatatattatgtgcggtagcgacgaaatgaacatccggctatggaaggctaacgcgagtgaaaaactgggcgtgctgaccagtcgggagaaggctgcaaaggattataatcagaagcttaaggagaagttccagcattatccacacattaaacgtatcgcaaggcatcggcacctgccaaagtccatttattcacagattcaggaacagcgcatcatgaaggaggccagacgtaggaaggaggtcaaccgcatcaagcactccaaacctggttcagttccccttgtttccgagaaaaagaagcacgtggtggctgttgtaaagtag

SEQ ID NO: 186642 - DNA, 291 bp, Artificial Sequence
  derived and/or modified sequence
atgaaggtgaaaatgctctctcggaatcctgataactatgtccgggaaacaaagctggacctgcagcgcgttcccagaaattatgacccagctttgcacccttttgaggtaccacgcgagtacatccgagcgctgaacgcaacaaaactggagcgcgtttttgccaagccattccttgcctctctggacggacatcgcgatggggtaaactgtctagccaagcacccggagaaactcgctacagtcctgtccggtgcatgcgacggtgagttgaacatgatcaaactatag

SEQ ID NO: 186643 - DNA, 1794 bp, Artificial Sequence
  derived and/or modified sequence
atgcagtggcccccaccctggaggaggagccccctggtgtctgccaccccacctcctggccccacccggggcctgctgtgccccaggagagtgtctgaggccggggacagcagcacagaaggagccaggacaggccaccgccactacgtgaccccagctgagagcgccatggagggccgcagccagcccctgcccagcctgcggcctgccagccccaccaatgccccagcccacggccggggcagtgactgcacagccaaggagccccccctggccaacgtgtgccggcagaactatggagctgcccaggaccctgtggagcctgctggaagaagaagtgccagccacgtgacaggcagcagcctgggcaaggccgaggtggcctgtggccgccgctggcgctgggccgagctgctggccgacacctcctggagccctgctggccgggccacagagatgaaggtgaagatgctgagcaggaacccagacaactacgtgcgggagaccaagctggacctgcagagggtgcccaggaactatgaccctgccctgcacccctttgaggtgccccgggagtacatccgggccctgaatgccaccaagctggagcgggtgtttgccaagcccttcctggccagcctggatggccacagagatggagtgaactgcctggccaagcaccctgagaagctggccaccgtgctgagcggggcctgtgatggagaggtgcgcatctggaacctgacccagaggaactgcatccgcaccatccaggcccacgagggctttgtgcggggcatctgcacccgcttctgtggcaccagcttcttcaccgtgggagatgacaagacagtgaagcagtggaagatggatggccctggctatggagatgaggaggagcccctgcacaccatcctgggcaagacagtgtacacaggcatcgaccaccactggaaggaggccgtgtttgccacctgtggccagcaggtggacatctgggatgagcagaggaccaaccccatctgcagcatgacctggggctttgacagcatcagctctgtgaagttcaaccccatcgagaccttcctgctgggcagctgtgccagtgacagaaatattgtgctgtatgacatgaggcaggccacccccctgaagaaggtgatcctggacatgaggaccaacaccatctgctggaaccccatggaggccttcatcttcaccgctgccaatgaagactacaacctgtacacctttgacatgagggccctggacacccctgtgatggtgcacatggaccacgtgtctgctgtgctggatgtggactacagccccaccgggaaggagtttgtgtctgccagctttgacaagagcatccgcatcttccctgtggacaagagccgcagccgggaggtgtaccacaccaagaggatgcagcacgtgatctgtgtgaagtggaccagtgacagcaagtacatcatgtgtggcagtgatgagatgaacatccggctgtggaaggccaatgccagcgagaagctgggcgtgctgaccagccgggagaaggccgccaaggactacaaccagaagctgaaggagaagttccagcactacccccacatcaagagaattgcccggcaccgccacctgcccaagagcatctacagccagatccaggagcagaggatcatgaaggaggcccggcggaggaaggaggtgaaccgcatcaagcacagcaagccaggctctgtgcccctggtgtctgagaagaagaagcacgtggtggccgtggtgaagtag

SEQ ID NO: 186644 - DNA, 291 bp, Artificial Sequence
  derived and/or modified sequence
atgaaggtgaagatgctgagcaggaacccagacaactacgtgcgggagaccaagctggacctgcagagggtgcccaggaactatgaccctgccctgcacccctttgaggtgccccgggagtacatccgggccctgaatgccaccaagctggagcgggtgtttgccaagcccttcctggccagcctggatggccacagagatggagtgaactgcctggccaagcaccctgagaagctggccaccgtgctgagcggggcctgtgatggagagctgaacatgatcaagctgtag

SEQ ID NO: 186645 - DNA, 1794 bp, Artificial Sequence
  derived and/or modified sequence
atgcagtggccccccccctggcggcggagccccctggtgagcgccactcccccaccagggcccaccagaggcctgctgtgccctcgaagggtgagcgaagccggagactcctccacagagggcgcaagaaccggacacagacactatgtcacccccgccgagtctgccatggaggggaggagccaacccctgccctccctgcgccccgcaagcccaaccaacgcgcctgcacacgggcgcggctccgactgtactgccaaagaaccccccctcgctaacgtgtgccgtcagaactatggagccgcccaagaccccgttgagccagcaggccggcgatccgcttcccatgtcaccgggagcagtctgggaaaggccgaggtcgcctgcggtcgccgttggaggtgggcagaactgctagcagatacgagctggagcccggcgggccgcgccactgaaatgaaagtcaagatgctgagtcggaaccctgataactatgttcgtgagacaaagctggacctacaaagagtgccccgaaactacgaccccgccctacacccatttgaagtgccacgagaatatatccgtgcacttaatgctaccaagctggaaagagtattcgccaaaccctttctcgctagcctcgatggccacagagatggagtaaactgtctggcaaagcatccggagaagttggcgacagttctgagcggggcttgcgatggtgaagtccgcatttggaacctgacccagcgtaactgcatccggactattcaggcccacgagggattcgtcaggggaatttgcaccaggttctgtggcacctctttctttactgtgggagacgataaaaccgtgaaacagtggaaaatggacggtcccggatacggcgacgaggaggagcctctgcacacaatcctcggcaagaccgtgtacactggcattgaccaccactggaaggaggccgttttcgccacgtgtggacagcaagtagacatttgggatgagcagcgcacgaaccccatttgttccatgacctggggattcgatagcatcagttctgtcaagtttaacccgatcgaaacattcctcctgggatcgtgcgcgagtgatcgaaacattgtgttgtatgacatgcgccaagcaacaccactgaagaaagttatacttgacatgagaactaacaccatttgctggaaccccatggaagcattcattttcacggccgcaaatgaggactataacttgtacaccttcgacatgcgcgccctggacacaccagtgatggtccatatggaccacgtctcagcagttcttgatgtggattattcaccaacaggaaaggagtttgtgtcagcttctttcgacaaaagcattagaatctttccggtggacaaaagcaggagtcgcgaagtgtaccacactaagcgcatgcagcacgtcatctgcgtcaaatggacaagcgattccaagtatataatgtgcgggtccgacgagatgaacattaggttgtggaaggccaacgcgtccgagaaactcggggtgctgacgtctagagaaaaagcagccaaggattacaaccaaaagttaaaggagaagttccaacactaccctcacataaaacgcatcgcccgccaccggcatctacctaaatccatatactctcagattcaggaacaacggatcatgaaagaagcaagaagacgcaaagaagtgaaccgaataaagcactctaaaccgggtagcgtgccattggtgagcgaaaaaaaaaaacacgtggtcgctgttgttaagtag

SEQ ID NO: 186646 - DNA, 291 bp, Artificial Sequence
  derived and/or modified sequence
atgaaggtgaagatgctgagccggaaccccgacaactacgtgcgggagaccaaattggatcttcaaagagtgcctagaaattacgaccccgcactgcacccattcgaagtacctcgtgagtatatccgggctcttaacgccacaaaactggaacgtgttttcgctaaaccttttctcgctagtctggatggccaccgcgatggcgtcaactgtttagccaagcaccctgagaagctggcaaccgtgctttctggtgcttgcgatggcgaattaaatatgatcaagttgtag

SEQ ID NO: 186647 - DNA, 1794 bp, Artificial Sequence
  derived and/or modified sequence
atgcagtggcccccaccctggagacgaagccccctggtgagtgccacacctcctccaggcccaacgcggggactgctatgccctaggcgtgtgagtgaagcaggagatagttctaccgagggagctaggaccggccatagacattacgtgacacctgctgagtcggcaatggagggacgctctcagcctctgccctctctgcgccctgccagtccaacgaacgcacccgctcacggcaggggctcagactgtaccgccaaagagcctcctctcgccaacgtttgccgccaaaactacggtgccgctcaagatcctgtagagcccgctggtaggcgaagcgcttcccacgttaccgggtcctccctagggaaggcggaggtcgcgtgcggtagacggtggaggtgggctgagttgttagccgatactagttggtcccctgccggtagagctaccgaaatgaaagtaaagatgctgtctagaaaccccgacaactatgttagggagactaagctggacctgcaaagggtgcccagaaactacgaccccgctctgcatccctttgaggtccctagggaatacatacgggcactcaatgctaccaaactggaaagggtatttgccaaaccttttctggcatccctcgacgggcatcgagacggcgtaaattgtttggcaaagcaccccgagaaactggccactgtgctgtccggagcatgtgatggtgaggttcggatttggaatctgacgcagcgcaattgcataagaaccatccaggcccacgagggtttcgtccgagggatctgtactcggttttgtggcacctcgttttttacagtgggcgatgacaaaactgtcaagcagtggaaaatggatggtcctggctatggggatgaagaggagcctttacacactatcctcggcaagacagtgtatacaggtattgatcaccactggaaggaagcggtcttcgctacatgtggccagcaggttgacatttgggacgagcaacgtaccaaccccatttgctctatgacatggggattcgactccatcagctcagttaaatttaaccccatcgagacattcctcctgggatcatgtgcatctgaccgcaacatcgtgctctacgatatgcgtcaggccacgccactcaagaaagtgattcttgatatgcggacgaatacaatttgctggaacccgatggaagccttcatattcaccgccgctaatgaggactataatctgtatacctttgacatgagagcacttgatacccctgttatggtccacatggaccacgtgtccgcggtgctcgacgtcgactactcaccaactgggaaggagtttgttagtgcctcctttgacaagtccatacgaatcttccccgttgacaagtctaggagtagagaggtgtaccacactaagcgtatgcaacatgtgatttgtgtgaaatggacaagcgattctaagtacatcatgtgcggcagcgacgagatgaatatccgtttgtggaaagccaacgccagcgaaaaactcggggttctaacctcccgggagaaggcggcaaaagattacaaccagaagctgaaagaaaaattccagcactacccccatataaaaagaatagccaggcaccgtcacctgccgaaatccatatactctcagatccaggaacagcggataatgaaagaggccaggagaaggaaggaggtcaacagaattaaacattccaagccaggatcggttcccctagtgagcgagaaaaagaaacatgtggtcgcagttgttaagtag

SEQ ID NO: 186648 - DNA, 291 bp, Artificial Sequence
  derived and/or modified sequence
atgaaagtgaaaatgctatccaggaatcctgataattacgttagagagaccaaactcgatctccaacgggtccccaggaattacgatcccgctctgcaccctttcgaagtccctcgcgagtacatcagggccctgaacgctaccaagcttgaacgagtcttcgccaagcccttcctagccagcttggacgggcacagagacggtgtgaattgtctggctaaacaccccgagaaactcgctaccgtgctgtctggtgcatgcgacggtgagcttaatatgattaagctgtag

SEQ ID NO: 186649 - DNA, 2642 bp, Artificial Sequence
  derived and/or modified sequence
aaaagacggaggagatccagttcgggctgacagtgagaggatgcagcccggtgtctgggcgggctcttaccggcgaagcggatcttcacgaggtcgagcggatgcagcgcaaggttggataagacgccgccgctcacgcccgctatcaggttctcataccggacgtggcggaataccgtgctccacgccgacgacccggacgccgactggccctggcccgtcataggctcggggcccgtcgacaccacggcgcccagggccgcggaggtgggacgcgatgcagtggccgccaccgtggcgacggtcgccccttgtgagcgcaaccccacctccgggaccaacgagaggactcttatgcccaaggcgcgtgagcgaagccggagactctagtactgagggggcaagaacggggcacagacactacgtcacgccggcggaaagcgcgatggaggggaggtcccagcctctcccgagtctccgccctgcctcgcccacaaatgctccagcccacggacgcggaagcgactgcacagctaaagaaccgccccttgctaacgtttgccggcaaaactacggagcggcgcaggatccagttgagccagcaggccgccgctccgcgagtcacgtgactggaagtagtctgggaaaagcggaagtcgcctgtgggaggaggtggcggtgggcggaactcctagcggacacctcgtggagtccggccggaagagcaaccgagatgaaggtgaagatgctgagccggaatccggacaattatgtccgcgaaaccaagttggacttacagagagttccaagaaactatgatcctgctttacatccttttgaggtcccacgagaatatataagagctttaaatgctaccaaactggaacgagtatttgcaaaaccattccttgcttcgctggatggtcaccgtgatggagtcaattgcttggcaaagcatccagagaagctggctactgtcctttctggggcgtgtgatggagaggttagaatttggaatctaactcagcggaattgtatccgtacaatacaagcacatgaaggctttgtacgaggaatatgtactcgcttttgtgggacttcttttttcactgttggtgatgacaaaactgtgaagcagtggaaaatggatgggccaggctatggagacgaggaagagccattacatacaatattaggaaagacagtgtatactgggattgatcatcactggaaagaagctgtttttgccacatgtggacagcaagtagacatttgggatgaacaaagaactaatcctatatgttcaatgacctggggatttgacagtataagtagtgttaaatttaacccaattgagacatttctcttgggaagttgtgcatctgacaggaatatagtactgtacgatatgaggcaagctactcctttgaaaaaggttatcttagatatgagaacaaatacaatctgttggaaccctatggaagctttcatttttacagcagcaaatgaagattataacttatatacttttgatatgcgtgcactggacactcctgtaatggtccatatggatcatgtatctgcagtgcttgatgtggattactctcccactgggaaggagtttgtgtctgctagtttcgataaatctattcgaatctttcctgtagacaaaagtcgaagcagggaggtatatcatacaaagagaatgcaacatgttatctgtgtaaaatggacttctgacagcaagtatattatgtgtggatctgatgaaatgaacattcgcctgtggaaagctaatgcttctgaaaaattgggtgtgcttacatcacgagaaaaagcagccaaggattataaccagaaattgaaggagaaatttcagcattatcctcatataaaacgtatagctcgtcatcgacatctaccaaaatctatctatagccagattcaggaacagcgcatcatgaaagaagctcgtcgacgaaaggaagtgaatcgtattaaacacagcaagcctggatctgtgccacttgtgtcagagaagaagaaacacgtagtggcagttgtaaaataattggtattcctaacaatcctgatgtataattatttgttacttttgatttgagaactctacaaataaaagtgctgggactagattaattgcaaacattttagttatatgtgtagagctttattgttactccttttagctaccctgaaaaatgatccttaaaggtggcctagttggtaagactgttttatccttaatctgcattcttctttcattgtagaatacagtatttgcaactcattttttcttgtttttattacagatatacttactttctctttgatctattattgtagacactatacattcaaattgacatttaagaccaaacatctcttatgttatctttaatattactttgaataatgattgcaatgatgtttcttcctgtgattccacataacatttagaataatgatgtcaattttttacaactgaatttatttctagtgctttacttatatttggctttttgactcttttaaaacaatcagcctgcatttatataacttttataaataataatataatttgggtcaagttaagatattaaaagttcctttcagcattgaaa

SEQ ID NO: 186650 - DNA, 346 bp, Artificial Sequence
  derived and/or modified sequence
gcggtgggcggaactcctagcggacacctcgtggagtccggccggaagagcaaccgagatgaaggtgaagatgctgagccggaatccggacaattatgtccgcgaaaccaagttggacttacagagagttccaagaaactatgatcctgctttacatccttttgaggtcccacgagaatatataagagctttaaatgctaccaaactggaacgagtatttgcaaaaccattccttgcttcgctggatggtcaccgtgatggagtcaattgcttggcaaagcatccagagaagctggctactgtcctttctggggcgtgtgatggagagcttaacatgattaaacta

SEQ ID NO: 186651 - DNA, 1794 bp, Artificial Sequence
  derived and/or modified sequence
atgcagtggccccccccctggagaagaagccccctggtgagcgccacccccccccccggccccaccagaggcctgctgtgccccagaagagtgagcgaggccggcgacagcagcaccgagggcgccagaaccggccacagacactacgtgacccccgccgagagcgccatggagggcagaagccagcccctgcccagcctgagacccgccagccccaccaacgcccccgcccacggcagaggcagcgactgcaccgccaaggagccccccctggccaacgtgtgcagacagaactacggcgccgcccaggaccccgtggagcccgccggcagaagaagcgccagccacgtgaccggcagcagcctgggcaaggccgaggtggcctgcggcagaagatggagatgggccgagctgctggccgacaccagctggagccccgccggcagagccaccgagatgaaggtgaagatgctgagcagaaaccccgacaactacgtgagagagaccaagctggacctgcagagagtgcccagaaactacgaccccgccctgcaccccttcgaggtgcccagagagtacatcagagccctgaacgccaccaagctggagagagtgttcgccaagcccttcctggccagcctggacggccacagagacggcgtgaactgcctggccaagcaccccgagaagctggccaccgtgctgagcggcgcctgcgacggcgaggtgagaatctggaacctgacccagagaaactgcatcagaaccatccaggcccacgagggcttcgtgagaggcatctgcaccagattctgcggcaccagcttcttcaccgtgggcgacgacaagaccgtgaagcagtggaagatggacggccccggctacggcgacgaggaggagcccctgcacaccatcctgggcaagaccgtgtacaccggcatcgaccaccactggaaggaggccgtgttcgccacctgcggccagcaggtggacatctgggacgagcagagaaccaaccccatctgcagcatgacctggggcttcgacagcatcagcagcgtgaagttcaaccccatcgagaccttcctgctgggcagctgcgccagcgacagaaacatcgtgctgtacgacatgagacaggccacccccctgaagaaggtgatcctggacatgagaaccaacaccatctgctggaaccccatggaggccttcatcttcaccgccgccaacgaggactacaacctgtacaccttcgacatgagagccctggacacccccgtgatggtgcacatggaccacgtgagcgccgtgctggacgtggactacagccccaccggcaaggagttcgtgagcgccagcttcgacaagagcatcagaatcttccccgtggacaagagcagaagcagagaggtgtaccacaccaagagaatgcagcacgtgatctgcgtgaagtggaccagcgacagcaagtacatcatgtgcggcagcgacgagatgaacatcagactgtggaaggccaacgccagcgagaagctgggcgtgctgaccagcagagagaaggccgccaaggactacaaccagaagctgaaggagaagttccagcactacccccacatcaagagaatcgccagacacagacacctgcccaagagcatctacagccagatccaggagcagagaatcatgaaggaggccagaagaagaaaggaggtgaacagaatcaagcacagcaagcccggcagcgtgcccctggtgagcgagaagaagaagcacgtggtggccgtggtgaagtag

SEQ ID NO: 186652 - DNA, 291 bp, Artificial Sequence
  derived and/or modified sequence
atgaaggtgaagatgctgagcagaaaccccgacaactacgtgagagagaccaagctggacctgcagagagtgcccagaaactacgaccccgccctgcaccccttcgaggtgcccagagagtacatcagagccctgaacgccaccaagctggagagagtgttcgccaagcccttcctggccagcctggacggccacagagacggcgtgaactgcctggccaagcaccccgagaagctggccaccgtgctgagcggcgcctgcgacggcgagctgaacatgatcaagctgtag

SEQ ID NO: 186653 - protein, 309 aa, Artificial Sequence
  derived and/or modified sequence
MVFPAKRFCLVPSMEGVRWAFSCGTWLPSRAEWLLAVRSIQPEEKERIGQFVFARDAKAAMAGRLMIRKLVAEKLNIPWNHIRLQRTAKGKPVLAKDSSNPYPNFNFNISHQGDYAVLAAEPELQVGIDIMKTSFPGRGSIPEFFHIMKRKFTNKEWETIRSFKDEWTQLDMFYRNWALKESFIKAIGVGLGFELQRLEFDLSPLNLDIGQVYKETRLFLDGEEEKEWAFEESKIDEHHFVAVALRKPDGSRHQDVPSQDDSKPTQRQFTILNFNDLMSSAVPMTPEDPSFWDCFCFTEEIPIRNGTKS

SEQ ID NO: 186654 - DNA, 930 bp, Artificial Sequence
  derived and/or modified sequence
atggtcttccccgccaaaagattctgcctggtcccaagtatggaaggcgtcaggtgggctttctcatgcggtacttggttacctagcagagcagaatggctgttagccgtgaggtccatacaaccagaagagaaggaacggataggccaatttgtattcgctcgagacgccaaagcagcaatggctggcaggctgatgatccgcaagctcgttgccgagaagttgaatattccctggaatcacatcaggctgcagagaactgcgaaaggcaaaccagttctcgcaaaggatagctctaatccatatcccaatttcaacttcaatattagtcaccagggcgattatgctgttctggctgccgagcccgaactgcaagtggggattgacattatgaagacatcatttccgggtaggggatccatccctgaattttttcacataatgaaaagaaagtttacaaacaaagagtgggagaccatcagatcatttaaggacgagtggacacagttagatatgttctataggaattgggccttgaaggagtcatttatcaaagccatcggggtgggcctaggatttgaactgcagcggctggagtttgatctgtcgccactgaacttagatataggtcaagtctacaaagagactcgactgtttctggacggcgaggaggagaaagaatgggctttcgaggagagcaagatcgatgagcatcacttcgtagctgtagctttacgcaaaccagacggaagccgccaccaggacgtgccgagtcaggatgactccaaacccacgcagcgccagttcacgatcctgaactttaatgatctgatgagcagtgctgtgccgatgactccggaagacccttcattctgggattgcttttgttttaccgaagagataccaatccgtaatggtacaaagagctag

SEQ ID NO: 186655 - DNA, 930 bp, Artificial Sequence
  derived and/or modified sequence
atggtgtttcctgccaagcgcttctgcctggtgcccagcatggagggcgtgcgctgggccttcagctgtggcacctggctgcccagcagagctgagtggctgctggccgtgcgcagcatccagcctgaggagaaggagcgcatcggccagtttgtgtttgccagagatgccaaggccgccatggccggccgcctgatgatcaggaagctggtggccgagaagctgaacatcccctggaaccacatccggctgcagaggacagccaagggcaagcctgtgctggccaaggacagcagcaacccctaccccaacttcaacttcaacatcagccaccagggcgactatgctgtgctggccgctgagcctgagctgcaggtgggcatcgacatcatgaagaccagcttccctggccggggcagcatccctgagttcttccacatcatgaagaggaagttcaccaacaaggagtgggagaccatccgctccttcaaggatgagtggacccagctggacatgttctacagaaactgggccctgaaggagagcttcatcaaggccatcggcgtgggcctgggctttgagctgcagaggctggagtttgacctgagccccctgaacctggacatcggccaggtgtacaaggagaccaggctcttcctggatggagaggaggagaaggagtgggcctttgaggagagcaagattgatgagcaccactttgtggccgtggccctgaggaagccagatggcagccgccaccaggatgtgcccagccaggatgacagcaagcccacccagaggcagttcaccatcctgaacttcaatgacctgatgagcagcgctgtgcccatgaccccagaggaccccagcttctgggactgcttctgcttcacagaggagatccccatcagaaatggcaccaagagctag

SEQ ID NO: 186656 - DNA, 930 bp, Artificial Sequence
  derived and/or modified sequence
atggtgttccccgccaagcggttctgcctggtgcccagcatggagggcgttaggtgggcatttagttgtggcacatggctcccgtcccgggctgaatggctgctggctgttaggagcattcaacccgaggagaaggaaagaatcggccagtttgtttttgcaagagacgccaaagccgctatggccggccggctgatgattcgcaagcttgtcgctgagaaacttaatattccctggaaccatataaggctgcagaggactgccaaaggtaaacctgttctcgctaaggatagcagcaatccatatcccaactttaattttaacatctcccatcagggggattatgccgtcctggccgccgagcctgaactgcaggtggggatagacattatgaagacaagcttccccggaaggggaagcatccccgagtttttccacattatgaagcgaaaattcaccaataaggaatgggagactattaggtcctttaaggatgaatggacgcagttagacatgttttaccgcaactgggcactgaaagagtcattcattaaagctatcggcgtgggcctgggattcgaactgcagcgcctcgagtttgatctcagccctttaaacctggatatcggccaagtctacaaagaaacccggctcttcctggatggtgaggaggagaaggaatgggctttcgaggaatctaagatcgatgagcatcatttcgtggcggtcgcgctaagaaaaccagacggaagccgacatcaagacgtgccgagccaggatgattctaaacctacacagaggcagtttacaatactgaattttaatgacctgatgtcctcggccgtccccatgacacctgaggatccatccttctgggactgtttttgtttcacagaagaaatcccaatcagaaatgggactaaatcttag

SEQ ID NO: 186657 - DNA, 930 bp, Artificial Sequence
  derived and/or modified sequence
atggttttccccgcaaaacgcttttgcctcgtgccaagcatggagggcgtgaggtgggcgttctcatgcggaacatggctgccctcccgcgctgagtggctgctggctgtgaggtcgatccagcccgaagaaaaagaacggatagggcaattcgtgttcgctcgagatgccaaggcagctatggccggaagactgatgatccgtaagctggtggctgagaaacttaacatcccctggaaccacatccgactccagaggaccgccaaaggtaaacctgtcttagccaaagattcatccaatccgtatccgaatttcaacttcaacattagtcatcagggcgactatgccgtgctagcagctgaacctgaattgcaggtgggcattgacattatgaaaacaagcttcccaggtcgcggaagtatccctgagttctttcatattatgaagcgaaaattcacgaacaaggaatgggaaaccattcggtcattcaaggatgaatggacacagctagatatgttttaccggaattgggcacttaaggaatcttttattaaggcaatcggcgtcggcctcggatttgagttacagcgcctggaatttgacctaagccctctgaacttggatattggacaggtgtacaaagaaacccgccttttcttagacggcgaagaagagaaagaatgggcatttgaggagtccaaaatcgacgagcaccattttgtggcagtggcgctgagaaaaccagacggaagccgtcatcaggacgtccccagccaggatgattcaaagccaactcaacgacaattcaccattctgaactttaacgacttgatgagcagtgccgtccccatgacccccgaggacccctccttctgggactgtttttgcttcactgaggagattccgatcagaaacggtaccaaaagttag

SEQ ID NO: 186658 - DNA, 2955 bp, Artificial Sequence
  derived and/or modified sequence
atacaatgccgcaaagcgcagggctgatctccgtctccgcccccagctgctttctccgagaggaggtggctgagtcgggggcgggctgggagggctgtcggtgggccagtctgcgtagcgacggcccgtcccctgcgcacggacgccgggaagaagggggtggggccacgtttgcgtccgcgccatcaggcccgagatagcggcgaggtccgctttcagtgtatggttttccctgccaaacggttctgcttggtgccatccatggagggcgtgcgctgggccttttcctgcggcacttggctgccgagccgagccgaatggctgctggcagtgcgatcgattcagcccgaggagaaggagcgcattggccagttcgtctttgcccgggacgctaaggcagccatggctggtcgtctgatgataaggaaattagttgcagagaaattgaatatcccttggaatcatattcgtttgcaaagaactgcaaaaggaaaaccagttcttgcaaaggactcatcgaatccttacccgaatttcaactttaacatctctcatcaaggagactatgcagtgcttgctgctgaacctgagctgcaagttggaattgatataatgaagactagttttccaggtcgtggttcaattccagaattctttcatattatgaaaagaaagtttaccaacaaagaatgggaaacaatcagaagctttaaggatgagtggactcagctggatatgttttataggaattgggcacttaaggaaagcttcataaaagccattggtgttggactaggatttgaattgcagcggcttgaatttgatctatctccattaaacttggatataggccaagtttataaagaaacacgtttattcctggatggagaggaagaaaaagaatgggcatttgaggaaagcaaaatagatgagcaccattttgttgcagttgctcttaggaaacccgatggatctagacatcaggatgttccatctcaggatgattccaaaccaacccagaggcaatttactattctcaactttaatgatttaatgtcatctgccgttcccatgacacctgaagatccttcattttgggactgtttttgcttcacagaagaaattccaatacgaaatggtacaaagtcatgatgattccctgagtaacaaagggaaatgaaaactgtttgtgatcttccgtattcactgaaaaataaatgcttgtttagtatcaaattttatttcacgaaagtttttttaaagaacagaaacttttccaattaaaaaaaaaaagcagacttctggttcaagatagctcactggaatacatgtttacctctttctttcctaaattgcattgaattgataggaaggatggcggaatcttaaagtgatacatgctaactgtagaaaaaaatagaaaatgcacataagcaaaaggaaacatttaaatgctatctttcaaagataactactcttaaaaccttgagtatcttttcagacctttttcttggcaaatgaatccatattgacatatttgatttttttaaaaacatggaaacgtactgttttgtaaattctttttaactgcacatctactgttcataaatatacctctgtaacataactttttgtggttctaatgtactctgttgtatagctaatacaagttaggatgcttttggccagaggtaacagtgtccaaatataattggcctaagtaacctaggaaattgtttgacataacacagggttcaggggtgtcattaaagacacactttttttgccttgacctcagttggtttgttttgccttaggctattccacctctcgatcacaagagctgctgctataacttccagttttacatctttgtaaaattgtatctcaaaggcagaaaaggccatttcgtctctcatttgttttatccatgaggaagatttttaacaaaagcctccagaagatttcccctcagtttccattgacttagatcaggttacagagaaaggcaatgtctgacatttttggtctctgttagaagtagactctgttgaaaagaaagaagctaagctaggtgtgaagaatggaattggaagcccactgccttcccataagaaaggtttaccataatttactcacttttttctgtgttagacattttgattatctgcagtttattactacaagcagtggcagagtgaatgtccttgtacattttgagttacatgcttaattatgtccttgagaaagtttctaaaagtggaatgattggtttgactggttcatagggctttaattatacaatttacccctctaattagtactatatgtatgtgacttccctccccctgccagaatactccttggtcaattgtaggtattctttttggtttaatttttgccaatgtaattaaaaaatggtatgtcatttttaaaatttgtatttctttcattacaaataagattgttatgtcagtattgttattggcttttcgtattcctcttaacgtgaaccgtctgttcattgtttttacctgttttcgttttagcaagtagtacttaatttaaagtgtgaacttaatatataagatgccaggaccatcatattgatgacaaaaatctattatgtggttgtagtgcatgtcttggagttaaactcttaagtatcaagaagtaaaataatttcattgtttctgttactaacattaaaagtgtgcaaattgtataaaattaggtacttcgattagtaaaagaaaaaaatttgaatgttttttttttttattttattaagcatgcccagttatgccaagcatagtaaataaaggtcaagtagcatttataatagaggaagtattgttatccctagcatgagtgtaatggtgatatgaaaaactttgtcttgtcattataataataaaaaaatgaacatttattatggaatttctatgagcctga

SEQ ID NO: 186659 - DNA, 930 bp, Artificial Sequence
  derived and/or modified sequence
atggtgttccccgccaagagattctgcctggtgcccagcatggagggcgtgagatgggccttcagctgcggcacctggctgcccagcagagccgagtggctgctggccgtgagaagcatccagcccgaggagaaggagagaatcggccagttcgtgttcgccagagacgccaaggccgccatggccggcagactgatgatcagaaagctggtggccgagaagctgaacatcccctggaaccacatcagactgcagagaaccgccaagggcaagcccgtgctggccaaggacagcagcaacccctaccccaacttcaacttcaacatcagccaccagggcgactacgccgtgctggccgccgagcccgagctgcaggtgggcatcgacatcatgaagaccagcttccccggcagaggcagcatccccgagttcttccacatcatgaagagaaagttcaccaacaaggagtgggagaccatcagaagcttcaaggacgagtggacccagctggacatgttctacagaaactgggccctgaaggagagcttcatcaaggccatcggcgtgggcctgggcttcgagctgcagagactggagttcgacctgagccccctgaacctggacatcggccaggtgtacaaggagaccagactgttcctggacggcgaggaggagaaggagtgggccttcgaggagagcaagatcgacgagcaccacttcgtggccgtggccctgagaaagcccgacggcagcagacaccaggacgtgcccagccaggacgacagcaagcccacccagagacagttcaccatcctgaacttcaacgacctgatgagcagcgccgtgcccatgacccccgaggaccccagcttctgggactgcttctgcttcaccgaggagatccccatcagaaacggcaccaagagctag

SEQ ID NO: 186660 - protein, 1720 aa, Artificial Sequence
  derived and/or modified sequence
MLISKNMPWRRLQGISFGMYSAEELKKLSVKSITNPRYLDSLGNPSANGLYDLALGPADSKEVCSTCVQDFSNCSGHLGHIELPLTVYNPLLFDKLYLLLRGSCLNCHMLTCPRAVIHLLLCQLRVLEVGALQAVYELERILNRFLEENPDPSASEIREELEQYTTEIVQNNLLGSQGAHVKNVCESKSKLIALFWKAHMNAKRCPHCKTGRSVVRKEHNSKLTITFPAMVHRTAGQKDSEPLGIEEAQIGKRGYLTPTSAREHLSALWKNEGFFLNYLFSGMDDDGMESRFNPSVFFLDFLVVPPSRYRPVSRLGDQMFTNGQTVNLQAVMKDVVLIRKLLALMAQEQKLPEEVATPTTDEEKDSLIAIDRSFLSTLPGQSLIDKLYNIWIRLQSHVNIVFDSEMDKLMMDKYPGIRQILEKKEGLFRKHMMGKRVDYAARSVICPDMYINTNEIGIPMVFATKLTYPQPVTPWNVQELRQAVINGPNVHPGASMVINEDGSRTALSAVDMTQREAVAKQLLTPATGAPKPQGTKIVCRHVKNGDILLLNRQPTLHRPSIQAHRARILPEEKVLRLHYANCKAYNADFDGDEMNAHFPQSELGRAEAYVLACTDQQYLVPKDGQPLAGLIQDHMVSGASMTTRGCFFTREHYMELVYRGLTDKVGRVKLLSPSILKPFPLWTGKQVVSTLLINIIPEDHIPLNLSGKAKITGKAWVKETPRSVPGFNPDSMCESQVIIREGELLCGVLDKAHYGSSAYGLVHCCYEIYGGETSGKVLTCLARLFTAYLQLYRGFTLGVEDILVKPKADVKRQRIIEESTHCGPQAVRAALNLPEAASYDEVRGKWQDAHLGKDQRDFNMIDLKFKEEVNHYSNEINKACMPFGLHRQFPENSLQMMVQSGAKGSTVNTMQISCLLGQIELEGRRPPLMASGKSLPCFEPYEFTPRAGGFVTGRFLTGIKPPEFFFHCMAGREGLVDTAVKTSRSGYLQRCIIKHLEGLVVQYDLTVRDSDGSVVQFLYGEDGLDIPKTQFLQPKQFPFLASNYEVIMKSQHLHEVLSRADPKKALHHFRAIKKWQSKHPNTLLRRGAFLSYSQKIQEAVKALKLESENRNGRSPGTQEMLRMWYELDEESRRKYQKKAAACPDPSLSVWRPDIYFASVSETFETKVDDYSQEWAAQTEKSYEKSELSLDRLRTLLQLKWQRSLCEPGEAVGLLAAQSIGEPSTQMTLNTFHFAGRGEMNVTLGIPRLREILMVASANIKTPMMSVPVLNTKKALKRVKSLKKQLTRVCLGEVLQKIDVQESFCMEEKQNKFQVYQLRFQFLPHAYYQQEKCLRPEDILRFMETRFFKLLMESIKKKNNKASAFRNVNTRRATQRDLDNAGELGRSRGEQEGDEEEEGHIVDAEAEEGDADASDAKRKEKQEEEVDYESEEEEEREGEENDDEDMQEERNPHREGARKTQEQDEEVGLGTEEDPSLPALLTQPRKPTHSQEPQGPEAMERRVQAVREIHPFIDDYQYDTEESLWCQVTVKLPLMKINFDMSSLVVSLAHGAVIYATKGITRCLLNETTNNKNEKELVLNTEGINLPELFKYAEVLDLRRLYSNDIHAIANTYGIEAALRVIEKEIKDVFAVYGIAVDPRHLSLVADYMCFEGVYKPLNRFGIRSNSSPLQQMTFETSFQFLKQATMLGSHDELRSPSACLVVGKVVRGGTGLFELKQPLR

SEQ ID NO: 186661 - protein, 1659 aa, Artificial Sequence
  derived and/or modified sequence
MLISKNMPWRRLQGISFGMYSAEELKKLSVKSITNPRYLDSLGNPSANGLYDLALGPADSKEVCSTCVQDFSNCSGHLGHIELPLTVYNPLLFDKLYLLLRGSCLNCHMLTCPRAVIHLLLCQLRVLEVGALQAVYELERILNRFLEENPDPSASEIREELEQYTTEIVQNNLLGSQGAHVKNVCESKSKLIALFWKAHMNAKRCPHCKTGRSVVRKEHNSKLTITFPAMVHRTAGQKDSEPLGIEEAQIGKRGYLTPTSAREHLSALWKNEGFFLNYLFSGMDDDGMESRFNPSVFFLDFLVVPPSRYRPVSRLGDQMFTNGQTVNLQAVMKDVVLIRKLLALMAQEQKLPEEVATPTTDEEKDSLIAIDRSFLSTLPGQSLIDKLYNIWIRLQSHVNIVFDSEMDKLMMDKYPGIRQILEKKEGLFRKHMMGKRVDYAARSVICPDMYINTNEIGIPMVFATKLTYPQPVTPWNVQELRQAVINGPNVHPGASMVINEDGSRTALSAVDMTQREAVAKQLLTPATGAPKPQGTKIVCRHVKNGDILLLNRQPTLHRPSIQAHRARILPEEKVLRLHYANCKAYNADFDGDEMNAHFPQSELGRAEAYVLACTDQQYLVPKDGQPLAGLIQDHMVSGASMTTRGCFFTREHYMELVYRGLTDKVGRVKLLSPSILKPFPLWTGKQVVSTLLINIIPEDHIPLNLSGKAKITGKAWVKETPRSVPGFNPDSMCESQVIIREGELLCGVLDKAHYGSSAYGLVHCCYEIYGGETSGKVLTCLARLFTAYLQLYRGFTLGVEDILVKPKADVKRQRIIEESTHCGPQAVRAALNLPEAASYDEVRGKWQDAHLGKDQRDFNMIDLKFKEEVNHYSNEINKACMPFGLHRQFPENSLQMMVQSGAKGSTVNTMQISCLLGQIELEGRRPPLMASGKSLPCFEPYEFTPRAGGFVTGRFLTGIKPPEFFFHCMAGREGLVDTAVKTSRSGYLQRCIIKHLEGLVVQYDLTVRDSDGSVVQFLYGEDGLDIPKTQFLQPKQFPFLASNYEVIMKSQHLHEVLSRADPKKALHHFRAIKKWQSKHPNTLLRRGAFLSYSQKIQEAVKALKLESENRNGRSPGTQEMLRMWYELDEESRRKYQKKAAACPDPSLSVWRPDIYFASVSETFETKVDDYSQEWAAQTEKSYEKSELSLDRLRTLLQLKWQRSLCEPGEAVGLLAAQSIGEPSTQMTLNTFHFAGRGEMNVTLGIPRLREILMVASANIKTPMMSVPVLNTKKALKRVKSLKKQLTRVCLGEVLQKIDVQESFCMEEKQNKFQVYQLRFQFLPHAYYQQEKCLRPEDILRFMETRFFKLLMESIKKKNNKASAFRNVNTRRATQRDLDNAGELGRSRGEQEGDEEEEGHIVDAEAEEGDADASDAKRKEKQEEEVDYESEEEEEREGEENDDEDMQEERNPHREGARKTQEQDEEVTVKLPLMKINFDMSSLVVSLAHGAVIYATKGITRCLLNETTNNKNEKELVLNTEGINLPELFKYAEVLDLRRLYSNDIHAIANTYGIEAALRVIEKEIKDVFAVYGIAVDPRHLSLVADYMCFEGVYKPLNRFGIRSNSSPLQQMTFETSFQFLKQATMLGSHDELRSPSACLVVGKVVRGGTGLFELKQPLR

SEQ ID NO: 186662 - DNA, 5163 bp, Artificial Sequence
  derived and/or modified sequence
atgttgatttccaaaaacatgccctggagaaggcttcaaggcatatcctttggtatgtacagtgctgaagagctcaaaaaactatcggttaagagcatcacgaatcccaggtatctggacagtcttggtaacccttccgccaatgggctgtacgatctggcactgggacccgctgatagtaaggaagtctgctccacatgcgtacaggatttttcaaactgctctgggcacctcgggcacatcgagctcccccttacagtgtataacccattactcttcgataagctgtaccttctcctccgcggaagttgtttgaactgtcacatgctgacatgccctagagctgtgattcacctcctattgtgtcagcttcgggtgttggaggtaggggccctccaggctgtttacgagctagagcgcattctcaatcgctttttagaggagaacccggaccctagcgcatcagagatccgggaagagttggagcagtacaccaccgagattgtgcagaacaatctcttgggaagtcagggggcgcacgtgaaaaatgtgtgtgaatcaaaaagtaaactcatagcattattttggaaagcacatatgaacgccaagcggtgtccccattgcaaaactggccgctctgtcgtgcggaaggaacataattcgaagttgaccatcacctttcctgcgatggttcaccggaccgctggacagaaggactccgaacctctgggaatcgaagaggcccagatcggcaaacgcggctacttaacgcctacaagcgccagggaacatttgtcagccctctggaaaaacgaggggttcttcctcaactatttgttttccggaatggacgacgacgggatggaatcacggtttaaccccagcgtgtttttcctggattttcttgtggtccctccgtctagataccgaccagtgtcaagactcggagatcaaatgttcacaaacggacagactgtgaacctgcaagccgttatgaaggacgtagtgctaattcgtaaattactcgctctcatggcccaggaacagaaattgcccgaagaagttgccacgccaaccacggacgaagaaaaggattcattgatcgccattgaccgctcgtttttgtccacccttcccggtcagtcactcatcgacaagctgtataatatctggattcgcctccagtctcacgtcaacatagtcttcgattctgagatggataaactgatgatggacaaatatcccggtataaggcagattcttgaaaagaaagagggcctgtttaggaagcacatgatggggaaacgtgtcgattatgctgcacgaagcgttatttgtcccgacatgtacatcaacacaaacgagattggcattccgatggtcttcgctacaaagctgacttacccacagccagtgaccccttggaacgtccaggaactgcgtcaggccgtgattaacggaccaaacgtacaccctggggctagcatggtaatcaatgaggatggaagtcggaccgcactgagcgcggtcgatatgacacagcgcgaagctgtcgcaaagcagctgctcactcccgcaacaggggcccccaaaccacagggaaccaagatcgtctgtaggcacgtcaaaaatggagatatcttactgcttaatcgccaacctactctccacagacccagcatccaggctcaccgcgctcgaatcctgccggaagagaaggtgctaaggctgcattacgccaactgtaaagcttacaacgccgattttgatggcgatgagatgaacgcccatttcccccaatctgagttgggcagagctgaagcttacgtgctagcctgcaccgaccaacagtaccttgtgcccaaagatggtcagccactcgccgggctgattcaggaccatatggtttcaggcgccagcatgaccacgcggggttgtttttttaccagggagcactatatggagctggtttacagagggttaactgacaaggtgggaagagtaaaactgctatctcccagtattctgaaacctttcccgctgtggactggcaaacaggtagttagcaccctcttaatcaacattatccccgaagaccatatccccttgaacctctccggcaaagcgaagattacaggtaaagcttgggtgaaggagacgcccaggtcagtccccggtttcaaccccgattcaatgtgcgaatctcaagtcatcattcgggaaggggagctcctctgtggagtgctcgacaaagcgcactacggttcttccgcgtacggtttggtgcactgctgttatgagatatatggaggtgagacctccggcaaagtccttacgtgtctagctcgcttgtttacagcttacttacagttgtatcggggcttcaccctgggggtcgaggacatcttggtgaaacccaaagccgatgtgaagaggcaacgcatcatagaggaatcaacacactgcgggcctcaggctgttagagccgcactgaacctgcctgaagctgcttcttatgatgaagtgcgggggaagtggcaggacgcccacctggggaaagaccagagggactttaatatgattgacctgaagttcaaggaggaagtgaatcattattcaaacgaaatcaataaggcatgcatgccgttcggcctgcaccgccaatttccagagaactcactgcagatgatggtgcagagcggagcaaagggttcaaccgtcaatactatgcagattagctgcctgttgggccaaatagagctcgaaggtagaaggccaccactcatggctagcggcaaatcactgccgtgtttcgagccatatgagtttactcctagggcaggaggcttcgttaccggcagattcttaacaggcataaaacctcccgaatttttctttcactgtatggcggggagggaggggctcgtcgatactgcggttaagactagtaggagcggctatcttcagagatgtataataaagcacctggagggcctcgtggtccaatacgatttgaccgtccgagacagcgacggcagtgttgttcagttcctttatggcgaagacgggctcgatatcccaaaaactcagtttctccagccgaagcagtttccattcctggcaagcaactacgaagtgattatgaagtcacagcatttgcacgaggtcttatctcgggccgaccctaagaaggccttgcaccatttccgggctatcaaaaagtggcaatcaaagcacccaaacaccttgcttcgccgaggtgccttcctgagttacagccagaagattcaggaggcagtgaaagccttgaagctcgagagcgagaatcgcaatggaaggagtcctggtacgcaggaaatgctgagaatgtggtatgaacttgacgaggagagtagaaggaaataccagaaaaaagctgcagcctgtccagacccctccctctccgtttggcggcctgacatctacttcgccagcgtgtcagaaacgttcgagacaaaggttgatgactacagccaagaatgggctgctcagactgagaagtcatacgaaaagtcggagctgagcttagaccggcttagaaccctgttacagttgaaatggcaacggtccctgtgcgagcccggagaagcggtcggcctcctggctgcgcagagcatcggcgaaccttccactcagatgactctcaatacgttccattttgcgggccgcggcgagatgaacgttacactcggaattccgcgcttgagggagattctcatggttgcatcggccaatatcaaaacacccatgatgagcgtgcccgttctcaatacaaagaaggcgctgaaaagagtgaaatctttgaagaagcagcttacaagggtctgtctgggtgaagtcctgcagaaaatagacgttcaggagtctttctgtatggaagaaaaacagaacaagttccaggtttaccagctccgattccagttcctgccccatgcttactaccagcaggagaagtgccttaggcccgaagacatactccggtttatggaaactcgtttttttaaactcttgatggaaagtatcaagaagaagaataataaagccagcgccttccggaacgtgaacacccgccgtgcaacacagcgtgacctggacaatgccggcgagctgggtcgctcacggggtgaacaagagggagatgaggaagaggaaggccatatcgtggatgccgaagccgaggagggagacgccgacgcttccgatgcaaagaggaaggaaaagcaagaggaagaagttgattacgagagtgaagaagaggaggaaagggagggtgaagaaaatgacgacgaagacatgcaagaggaacgtaatccgcatcgtgagggcgcccgcaaaacacaggaacaagacgaagaagtgggactcgggaccgaggaagatcctagcctgcccgccctcttaacccagccgagaaaacctacacatagccaggaacctcaagggcctgaggctatggagcggagagtgcaggcggttagggagattcacccattcatcgatgattaccagtatgatacagaggagagcctctggtgtcaagtcactgtgaagcttcccctgatgaaaatcaacttcgacatgtctagcttggtggtctctcttgctcatggagctgtgatttatgcgacaaagggcatcacgcgttgcctgctcaatgaaaccactaataacaaaaacgaaaaagagctggtcctcaacaccgagggaataaatctgccagaacttttcaagtacgcagaggtcttagacttaaggcgcttatattcaaacgacatccacgcaatcgccaacacttacggaatagaggctgctctgagagtgatcgaaaaggaaatcaaagacgtcttcgcggtgtatgggattgccgtcgacccaaggcacctcagcctggttgccgattatatgtgcttcgaaggcgtctacaagcccctaaatagattcggcatccgctctaatagcagccccctgcagcagatgacattcgaaacttcatttcaatttttaaagcaggctaccatgctcggctctcacgatgagttacgaagtccctccgcttgcctcgtagtgggcaaagtagtcagaggtgggacaggtctatttgagttaaaacagccactacggtag

SEQ ID NO: 186663 - DNA, 4980 bp, Artificial Sequence
  derived and/or modified sequence
atgctcatcagtaaaaacatgccttggcggcgcctccaggggatcagctttggcatgtacagcgccgaggagctcaagaaactgagcgtcaaatctattacaaatcccagatatctcgattccctcggcaatccttccgctaacggtttatacgacctggccctgggtcccgcagatagcaaagaagtctgcagcacatgcgtacaggatttcagtaattgtagcggtcacctgggccacattgaactgcccctcacggtatacaatcccctccttttcgataaactctacttactccttagaggatcgtgtctgaattgtcatatgctgacttgtccccgagccgtgatccaccttctcttgtgccaactccgagtgctggaagttggcgccctgcaggccgtgtacgaactggaacggatcctgaatcggttcctcgaagaaaatcccgatccttccgcctcagagattcgagaggaactggagcagtatactacagaaatagtccagaacaacctgcttggctcacagggggctcatgtcaaaaacgtgtgcgagtcaaaaagcaagctgatcgcacttttctggaaggcccatatgaacgctaaacgctgcccccactgcaagactgggcgaagtgttgtgaggaaggagcataatagtaagctgactatcaccttccccgcaatggtccacaggactgccggtcaaaaagatagcgagcccctgggtatcgaggaggctcagattggtaagcgaggctatcttacacctacctctgcgcgggagcacctgtccgccctgtggaagaatgaggggtttttcctgaattatctgttctctggtatggacgacgatgggatggagtcgagatttaacccatcagtcttttttttggatttcctcgttgtccccccaagtaggtatagacccgtctcccgtctgggtgaccagatgttcaccaatgggcagactgtgaatttacaagccgtcatgaaagatgtcgttctcatccgaaagcttctggcccttatggctcaggagcagaagctgcctgaggaggtcgccacgccaactacagatgaggagaaagactccctcattgctattgataggtctttcttgtctactctgcccgggcagtctctcatcgataagctgtataacatctggatccggctgcagtcccacgtgaatatcgtgttcgacagtgagatggataaactcatgatggataagtaccctggaatcagacagatcttggagaagaaggagggcctctttaggaagcacatgatgggcaagcgagtggattatgccgccaggtccgtaatctgtcctgatatgtacataaacaccaacgaaatcggtatcccaatggtgttcgcgacaaagctgacttatccccagccagttaccccttggaacgtacaggagctgcggcaggctgtgattaacggcccaaacgtgcacccgggggcttccatggtgatcaatgaggatggcagcagaaccgctctatccgccgttgacatgacacaaagggaggccgtggcaaaacaactattgacgccagccaccggcgcacccaagcctcagggcaccaagatcgtgtgtaggcatgtcaagaacggagatatcctattgctgaatcggcagcccactctacataggccttctattcaggcacacagggcaagaattttgcccgaggaaaaggttctgcgccttcattacgccaattgtaaggcttataacgccgattttgacggcgatgagatgaatgcccacttcccacagtccgagctgggaagggcggaggcttatgtgcttgcctgcacagaccagcaatacctggtccctaaggacgggcagcctctggccggactgattcaggaccacatggtttccggagcaagcatgaccaccagaggatgctttttcactagggagcactatatggagctcgtgtatcgtgggctcacggacaaggttggcagagtcaagctgctctcacctagcatcctgaagccctttccactgtggacagggaaacaggttgtaagtactctattgattaatataattccagaggatcacatcccacttaatttgtccgggaaagcgaagattactggaaaggcatgggtcaaggagactccacgctcagtccctggctttaatcccgattcaatgtgcgagagtcaagtgatcattcgtgaaggggaactgctctgtggtgtcctcgacaaagcccactatgggagttcggcctacgggttggtgcactgctgctacgagatctacggaggggagacaagtggaaaggtgttaacctgcctcgctcgcctgtttactgcgtacctgcaactgtaccgaggctttacgttgggtgtggaagacatactggtaaagccgaaggccgacgtgaagcgccagagaattatagaggaaagcacacactgtggcccgcaagccgtgagagccgccctgaatctccctgaagcggcgtcctacgacgaggtacgcggcaagtggcaggacgcccatcttggtaaggaccagcgagattttaatatgatcgatctgaaatttaaggaagaagtgaaccactacagtaatgaaatcaataaagcttgcatgccattcggcctacatagacagtttccggaaaacagcctgcagatgatggtgcaatcaggcgccaaggggtcaaccgtgaacacaatgcaaatctcatgtcttcttggacagatagaattagagggtcgcagacctccgctgatggcttcaggcaagtcattaccatgcttcgaaccctacgaatttactccaagagcaggtggtttcgtaactggccgtttcctcacaggcatcaagcctccagaatttttttttcattgcatggctgggcgggagggactggtagatacagctgtgaagacctctcgctcagggtacctccaaaggtgtatcatcaaacacctggaggggctggtggtgcaatacgacctaacagtgcgggactccgatgggtccgtcgttcagttcctctacggagaggacggcctcgatatcccaaagacacagtttctgcagcccaaacagtttccatttctggcgtcaaactacgaggtgatcatgaaatctcagcatctccacgaggtactatctcgggcggaccctaagaaggccctacatcactttcgggctatcaagaagtggcagtccaagcatcccaatacccttctccggcgaggagcctttttgagttactctcagaagatacaggaagctgtgaaagcattaaaactggaatcagaaaaccggaacgggcgaagtcctgggacccaggagatgctacgcatgtggtacgaattggacgaagagtctcgacgcaaatatcagaaaaaggcagccgcctgcccagatccctccctcagtgtctggaggcccgacatatacttcgcgagcgtgagtgagacattcgaaaccaaagttgacgattatagtcaggaatgggctgcacagaccgaaaaatcctatgagaaaagtgaactgagcctcgacaggttacggaccctgctacagttaaagtggcagagaagtttatgtgagcctggtgaggcagttgggctgctggctgcacaaagcatcggagagcctagcacgcaaatgacactgaacacattccacttcgcaggacgcggggaaatgaacgtaaccctgggtattccccgtctcagagagattctgatggtcgccagcgccaatattaagacccccatgatgagtgtccctgtgctaaataccaagaaagctcttaagcgggtaaaatcccttaagaaacagctcacaagggtttgcctgggtgaagttctgcaaaaaatcgatgttcaggaatccttctgtatggaagagaagcagaataaattccaagtgtaccaactgagattccagttcttgccacacgcgtactaccaacaagaaaaatgtctgcggcccgaggacatcctccggtttatggagaccaggtttttcaaacttctaatggagtccattaaaaaaaagaacaacaaggcatccgctttcagaaacgtcaacacgcgtcgggccacccagagggaccttgacaatgcaggcgagctgggacgcagccggggggagcaagaaggggatgaagaggaggaagggcacatcgttgatgcagaggctgaggagggggacgccgacgccagtgacgccaagcgcaaggagaagcaggaagaggaagtggattacgagagcgaagaggaagaggagagggaaggcgaagaaaacgatgacgaggatatgcaggaggagcgcaatccgcaccgtgagggggcgcggaagactcaggaacaggacgaggaggtgacggtgaaacttcccctcatgaagattaacttcgacatgagttccctggtggtttcactggcacacggggctgtaatatacgccaccaagggaattacccggtgtctgctgaacgagaccactaataataaaaacgaaaaagaactcgtgctcaacactgagggcatcaatctccccgagcttttcaagtacgccgaggtgctagatttgaggagactgtacagcaacgacattcatgccatcgctaacacctatgggattgaggcggcactcagagtgattgaaaaggaaatcaaggacgtgttcgccgtatacggtattgcagtggatcctcgccacctttctttggtggcagattacatgtgcttcgaaggtgtgtacaaacctttgaaccggttcggaatacgcagtaattctagccctctacagcaaatgacttttgaaacgagctttcagttccttaagcaggctaccatgcttgggtcacatgacgagcttcgcagtcctagcgcctgtctggtggtggggaaagttgtgagaggaggcactggactttttgagttaaaacagcccctgagatag

SEQ ID NO: 186664 - DNA, 5163 bp, Artificial Sequence
  derived and/or modified sequence
atgctgatcagcaagaacatgccctggaggcggctgcagggcatcagctttggcatgtacagcgctgaggagctgaagaagctgtctgtgaagagcatcaccaacccccgctacctggacagcctgggcaaccccagcgccaacggcctgtatgacctggccctgggccctgctgacagcaaggaggtgtgcagcacctgtgtgcaggacttcagcaactgcagcggccacctgggccacatcgagctgcccctgactgtgtacaaccccctgctgtttgacaagctgtacctgctgctgcggggcagctgcctgaactgccacatgctgacctgccccagggctgtgatccacctgctgctgtgccagctgcgggtgctggaggtgggcgccctgcaggccgtgtatgagctggagcgcatcctgaaccgcttcctggaggagaacccagaccccagcgccagcgagatccgggaggagctggagcagtacaccacagagatcgtgcagaacaacctgctgggcagccagggcgcccacgtgaagaatgtgtgtgagagcaagagcaagctgattgccctcttctggaaggcccacatgaatgccaagcgctgcccccactgcaagacaggccgctctgtggtgaggaaggagcacaacagcaagctgaccatcaccttccctgccatggtgcacaggacagctggccagaaggacagcgagcccctgggcatcgaggaggcccagatcggcaagaggggctacctgacccccaccagcgcccgggagcacctgagcgccctgtggaagaatgaaggcttcttcctgaactacctgttcagcggcatggatgatgatggcatggagagccgcttcaaccccagcgtcttcttcctggacttcctggtggtgccccccagccgctacagacctgtgtcccggctgggggaccagatgttcaccaacggccagacagtgaacctgcaggccgtgatgaaggatgtggtgctgatcaggaagctgctggccctgatggcccaggagcagaagctgcctgaggaggtggccacccccaccacagatgaggagaaggacagcctcatcgccatcgaccgctccttcctgagcaccctgcccggccagagcctgattgacaagctgtacaacatctggatccggctgcagagccacgtgaacatcgtgtttgacagcgagatggacaagctgatgatggacaagtacccaggcatccggcagatcctggagaagaaggagggcctcttcaggaagcacatgatgggcaagagggtggactatgctgcccggagcgtcatctgcccagacatgtacatcaacaccaatgagatcggcatccccatggtgtttgccaccaagctgacctacccccagcctgtgaccccctggaatgtgcaggagctgcggcaggccgtcatcaatggccccaacgtgcaccctggggcctccatggtgatcaatgaagatggcagcaggacagccctgtctgctgtggacatgacccagcgggaggccgtggccaagcagctgctgaccccagccactggagcccccaagccccagggcaccaagatcgtgtgcagacatgtgaagaatggagacatcctgctgctgaaccggcagcccaccctgcaccggcccagcatccaggcccaccgggcccgcatcctgcctgaggagaaggtgctgcggctgcactacgccaactgcaaggcctacaatgctgactttgatggagatgagatgaatgcccacttcccccagagcgagctgggccgggcagaggcctacgtgctggcctgcacagaccagcagtacctggtgcccaaggatggccagcccctggccggcctcatccaggaccacatggtgtctggggcctccatgaccacccggggctgcttcttcacccgggagcactacatggagctggtgtaccggggcctgacagacaaggtgggccgggtgaagctgctgagccccagcatcctgaagcccttccccctgtggacaggcaagcaggtggtgtccaccctgctgatcaacatcatccctgaggaccacatccccctgaacctgagcggcaaggccaagatcaccgggaaggcctgggtgaaggagacccccaggtctgtgcccggcttcaacccagacagcatgtgtgagagccaggtgatcatccgggagggggagctgctgtgtggggtgctggacaaggcccactacggcagcagcgcctacggcctggtgcactgctgctatgagatctatggaggagagaccagcggcaaggtgctgacctgcctggcccggctcttcaccgcctacctgcagctgtaccggggcttcaccctgggcgtggaggacatcctggtgaagcccaaggcagatgtgaagaggcagaggatcatcgaggagagcacccactgcggcccccaggccgtgcgggccgccctgaacctgcctgaggccgccagctatgatgaggtgcggggcaagtggcaggatgcccacctgggcaaggaccagagggacttcaacatgattgacctgaagttcaaggaggaggtgaaccactacagcaatgagatcaacaaggcctgcatgcccttcggcctgcaccggcagtttcctgagaacagcctgcagatgatggtgcagagcggggccaagggcagcacagtgaacaccatgcagatcagctgcctgctgggccagatcgagctggagggccggcggccccccctgatggccagcggcaagagcctgccctgctttgagccctatgagttcacccccagggctgggggctttgtgacaggccgcttcctgaccggcatcaagcccccagagttcttcttccactgcatggccggccgggagggcctggtggacacagctgtgaagaccagccgcagcggctacctgcagcgctgcatcatcaagcacctggagggcctggtggtgcagtatgacctgactgtgcgggacagtgatggctctgtggtgcagttcctgtatggagaagatggcctggacatccccaagacccagttcctgcagcccaagcagttccccttcctggccagcaactatgaggtgatcatgaagagccagcacctgcacgaggtgctgagcagagctgaccccaagaaggccctgcaccacttccgggccatcaagaagtggcagagcaagcaccccaacaccctgctgcggcggggggccttcctgagctacagccagaagatccaggaggccgtgaaggccctgaagctggagagcgagaacagaaatggccgcagccctggcacccaggagatgctgaggatgtggtatgagctggatgaggagagcaggaggaagtaccagaagaaggccgccgcctgcccagaccccagcctgtctgtgtggaggccagacatctactttgcctctgtgtctgagacctttgagaccaaggtggatgactacagccaggagtgggccgcccagacagagaagagctatgagaagtctgagctgagcctggaccggctgcggaccctgctgcagctgaagtggcagaggagcctgtgtgagcctggagaggccgtgggcctgctggccgcccagagcattggagagcccagcacccagatgaccctgaacaccttccactttgctggccgcggggagatgaatgtgaccctgggcatcccccggctgcgggagatcctgatggtggccagcgccaacatcaagacccccatgatgtctgtgcctgtgctgaacaccaagaaggccctgaagagggtgaagagcctgaagaagcagctgaccagggtgtgcctgggggaggtgctgcagaagattgatgtgcaggagagcttctgcatggaggagaagcagaacaagttccaggtgtaccagctgcgcttccagttcctgccccacgcctactaccagcaggagaagtgcctgcggcctgaggacatcctgcgcttcatggagacccgcttcttcaagctgctgatggagagcatcaagaagaagaacaacaaggccagcgccttcagaaatgtgaacacccggcgggccacccagagggacctggacaatgctggggagctgggccgcagcagaggagagcaggagggagatgaggaggaggagggccacatcgtggatgctgaggccgaggagggagatgctgatgccagtgatgccaagaggaaggagaagcaggaggaggaggtggactatgaaagtgaggaggaggaggagcgggagggggaggagaatgatgatgaggacatgcaggaggagaggaacccccaccgggagggcgccaggaagacccaggagcaggatgaggaggtgggcctgggcacagaggaggaccccagcctgcctgccctgctgacccagcccaggaagcccacccacagccaggagccccagggccctgaggccatggagcggcgggtgcaggccgtgcgggagatccaccccttcattgatgactaccagtatgacacagaggagagcctgtggtgccaggtgacagtgaagctgcccctgatgaagatcaactttgacatgagcagcctggtggtgtccctggcccatggagctgtgatctatgccaccaagggcatcacccgctgcctgctgaatgagaccaccaacaacaagaatgagaaggagctggtgctgaacacagagggcatcaacctgcctgagctgttcaagtatgcagaggtgctggacctgcggcggctgtacagcaatgacatccacgccatcgccaacacctacggcatcgaggccgccctgcgggtgattgagaaggagatcaaggatgtgtttgctgtgtatggaattgctgtggaccccaggcacctgagcctggtggccgactacatgtgctttgagggcgtgtacaagcccctgaaccgcttcggcatccgcagcaacagcagccccctgcagcagatgacctttgagaccagcttccagttcctgaagcaggccaccatgctgggcagccatgatgagctgcggagccccagcgcctgcctggtggtgggcaaggtggtgcggggcggcaccggcctgtttgagctgaagcagcccctgaggtag

SEQ ID NO: 186665 - DNA, 4980 bp, Artificial Sequence
  derived and/or modified sequence
atgctgatcagcaagaacatgccctggaggcggctgcagggcatcagctttggcatgtacagcgctgaggagctgaagaagctgtctgtgaagagcatcaccaacccccgctacctggacagcctgggcaaccccagcgccaacggcctgtatgacctggccctgggccctgctgacagcaaggaggtgtgcagcacctgtgtgcaggacttcagcaactgcagcggccacctgggccacatcgagctgcccctgactgtgtacaaccccctgctgtttgacaagctgtacctgctgctgcggggcagctgcctgaactgccacatgctgacctgccccagggctgtgatccacctgctgctgtgccagctgcgggtgctggaggtgggcgccctgcaggccgtgtatgagctggagcgcatcctgaaccgcttcctggaggagaacccagaccccagcgccagcgagatccgggaggagctggagcagtacaccacagagatcgtgcagaacaacctgctgggcagccagggcgcccacgtgaagaatgtgtgtgagagcaagagcaagctgattgccctcttctggaaggcccacatgaatgccaagcgctgcccccactgcaagacaggccgctctgtggtgaggaaggagcacaacagcaagctgaccatcaccttccctgccatggtgcacaggacagctggccagaaggacagcgagcccctgggcatcgaggaggcccagatcggcaagaggggctacctgacccccaccagcgcccgggagcacctgagcgccctgtggaagaatgaaggcttcttcctgaactacctgttcagcggcatggatgatgatggcatggagagccgcttcaaccccagcgtcttcttcctggacttcctggtggtgccccccagccgctacagacctgtgtcccggctgggggaccagatgttcaccaacggccagacagtgaacctgcaggccgtgatgaaggatgtggtgctgatcaggaagctgctggccctgatggcccaggagcagaagctgcctgaggaggtggccacccccaccacagatgaggagaaggacagcctcatcgccatcgaccgctccttcctgagcaccctgcccggccagagcctgattgacaagctgtacaacatctggatccggctgcagagccacgtgaacatcgtgtttgacagcgagatggacaagctgatgatggacaagtacccaggcatccggcagatcctggagaagaaggagggcctcttcaggaagcacatgatgggcaagagggtggactatgctgcccggagcgtcatctgcccagacatgtacatcaacaccaatgagatcggcatccccatggtgtttgccaccaagctgacctacccccagcctgtgaccccctggaatgtgcaggagctgcggcaggccgtcatcaatggccccaacgtgcaccctggggcctccatggtgatcaatgaagatggcagcaggacagccctgtctgctgtggacatgacccagcgggaggccgtggccaagcagctgctgaccccagccactggagcccccaagccccagggcaccaagatcgtgtgcagacatgtgaagaatggagacatcctgctgctgaaccggcagcccaccctgcaccggcccagcatccaggcccaccgggcccgcatcctgcctgaggagaaggtgctgcggctgcactacgccaactgcaaggcctacaatgctgactttgatggagatgagatgaatgcccacttcccccagagcgagctgggccgggcagaggcctacgtgctggcctgcacagaccagcagtacctggtgcccaaggatggccagcccctggccggcctcatccaggaccacatggtgtctggggcctccatgaccacccggggctgcttcttcacccgggagcactacatggagctggtgtaccggggcctgacagacaaggtgggccgggtgaagctgctgagccccagcatcctgaagcccttccccctgtggacaggcaagcaggtggtgtccaccctgctgatcaacatcatccctgaggaccacatccccctgaacctgagcggcaaggccaagatcaccgggaaggcctgggtgaaggagacccccaggtctgtgcccggcttcaacccagacagcatgtgtgagagccaggtgatcatccgggagggggagctgctgtgtggggtgctggacaaggcccactacggcagcagcgcctacggcctggtgcactgctgctatgagatctatggaggagagaccagcggcaaggtgctgacctgcctggcccggctcttcaccgcctacctgcagctgtaccggggcttcaccctgggcgtggaggacatcctggtgaagcccaaggcagatgtgaagaggcagaggatcatcgaggagagcacccactgcggcccccaggccgtgcgggccgccctgaacctgcctgaggccgccagctatgatgaggtgcggggcaagtggcaggatgcccacctgggcaaggaccagagggacttcaacatgattgacctgaagttcaaggaggaggtgaaccactacagcaatgagatcaacaaggcctgcatgcccttcggcctgcaccggcagtttcctgagaacagcctgcagatgatggtgcagagcggggccaagggcagcacagtgaacaccatgcagatcagctgcctgctgggccagatcgagctggagggccggcggccccccctgatggccagcggcaagagcctgccctgctttgagccctatgagttcacccccagggctgggggctttgtgacaggccgcttcctgaccggcatcaagcccccagagttcttcttccactgcatggccggccgggagggcctggtggacacagctgtgaagaccagccgcagcggctacctgcagcgctgcatcatcaagcacctggagggcctggtggtgcagtatgacctgactgtgcgggacagtgatggctctgtggtgcagttcctgtatggagaagatggcctggacatccccaagacccagttcctgcagcccaagcagttccccttcctggccagcaactatgaggtgatcatgaagagccagcacctgcacgaggtgctgagcagagctgaccccaagaaggccctgcaccacttccgggccatcaagaagtggcagagcaagcaccccaacaccctgctgcggcggggggccttcctgagctacagccagaagatccaggaggccgtgaaggccctgaagctggagagcgagaacagaaatggccgcagccctggcacccaggagatgctgaggatgtggtatgagctggatgaggagagcaggaggaagtaccagaagaaggccgccgcctgcccagaccccagcctgtctgtgtggaggccagacatctactttgcctctgtgtctgagacctttgagaccaaggtggatgactacagccaggagtgggccgcccagacagagaagagctatgagaagtctgagctgagcctggaccggctgcggaccctgctgcagctgaagtggcagaggagcctgtgtgagcctggagaggccgtgggcctgctggccgcccagagcattggagagcccagcacccagatgaccctgaacaccttccactttgctggccgcggggagatgaatgtgaccctgggcatcccccggctgcgggagatcctgatggtggccagcgccaacatcaagacccccatgatgtctgtgcctgtgctgaacaccaagaaggccctgaagagggtgaagagcctgaagaagcagctgaccagggtgtgcctgggggaggtgctgcagaagattgatgtgcaggagagcttctgcatggaggagaagcagaacaagttccaggtgtaccagctgcgcttccagttcctgccccacgcctactaccagcaggagaagtgcctgcggcctgaggacatcctgcgcttcatggagacccgcttcttcaagctgctgatggagagcatcaagaagaagaacaacaaggccagcgccttcagaaatgtgaacacccggcgggccacccagagggacctggacaatgctggggagctgggccgcagcagaggagagcaggagggagatgaggaggaggagggccacatcgtggatgctgaggccgaggagggagatgctgatgccagtgatgccaagaggaaggagaagcaggaggaggaggtggactatgaaagtgaggaggaggaggagcgggagggggaggagaatgatgatgaggacatgcaggaggagaggaacccccaccgggagggcgccaggaagacccaggagcaggatgaggaggtgacagtgaagctgcccctgatgaagatcaactttgacatgagcagcctggtggtgtccctggcccacggggccgtcatctatgccaccaagggcatcacccgctgcctgctgaatgagaccaccaacaacaagaatgagaaggagctggtgctgaacacagagggcatcaacctgcctgagctgttcaagtatgcagaggtgctggacctgcggcggctgtacagcaatgacatccacgccatcgccaacacctatggaattgaagctgccctgcgggtcatcgagaaggagatcaaggatgtgtttgctgtgtatggaattgctgtggaccccaggcacctgagcctggtggccgactacatgtgctttgaaggagtgtacaagcccctgaacagatttggcatccgcagcaacagcagccccctgcagcagatgacctttgagaccagcttccagttcctgaagcaggccaccatgctgggcagccatgatgagctgcggagccccagcgcctgcctggtggtgggcaaggtggtgcggggcggcaccggcctgtttgagctgaagcagcccctgaggtag

SEQ ID NO: 186666 - DNA, 6637 bp, Artificial Sequence
  derived and/or modified sequence
attggctgaagcggaagaagacgaaagcaatcataaaatgggaggttgcaagctcatggtttgaaagacttcgtcacggaagctaaaagctctatacacccgatttgcctcggaggaattttcctaaatgattattttgatgtcttatatatctttgattgttttcaaaacaaaagagcgagcagagagtcgtacaactatttgttccccccccatgtagaagtgatctcatccacgtaaatgtcgttcctgcgaccgcttccgcgcgcaagcgcacgttgaatcgcgtggtgactccgggcttgaggttgaattaagaatagtcaggtggtgagtggaacgtctcttggggtgtcggaattcaaaacggacctggaggatgttgatctccaagaacatgccctggcggcggctgcagggcatttccttcgggatgtattcggctgaagagctcaagaaattaagtgttaaatccattacgaaccctcgatacctggacagcctggggaacccatcggcaaacggcctgtacgatttagctttgggccctgcagattccaaagaggtgtgctccacctgcgtgcaggacttcagcaactgttctgggcacctgggccacattgagctcccactcacagtgtataaccctctcctcttcgataagctgtacctgctgcttcggggctcttgtttaaactgccacatgctgacttgtccccgggccgtgattcacctcttactctgccagctgagggttctggaagtcggggccctacaagcagtctacgagcttgagagaattctgaacaggtttctggaagaaaatcccgatccctctgcctctgaaattcgggaggaattagaacaatacacaactgaaattgtgcagaacaacctcctggggtcccagggcgcacatgtaaagaacgtgtgtgagagcaagagcaagctcattgctctcttctggaaggcacatatgaatgctaagcgctgtccccactgcaagaccgggcgatccgttgtccgaaaggaacacaacagcaagttgactatcacgtttccagccatggtgcacaggacagctggccagaaggactctgagcccctgggaattgaggaagctcagataggaaaacgaggatacttaacacccaccagtgcccgcgaacacctttctgccctgtggaagaatgaaggattctttctgaactaccttttttcgggaatggatgatgatggtatggaatccagattcaatcccagtgtgttctttctagatttcttggtggtgccgccctcaaggtatcgcccagtcagtcgcctaggagaccagatgtttactaatggccagacggtgaacttgcaggctgtcatgaaggatgtagttctgattcgaaaacttctggcattgatggcccaagaacagaagttgccagaggaagtggccacacccactacagatgaggaaaaagactctttgattgctattgaccgatcctttttgagtacacttccaggccagtccctcatagacaaactttacaacatttggattcgccttcagagccacgtcaatattgtgtttgatagcgagatggacaaactaatgatggacaagtacccaggcattaggcagatcctggagaagaaagaaggcctgttccgaaaacacatgatgggaaagcgagtggactacgctgcgcgctcagtcatctgcccagacatgtacatcaacaccaacgaaattggaattcccatggtgtttgccacaaaactgacctacccacagccagttaccccatggaatgttcaggaacttaggcaagcggtcatcaacggccctaatgtgcacccaggagcctccatggtcatcaatgaggacggcagccgcacagccctgagcgctgtggacatgacccagcgagaggccgtggccaagcagcttctgaccccagccacgggggcacctaagccccaggggacaaaaattgtgtgccggcatgtgaagaatggggacattctgctactgaaccgacagcccacactgcacagaccctccatccaggcccaccgtgcccgcatcctgcctgaagagaaagtgctgcggctccactatgccaactgcaaggcctataatgccgactttgatggagacgagatgaatgcccatttcccccagagtgagctgggccgggccgaggcctacgtcctggcctgcactgatcagcagtaccttgttcccaaggatggccaaccattggcgggactgatccaggatcacatggtttcaggggcaagcatgactactcggggttgctttttcacccgggagcactatatggagctggtgtaccgaggactcacggacaaagtggggcgcgtgaagctcctttctccttccatcctgaagccctttccgctgtggacaggaaaacaggttgtgtcaacgctgctcataaatataatcccagaggaccacatcccactgaacttatctggaaaggcgaaaatcactgggaaagcctgggtgaaggaaactcctcgatccgttcctggctttaaccctgactcgatgtgcgagtcccaggtgatcatcagggaaggggagctgctctgcggagtgctggacaaggcgcactatgggagctccgcctacggcctggtccactgctgctatgagatctatggaggcgagaccagcggcaaggttctaacctgcctggcccgcctcttcaccgcctacctgcagctctacagaggcttcaccttgggcgtggaagacattttggtgaagccaaaggcagatgtcaagaggcaacgtatcattgaagaatccacccactgcgggccccaggctgtcagggctgcattaaacctgccagaagccgcatcatatgatgaggtccgaggaaaatggcaggatgcccatctgggcaaggaccagagggattttaacatgattgatctgaagttcaaggaggaagtgaaccattacagcaatgagattaacaaggcatgcatgccttttggcctacacagacagttcccagagaacagcctgcagatgatggtgcagtcgggagccaaaggttcaactgtgaacacgatgcagatctcgtgcctgctgggccagattgaactggaaggtcggagacccccgctgatggcgtctggcaagtcactgccctgctttgagccttatgagttcacccccagggctggtggctttgtcactggcaggttcctcaccggcatcaaacctcctgagttcttcttccactgcatggcaggacgagagggcctggtggacactgctgtgaaaaccagccgctcaggctatctccaaaggtgcatcatcaagcacctagaggggctggtcgtgcagtatgatctcacggtccgtgacagtgacggcagtgtggtgcagttcctgtatggggaggatggcctggacatccccaagacacagttcctgcagcccaagcagttccccttcctggccagcaactacgaggtgataatgaaatcacagcatctccatgaagttttatccagagcagatcccaaaaaagctctccaccacttcagagctatcaaaaaatggcaaagcaagcaccccaacaccctgctgagaagaggcgccttcttgagttattcccagaaaattcaggaagctgtgaaagccctgaaacttgagagtgaaaaccgcaatggccgcagccctgggactcaggagatgctgaggatgtggtatgagttggatgaggaaagccgaaggaaataccagaagaaggcggccgcttgtcctgaccccagtctgtctgtctggcgtcctgacatctactttgcatcagtgtcagaaacatttgaaacaaaggttgatgactacagtcaagagtgggcagctcaaacagagaagagttatgagaaatcagagctttctctcgacaggttgaggaccttgctgcagctgaagtggcagcgctcactgtgtgagccgggcgaggctgtgggcctgctggctgcccagagcatcggagagccctccacccagatgaccctcaacaccttccactttgcaggcagaggcgagatgaacgtcaccctgggcattccaaggttgcgggagattctcatggtggccagcgccaacatcaagacacccatgatgagcgtgcccgtgctcaacaccaagaaagccctgaagagagtgaaaagcctgaagaagcaactcaccagggtgtgcttgggggaggtgttgcagaaaattgacgtccaggagtccttctgtatggaagaaaaacagaacaaattccaggtgtaccagctgcggtttcagttcctgccacatgcatattaccagcaggagaagtgcctgagacccgaggacatcctgcgcttcatggaaacaagattctttaaacttctgatggaatccatcaaaaagaagaataataaagcatcagctttcaggaacgtaaacactcgaagagctacacagcgggatctggacaacgctggggagttggggaggagtcggggagagcaggagggtgatgaggaagaggaggggcacattgtggatgctgaagctgaggagggggacgccgatgcctctgatgccaaacgcaaggagaagcaggaggaggaggttgattatgagagtgaggaagaggaggagagggagggcgaggagaacgacgatgaagacatgcaggaggaacgaaatccccacagggaaggtgctcgaaagacccaagagcaagatgaagaggtgggcttaggcactgaggaggacccgtcccttcccgccctcctgacgcagccccggaaacccacccacagccaggagccccaggggcccgaggccatggagcgccgggtccaggctgtgcgtgagatccacccgttcatagatgactaccagtacgacaccgaggagagcctgtggtgccaggtgacagtgaagctccctctgatgaagatcaactttgacatgagctccctggtagtatctttggcccatggtgccgtcatctatgcgaccaagggcatcactcggtgcctcctgaatgaaacaaccaacaataagaacgagaaggagcttgtgctaaacacagaaggaatcaacctcccagagctattcaagtatgcagaggtcctggatctgcgccgcctctactccaacgacatccacgccatagccaacacgtatggcattgaggccgcgctgcgggtgatcgagaaggagatcaaggatgtgtttgccgtgtatggcatcgcggtcgaccctcgccatctctccctggttgctgattatatgtgcttcgagggtgtttacaagccactgaatcgctttgggatccggtcaaactcttccccgctacagcagatgacatttgaaaccagcttccagtttctgaagcaagccaccatgctgggatcccacgatgagctgaggtctccttctgcctgccttgtggtcgggaaggtcgtcaggggcgggacaggcctgttcgagctcaagcagcctctgagatagcagctaccccggcaccatctgcccagctccaaggacccttggtgagggcgtggcccagcctgccttctgcatgagaggaccaggagactggaatccagggcagttccaagtgacagtacagagcacagcagcgaccttgggcctgaaagcagtgggcctctgagctgggccagcttcacctggaaagtgacagagttgctcatccttgcccctccctgtctctggatttttatcaaggtttaccaagtcttctgagtccccctgagatggctggggcctcacctgtgctgcaggaggcctctgtggcataacccctaaggagaagtcctgattcacgattcactgagaagaccaaggggaagccatgctttgctgctggggaccccaggcacctccagagtagggaagcggggttcttttgctgtgagtggccagggacaacagacaagattcctgggggctcccgatgagcaggaacgtggagcctgctgcccaaggcctgctccttccggctgctccagcccctgggggcagagtccacaaagagtccccatcaagacttcttccctgagtcaagtacagcgtagcatagtcctccacccacccaacctctctgcctggccagggtcctggccctgccactgtgtggcgaggtgtccttctagaccacatcagccccaaggctgggagcagtcgctccagggccgcagcagttcactcccacacatagaacccaggtcactgctggggcgattgaacaggttgcctggcttttctctgctgtcagtttggtgtggaggcctatgttctgccccatacaccccacaggccctgcttatgggaaggaacacaggcctccagcccagaggactgtgccgccctgttcttggccgtccacgtttcctctccctctagcaccagcaatacatttccctggcatggacagaaaagacagagaggacttatacaaaggctttgtaaaaccagaggctagcttctatctttgtctactgttatttcagctcagggcgggtaattaacatcattggaactagctattaggaaagaaaaaaaacttggttttttttacaacaa

SEQ ID NO: 186667 - DNA, 6454 bp, Artificial Sequence
  derived and/or modified sequence
attggctgaagcggaagaagacgaaagcaatcataaaatgggaggttgcaagctcatggtttgaaagacttcgtcacggaagctaaaagctctatacacccgatttgcctcggaggaattttcctaaatgattattttgatgtcttatatatctttgattgttttcaaaacaaaagagcgagcagagagtcgtacaactatttgttccccccccatgtagaagtgatctcatccacgtaaatgtcgttcctgcgaccgcttccgcgcgcaagcgcacgttgaatcgcgtggtgactccgggcttgaggttgaattaagaatagtcaggtggtgagtggaacgtctcttggggtgtcggaattcaaaacggacctggaggatgttgatctccaagaacatgccctggcggcggctgcagggcatttccttcgggatgtattcggctgaagagctcaagaaattaagtgttaaatccattacgaaccctcgatacctggacagcctggggaacccatcggcaaacggcctgtacgatttagctttgggccctgcagattccaaagaggtgtgctccacctgcgtgcaggacttcagcaactgttctgggcacctgggccacattgagctcccactcacagtgtataaccctctcctcttcgataagctgtacctgctgcttcggggctcttgtttaaactgccacatgctgacttgtccccgggccgtgattcacctcttactctgccagctgagggttctggaagtcggggccctacaagcagtctacgagcttgagagaattctgaacaggtttctggaagaaaatcccgatccctctgcctctgaaattcgggaggaattagaacaatacacaactgaaattgtgcagaacaacctcctggggtcccagggcgcacatgtaaagaacgtgtgtgagagcaagagcaagctcattgctctcttctggaaggcacatatgaatgctaagcgctgtccccactgcaagaccgggcgatccgttgtccgaaaggaacacaacagcaagttgactatcacgtttccagccatggtgcacaggacagctggccagaaggactctgagcccctgggaattgaggaagctcagataggaaaacgaggatacttaacacccaccagtgcccgcgaacacctttctgccctgtggaagaatgaaggattctttctgaactaccttttttcgggaatggatgatgatggtatggaatccagattcaatcccagtgtgttctttctagatttcttggtggtgccgccctcaaggtatcgcccagtcagtcgcctaggagaccagatgtttactaatggccagacggtgaacttgcaggctgtcatgaaggatgtagttctgattcgaaaacttctggcattgatggcccaagaacagaagttgccagaggaagtggccacacccactacagatgaggaaaaagactctttgattgctattgaccgatcctttttgagtacacttccaggccagtccctcatagacaaactttacaacatttggattcgccttcagagccacgtcaatattgtgtttgatagcgagatggacaaactaatgatggacaagtacccaggcattaggcagatcctggagaagaaagaaggcctgttccgaaaacacatgatgggaaagcgagtggactacgctgcgcgctcagtcatctgcccagacatgtacatcaacaccaacgaaattggaattcccatggtgtttgccacaaaactgacctacccacagccagttaccccatggaatgttcaggaacttaggcaagcggtcatcaacggccctaatgtgcacccaggagcctccatggtcatcaatgaggacggcagccgcacagccctgagcgctgtggacatgacccagcgagaggccgtggccaagcagcttctgaccccagccacgggggcacctaagccccaggggacaaaaattgtgtgccggcatgtgaagaatggggacattctgctactgaaccgacagcccacactgcacagaccctccatccaggcccaccgtgcccgcatcctgcctgaagagaaagtgctgcggctccactatgccaactgcaaggcctataatgccgactttgatggagacgagatgaatgcccatttcccccagagtgagctgggccgggccgaggcctacgtcctggcctgcactgatcagcagtaccttgttcccaaggatggccaaccattggcgggactgatccaggatcacatggtttcaggggcaagcatgactactcggggttgctttttcacccgggagcactatatggagctggtgtaccgaggactcacggacaaagtggggcgcgtgaagctcctttctccttccatcctgaagccctttccgctgtggacaggaaaacaggttgtgtcaacgctgctcataaatataatcccagaggaccacatcccactgaacttatctggaaaggcgaaaatcactgggaaagcctgggtgaaggaaactcctcgatccgttcctggctttaaccctgactcgatgtgcgagtcccaggtgatcatcagggaaggggagctgctctgcggagtgctggacaaggcgcactatgggagctccgcctacggcctggtccactgctgctatgagatctatggaggcgagaccagcggcaaggttctaacctgcctggcccgcctcttcaccgcctacctgcagctctacagaggcttcaccttgggcgtggaagacattttggtgaagccaaaggcagatgtcaagaggcaacgtatcattgaagaatccacccactgcgggccccaggctgtcagggctgcattaaacctgccagaagccgcatcatatgatgaggtccgaggaaaatggcaggatgcccatctgggcaaggaccagagggattttaacatgattgatctgaagttcaaggaggaagtgaaccattacagcaatgagattaacaaggcatgcatgccttttggcctacacagacagttcccagagaacagcctgcagatgatggtgcagtcgggagccaaaggttcaactgtgaacacgatgcagatctcgtgcctgctgggccagattgaactggaaggtcggagacccccgctgatggcgtctggcaagtcactgccctgctttgagccttatgagttcacccccagggctggtggctttgtcactggcaggttcctcaccggcatcaaacctcctgagttcttcttccactgcatggcaggacgagagggcctggtggacactgctgtgaaaaccagccgctcaggctatctccaaaggtgcatcatcaagcacctagaggggctggtcgtgcagtatgatctcacggtccgtgacagtgacggcagtgtggtgcagttcctgtatggggaggatggcctggacatccccaagacacagttcctgcagcccaagcagttccccttcctggccagcaactacgaggtgataatgaaatcacagcatctccatgaagttttatccagagcagatcccaaaaaagctctccaccacttcagagctatcaaaaaatggcaaagcaagcaccccaacaccctgctgagaagaggcgccttcttgagttattcccagaaaattcaggaagctgtgaaagccctgaaacttgagagtgaaaaccgcaatggccgcagccctgggactcaggagatgctgaggatgtggtatgagttggatgaggaaagccgaaggaaataccagaagaaggcggccgcttgtcctgaccccagtctgtctgtctggcgtcctgacatctactttgcatcagtgtcagaaacatttgaaacaaaggttgatgactacagtcaagagtgggcagctcaaacagagaagagttatgagaaatcagagctttctctcgacaggttgaggaccttgctgcagctgaagtggcagcgctcactgtgtgagccgggcgaggctgtgggcctgctggctgcccagagcatcggagagccctccacccagatgaccctcaacaccttccactttgcaggcagaggcgagatgaacgtcaccctgggcattccaaggttgcgggagattctcatggtggccagcgccaacatcaagacacccatgatgagcgtgcccgtgctcaacaccaagaaagccctgaagagagtgaaaagcctgaagaagcaactcaccagggtgtgcttgggggaggtgttgcagaaaattgacgtccaggagtccttctgtatggaagaaaaacagaacaaattccaggtgtaccagctgcggtttcagttcctgccacatgcatattaccagcaggagaagtgcctgagacccgaggacatcctgcgcttcatggaaacaagattctttaaacttctgatggaatccatcaaaaagaagaataataaagcatcagctttcaggaacgtaaacactcgaagagctacacagcgggatctggacaacgctggggagttggggaggagtcggggagagcaggagggtgatgaggaagaggaggggcacattgtggatgctgaagctgaggagggggacgccgatgcctctgatgccaaacgcaaggagaagcaggaggaggaggttgattatgagagtgaggaagaggaggagagggagggcgaggagaacgacgatgaagacatgcaggaggaacgaaatccccacagggaaggtgctcgaaagacccaagagcaagatgaagaggtgacagtgaagctccctctgatgaagatcaactttgacatgagctccctggtagtatctttggcccatggtgccgtcatctatgcgaccaagggcatcactcggtgcctcctgaatgaaacaaccaacaataagaacgagaaggagcttgtgctaaacacagaaggaatcaacctcccagagctattcaagtatgcagaggtcctggatctgcgccgcctctactccaacgacatccacgccatagccaacacgtatggcattgaggccgcgctgcgggtgatcgagaaggagatcaaggatgtgtttgccgtgtatggcatcgcggtcgaccctcgccatctctccctggttgctgattatatgtgcttcgagggtgtttacaagccactgaatcgctttgggatccggtcaaactcttccccgctacagcagatgacatttgaaaccagcttccagtttctgaagcaagccaccatgctgggatcccacgatgagctgaggtctccttctgcctgccttgtggtcgggaaggtcgtcaggggcgggacaggcctgttcgagctcaagcagcctctgagatagcagctaccccggcaccatctgcccagctccaaggacccttggtgagggcgtggcccagcctgccttctgcatgagaggaccaggagactggaatccagggcagttccaagtgacagtacagagcacagcagcgaccttgggcctgaaagcagtgggcctctgagctgggccagcttcacctggaaagtgacagagttgctcatccttgcccctccctgtctctggatttttatcaaggtttaccaagtcttctgagtccccctgagatggctggggcctcacctgtgctgcaggaggcctctgtggcataacccctaaggagaagtcctgattcacgattcactgagaagaccaaggggaagccatgctttgctgctggggaccccaggcacctccagagtagggaagcggggttcttttgctgtgagtggccagggacaacagacaagattcctgggggctcccgatgagcaggaacgtggagcctgctgcccaaggcctgctccttccggctgctccagcccctgggggcagagtccacaaagagtccccatcaagacttcttccctgagtcaagtacagcgtagcatagtcctccacccacccaacctctctgcctggccagggtcctggccctgccactgtgtggcgaggtgtccttctagaccacatcagccccaaggctgggagcagtcgctccagggccgcagcagttcactcccacacatagaacccaggtcactgctggggcgattgaacaggttgcctggcttttctctgctgtcagtttggtgtggaggcctatgttctgccccatacaccccacaggccctgcttatgggaaggaacacaggcctccagcccagaggactgtgccgccctgttcttggccgtccacgtttcctctccctctagcaccagcaatacatttccctggcatggacagaaaagacagagaggacttatacaaaggctttgtaaaaccagaggctagcttctatctttgtctactgttatttcagctcagggcgggtaattaacatcattggaactagctattaggaaagaaaaaaaacttggttttttttacaacaa

SEQ ID NO: 186668 - DNA, 5163 bp, Artificial Sequence
  derived and/or modified sequence
atgctgatcagcaagaacatgccctggcggcggctgcagggcatctcatttggcatgtattcagcggaagaactcaaaaagcttagcgtgaagagtatcaccaatccacggtatctggattccctcggtaacccttcagcaaatggcctatatgaccttgcactaggtccagccgactctaaagaggtgtgctctacctgcgtgcaggacttttcgaattgtagtggccacctaggacatattgagttgcctctaaccgtgtataatcccctcctcttcgataagctctatctgcttctccgggggtcatgtctaaactgccacatgctgacatgtccccgtgctgttatacacctgctgctatgtcagcttagggtgctggaagtgggcgcattacaggctgtctacgaacttgagcgtatcctaaatcgttttttggaggagaatccggatccctcggctagcgagatccgcgaggagctcgagcaatatacaactgaaatagtgcagaataacctgcttggcagtcaaggagctcacgtcaagaacgtttgtgaatctaaatcgaaactaattgcactgttctggaaagctcatatgaacgccaagcggtgtccccactgcaaaaccggtcgtagcgtcgtcaggaaagagcacaatagcaagctaacgattacctttcctgccatggtgcatcgcacagccgggcagaaagattcagaaccactcggcatcgaagaggcgcagattggaaaacgaggctacttgactcctacttctgcgagggagcacctgagtgccctgtggaaaaacgaaggcttttttctgaactatttgtttagcggcatggacgacgacggaatggagtctaggttcaatccttccgtctttttccttgactttcttgttgtgcccccatctcggtaccgccctgttagccgactgggagaccaaatgttcacaaatggacagaccgtgaatcttcaggctgtgatgaaggacgtagtgctgatacgcaagctgctcgcccttatggctcaggagcagaagctccctgaggaagttgccacccccaccaccgatgaggaaaaggactcactaattgccatagacaggtcttttctttctactctgccaggccagagcctcattgacaaactgtataacatttggattcgcctgcagagccacgtcaatatcgtgtttgactccgagatggacaaactcatgatggacaagtaccccgggattaggcaaatcctggagaagaaagagggcctgttccgaaagcatatgatgggaaaaagggtggattatgccgcccgatcagtaatttgcccagatatgtatattaacacaaatgagatcggcatcccaatggtgttcgccacaaagctgacctatccacaaccagtgacaccctggaacgtccaagaacttaggcaagcagtgataaatggcccgaacgtgcatccgggagctagcatggttattaatgaagatgggagtcgaacagctctgtcggctgtcgatatgactcagagggaagccgtcgcaaagcagctgctgacgcctgctactggggcccccaagccgcagggaaccaagatcgtctgcaggcatgttaagaatggagatatactgctgctgaatcgtcaacccacgttacatcggccttccatccaggcccaccgggcccgcatcttaccagaagagaaagtacttcgattgcattatgcaaactgcaaagcctacaatgcagacttcgacggagatgagatgaacgcacactttcctcaaagcgaacttgggcgtgccgaggcctacgtcctggcttgcaccgaccaacaatacctggtgcctaaggacggccagccccttgcagggttgattcaggaccatatggtgtctggggctagcatgaccacacggggctgtttcttcacccgtgaacactacatggaactggtttatagaggcttgaccgacaaggtgggccgagtcaagttgttatctccttccattctgaaaccattccccctgtggaccggcaagcaagtcgtctctacacttttgattaacattatcccggaggaccatattccgttgaatctaagtgggaaagcaaaaattaccggcaaggcttgggtgaaagagacccccaggtcagtgccaggttttaaccctgactccatgtgcgaatcgcaggtgatcatccgggagggcgagctgttatgtggagtactggacaaggctcattatgggagcagcgcctacgggctggtccattgctgctatgaaatctacggtggcgagacttcagggaaggttttaacatgtttggctagacttttcaccgcgtacctccagttgtaccgcggctttacactcggggtggaagatattctggtgaagccaaaagccgacgttaagcgtcagcgcatcatcgaagagtcgacccattgtgggcctcaggcagtgagggctgcattgaatctcccggaagcggcttcctacgacgaggtgaggggcaagtggcaggatgcccacctcggaaaggaccagcgggatttcaatatgatcgatctgaaattcaaggaggaagtcaaccactatagcaacgaaatcaataaagcctgtatgccttttggcctccacagacaattccccgagaattctctgcaaatgatggtgcaatcgggggcaaaaggctcgacggttaatactatgcaaatcagctgcttgctgggtcagatagagctggaggggaggcggcctccgctgatggcttccggaaaatccctgccttgctttgaaccatacgagttcacgccaagggcaggtggcttcgtcacaggccgcttcttgacaggcattaagccgcctgagtttttcttccattgcatggcaggccgagagggtctggtggataccgccgtcaaaacctcacggtcggggtatctacagagatgcattatcaaacacttggaggggctggtggtgcagtacgacttaaccgtaagagacagtgatggatctgtcgttcaatttctgtacggcgaggacgggctcgatatcccaaagacacaatttctgcagcccaagcagtttccattccttgcttccaattatgaggttattatgaagtcacagcatctccatgaggtattgagcagggctgaccccaagaaggcgctccatcattttcgggctatcaagaaatggcagagcaaacatccaaatacattactgcggcgaggtgcctttctctcctattcacagaaaattcaggaagcggtgaaagccctgaaattggaatctgagaataggaacggaaggtccccagggactcaggaaatgctgcggatgtggtacgagctggatgaggagagcagaagaaaataccagaagaaagctgccgcctgtcccgacccctccttgtcggtgtggcgcccagacatctactttgcctcggttagcgagaccttcgagaccaaggtagacgactactctcaggaatgggcagcacagacagaaaagtcgtacgaaaagtccgagctttccctggataggctgagaacgctgctgcagctcaagtggcagagatctctttgtgaaccgggcgaggccgtgggcttactggcagcccagagcattggtgagcctagtacccagatgacactcaacacctttcatttcgccggacggggtgaaatgaacgtgacgctcggtattccacgtctccgcgaaattcttatggtcgcctccgccaacatcaaaactcctatgatgtcagtgcctgtcctgaatactaaaaaagccttaaaaagggtcaaatccttgaagaaacagctgacaagagtgtgcttgggtgaagtgctgcagaagattgacgtgcaggagtcattttgtatggaggagaaacaaaacaagtttcaggtgtaccaactccggtttcagtttcttccacacgcctactaccagcaggagaaatgtcttcgtcccgaggacattctgaggtttatggaaactagattctttaagctcctaatggagagcatcaaaaaaaagaacaacaaggcttccgcttttcggaatgtgaacactcgccgggctacacaaagagacctcgacaacgccggcgagctgggcaggtccagaggagagcaggagggggatgaagaggaagagggacacattgtagacgctgaagccgaggaaggcgacgcggacgcctcagatgcgaagcgcaaagagaaacaagaagaggaagtggattatgaaagtgaggaggaggaggaacgggagggggaggagaatgatgatgaggatatgcaagaggagcgaaatcctcaccgcgaaggcgccagaaaaactcaggagcaggatgaggaagtggggttgggcaccgaagaggaccccagcctacccgcactgttgactcagcccagaaagcccacacacagccaggaacctcaaggccccgaggccatggaaagaagggtccaggccgtgagagaaatccacccttttatcgatgattatcagtacgatacagaggaatcactatggtgtcaggtcaccgttaaacttccacttatgaaaataaattttgacatgtcctcacttgtggttagcctggctcacggcgctgttatttatgcgacaaaaggtattactcgatgtttgttgaatgagaccaccaacaacaaaaacgagaaagagcttgtgcttaataccgagggaattaatctgccagagctcttcaaatacgccgaagtattggacctgcgccgtttatattcaaacgatatacatgctattgctaacacatatggtatcgaagctgctctgagagtgattgaaaaggaaatcaaggacgtcttcgcagtatatggcattgcagtggaccccaggcacctgtcactggtagccgattacatgtgctttgaaggcgtctacaagcctctcaaccggtttggaatccgtagtaattccagccctttgcagcaaatgaccttcgaaacctcctttcagtttctaaaacaggctaccatgctcgggtcccacgatgagttaaggagcccaagcgcgtgcttagtggtggggaaagttgtgagaggaggaaccgggctgtttgaactcaagcagcccctgagatag

SEQ ID NO: 186669 - DNA, 4980 bp, Artificial Sequence
  derived and/or modified sequence
atgctgatcagcaagaacatgccctggcggcggctgcagggcatctcgttcggaatgtattccgctgaagagcttaagaagctcagtgtgaaatctatcacaaatccgagatatttagattctcttgggaaccctagtgccaatggactgtatgatcttgctctgggaccagcggactctaaggaggtgtgttctacctgtgtccaagatttttctaactgtagtggacacctgggccacattgaactacccctaactgtatacaacccattgcttttcgataaactgtatctgctcttgagaggatcttgtttaaactgccacatgcttacctgcccaagagctgtgattcatctgcttctatgccagctcagggtgctggaggtcggggctctccaggctgtgtatgagctggagagaatattgaaccggtttctcgaggagaatcccgacccgagcgcctcagagattcgggaggagttagagcagtataccaccgaaattgtgcaaaacaacctgcttggcagccagggtgctcacgtaaaaaacgtgtgtgagagcaagtctaaactgatagccctgttttggaaagcacacatgaatgcaaagcggtgccctcattgcaagaccggacgatccgtcgtgcgaaaagagcacaattccaaactgactataacatttcccgccatggtccatcggactgccggccagaaggatagtgagcccctcggaatagaggaagcacagatcggtaaacgtgggtacttgaccccaacttccgctcgagaacatctgtccgcattgtggaagaatgaggggtttttcctgaattatctctttagcggaatggacgatgacgggatggaaagtcgattcaatccttcagtcttctttctcgacttcttggttgtacccccaagccggtaccgccccgtctctcgcctgggggatcaaatgtttaccaatggacagaccgtgaatcttcaggccgtcatgaaagatgtggtgctgattcggaagctgctcgcactcatggctcaggaacagaaacttccggaagaggtggccacacccaccactgatgaggaaaaggactcactcatcgctattgatcgcagtttcctttctacacttccaggacagagtttgattgacaagttatacaatatctggatccgtctccagtcccacgtgaacatcgtgtttgattcagagatggacaagctcatgatggacaagtatccaggtattcggcagattttagaaaaaaaggaaggtctttttaggaagcacatgatgggaaagcgggtagattatgcggcccgctcggtgatttgccctgatatgtacataaataccaacgaaattggcatccctatggtctttgccacaaagctgacataccctcagcccgtcaccccttggaatgtacaggagctaagacaagcagtgatcaacgggcctaatgtccatcccggcgcatctatggtgattaacgaggacggcagtcggaccgctctgtctgcggtagatatgacccaacgggaggcagtcgctaaacaacttttaactccggccaccggtgctcccaaaccgcaggggaccaagatcgtgtgtagacacgtcaagaatggagatattctgcttctcaatcgccagcctacactacataggccctcaatacaggcccatcgggcaagaattctacccgaggagaaagtgttaaggctccattatgctaactgcaaagcatataacgcggacttcgacggtgatgagatgaatgcacacttcccccaatccgagctcggaagagcagaagcttacgtgctggcttgtacagaccaacaatatctcgtgcccaaagatgggcagccgctggctggccttatacaagaccatatggtatccggggcctcaatgacgaccagaggttgtttcttcacccgagagcattatatggagctcgtctaccgcggtctcaccgataaagtggggagagtgaagttgctgagcccttccatcctgaaaccctttcctctctggacaggcaaacaggttgtatcaacattattgatcaacataatccccgaagaccatattccacttaatctgtctgggaaagcgaagatcactggcaaggcctgggttaaggaaacccctcggtccgtccccgggtttaaccccgacagcatgtgcgagtcacaggttattatccgcgagggcgaacttctgtgcggggtccttgataaggctcattatgggtcaagcgcatatgggctggtgcactgttgttacgagatctatggaggggagaccagcggaaaggtgctgacttgtctcgctcgtctgtttacagcctacttgcagctgtaccgaggctttacgttgggtgtcgaagacatactggtcaagcccaaggccgacgtgaaacgccagaggataatagaagaatccacccactgtggcccacaggcggtccgtgccgccttaaacttaccagaagccgcgtcctatgacgaagtgagaggcaagtggcaggacgcccatttggggaaagatcaaagggacttcaatatgatagatctcaagtttaaggaggaagtcaaccactacagcaacgaaattaataaggcctgcatgcctttcggactccaccgccagttcccggagaattccttacagatgatggtccagtcaggagccaaagggtccacggtgaataccatgcagatttcatgcttactcggtcagattgagctagagggccgccgcccaccgctcatggccagtggcaagtccctaccttgtttcgagccatatgagttcaccccccgggccggcggctttgtgaccggacgcttcttgaccggtatcaagccgcccgagttcttcttccattgcatggctggaagggaggggctggtggatacagctgttaaaacctcacgatcagggtacctgcaacgctgtataatcaaacacttagaaggtctagtcgttcagtacgatctcactgtccgcgatagtgacggttctgtggttcagtttctgtacggcgaagacggactggacatacccaaaactcagtttttgcagccaaaacaattcccattccttgcctcaaattatgaagtgatcatgaaatctcagcatctgcatgaggtcctgtctagagctgatcctaaaaaggcactccatcacttcagggctataaagaaatggcagagcaagcacccaaacactctactgcggcggggtgcctttctatcttacagtcagaagattcaggaggccgttaaggcattgaaactcgagtctgaaaacaggaacggacgatccccagggacccaggagatgctgaggatgtggtacgagctagacgaggaatccaggcggaagtaccagaagaaagcagccgcctgtcctgacccctccctgagcgtgtggcggcctgatatttacttcgccagtgtgtccgaaacattcgaaacaaaagtggatgactattctcaggagtgggctgcccagactgaaaagtcctatgaaaagagtgagctgagcttagaccgccttagaactctgctccaactcaagtggcagcgcagcttatgcgagcctggggaggcagttggcctcctggccgcccaatctattggagagcccagtacccagatgactctgaacacatttcattttgccggccggggagagatgaacgtgacactcgggatccccagattgcgcgaaatcttgatggttgcatccgccaatatcaaaacgccaatgatgtccgtccccgtgctaaacacaaaaaaggccctgaagagagttaagagcctcaagaaacagctcaccagggtatgcctgggcgaggtcctgcagaaaatcgatgtacaggagagtttttgtatggaggaaaagcagaacaagtttcaggtttatcaacttcgctttcagttcctgccacacgcttattaccaacaggagaagtgcctgagaccagaagacatcctgaggtttatggaaactcgctttttcaaattactaatggaatccatcaaaaagaagaacaacaaagcatccgccttccgcaacgtgaatacgaggcgcgctacccagagagacctggacaatgctggagagctgggaaggtcacgcggggagcaggagggtgatgaagaagaggagggacacatcgtggacgctgaggctgaggaaggtgatgccgacgccagcgacgccaaacgcaaagagaaacaagaggaggaggtggactacgagtctgaagaggaggaggaacgcgaaggagaagaaaatgacgatgaggacatgcaggaagagcgcaatcctcacagagagggtgccagaaagacacaagagcaggatgaagaggtcaccgtcaaacttccgcttatgaagataaattttgatatgtcgagcctagtcgtgagtctagcccacggggcagtaatctatgccaccaagggcatcactaggtgcttgctcaatgagactacaaataacaaaaacgagaaggaactcgtcctgaacacagaagggattaacctccccgaactgtttaagtatgcggaggtgcttgacctgcggcgcttatactcgaacgacatacacgctattgcaaatacgtatggcatcgaagccgccctccgcgtgattgagaaagaaatcaaagacgtgttcgccgtctacgggattgcagtggatccgaggcatctgagcctggttgccgattacatgtgtttcgaaggagtctacaagcccttaaaccgcttcggaatccggagtaacagctctcccctccagcaaatgactttcgagacatcattccagtttttgaagcaggccaccatgttgggttctcacgacgaattaagaagtccaagcgcctgtctggtggtgggaaaagtggtgcgcggtgggactggcctcttcgagctgaagcagcccctgagatag

SEQ ID NO: 186670 - DNA, 5163 bp, Artificial Sequence
  derived and/or modified sequence
atgttaattagcaaaaacatgccatggcgtcgccttcagggaatcagcttcggtatgtacagcgctgaggagttgaagaaactgtccgtgaaatcaataaccaaccccaggtacctggacagtttggggaacccctccgccaatggcctctacgacctcgccctgggtccagccgacagtaaggaggtttgcagtacttgtgtccaagacttttccaattgttctggccatcttggacatatcgagctgccactgacggtatacaatccattgctgtttgataagctctatttactgttaagaggctcctgtctcaattgccacatgctcacgtgtccccgagccgtcatccacctgctgttgtgccaactaagggtcttggaagtgggcgctctgcaggccgtctatgagctcgagaggatcctgaaccgattcctggaagagaaccctgacccttccgcatctgagatcagagaggaactggagcagtacacaacagagatcgtccaaaataacctgttaggatcccagggagcgcacgtgaagaatgtctgcgaatctaaaagcaagctgatagcgctcttctggaaagctcacatgaacgccaagaggtgtcctcactgcaagaccggaagatctgtcgtgagaaaagagcataacagtaagttgactattacattcccagcaatggtgcacagaactgctggtcaaaaagattccgaacctttgggaattgaggaggcgcaaattggaaaacgcggttacctcactccaacaagcgcccgtgaacatctttcggccctgtggaagaacgaggggttctttctgaattacttgttctccggcatggacgacgatggcatggaatctcgcttcaaccccagcgtatttttcttggattttctggtggttccaccttcacgctatcgcccagtctctcgtctgggcgatcagatgtttactaatggacagaccgtcaaccttcaagcggtgatgaaggatgtggtccttatcagaaagctgctggcactcatggcccaggaacagaagctgcctgaagaagtggccaccccaacaacagacgaggagaaagactctttgatcgctatcgacaggtccttcctatcaacactgcccggacaatctcttatagacaaactttataatatctggattcggctccaatctcacgtgaacatcgtttttgactccgaaatggataaactcatgatggacaaataccctggaattaggcaaattttggagaaaaaggaagggctatttcggaagcacatgatgggaaaaagggtcgattatgcagccagatccgttatctgcccggacatgtatataaacaccaacgaaatcggaatcccaatggtatttgcaacaaagttgacttacccgcagcccgtaacgccgtggaatgttcaggagttgcggcaggctgttattaatggtcccaacgtccaccccggtgcgagtatggtaatcaatgaagacggaagcagaacagctctgagtgcagtggatatgacccagcgagaagccgtggctaagcagttattaaccccagcaacaggggcacccaagcctcagggtacaaaaatcgtgtgtcgacacgtcaaaaatggcgatatattgctgcttaacaggcagcctaccctgcacagaccgagtatccaggcccatcgagcacgcatcctccctgaagaaaaagtgttgagactgcactacgccaattgcaaagcctacaatgctgattttgacggcgacgaaatgaacgcccacttccctcaatctgaactaggtcgggcagaggcatatgtgctggcctgcacagatcagcaatatctggtgcccaaagacggtcagcctttggcaggcttgatacaagatcatatggtcagcggtgcctcaatgactacccgagggtgtttttttactcgggagcattacatggaactggtgtacagaggcttaactgacaaagtcggcagagtgaagctgctgtccccttccattctgaagcccttccccctgtggactggcaaacaggtggtatctaccttgttgataaatattataccagaagatcacatccccctgaaccttagtggtaaagccaaaatcacaggcaaagcgtgggtcaaggaaacacccagatctgtgcccggatttaacccggattctatgtgtgaaagtcaagtcatcatccgagaaggcgagctcctgtgtggcgttttggacaaagcccactatggaagctccgcctacggactggtgcactgttgttatgagatttacggaggcgagacttctggcaaggtcctaacatgtcttgctcggctatttacagcatatcttcagttgtacaggggctttaccctgggggtcgaagacattctggtcaaaccgaaggcagacgtcaaaaggcagcggatcatcgaagaaagcactcattgtggaccacaggccgttcgagcagctctgaacctcccagaggccgcaagctatgatgaggttcggggaaagtggcaagatgcacatctcggaaaggatcagcgcgacttcaacatgatcgaccttaaatttaaagaggaggtgaaccactattccaacgaaatcaataaggcatgcatgccctttggtctgcatagacagtttcccgagaattccctgcagatgatggttcagtcaggcgctaagggtagcaccgtgaatacgatgcagatttcatgtctgctgggacagattgaattggaaggccgtcggccacccctcatggccagtggcaaaagtctgccctgtttcgagccttatgagttcaccccgagagccggaggattcgtgacaggaagattcctgactggcattaagcctccagagttctttttccattgtatggctgggagggaaggtctagttgacactgccgtaaaaacctctagaagcggctacttgcaacggtgtatcattaaacacctcgaggggctggtggttcagtacgaccttaccgtgagggactccgacggctcagtagtgcagttcctgtacggtgaggacgggttagatattcctaagacccaatttctccagcccaagcagttcccatttttggccagcaattacgaagttattatgaagagccagcatctgcacgaagtgctgagtcgcgcagatcccaagaaagccctgcatcactttcgagcgattaagaagtggcaatcaaaacaccctaataccctgctgcggagaggggcattcttgagttactcccagaagattcaagaggccgtcaaggcactgaagcttgaatccgagaataggaatggcagaagcccaggaacccaggagatgttaagaatgtggtacgaactggatgaggagtcccgaaggaaatatcagaagaaagcggctgcatgccctgaccctagcctaagcgtttggagacctgacatttatttcgcctcagtgagcgagacatttgagacaaaggttgacgattactcccaagagtgggcagcccagaccgagaagagttatgaaaagtcagaacttagtcttgaccgactgaggactcttctccaattaaaatggcagcgctcactgtgcgagcctggagaagcggttggattgctagcagctcagtctattggagaaccatctacccagatgacactgaacactttccattttgctggaagaggcgaaatgaatgtgacccttgggattcccagactgcgcgagattctcatggtcgcatccgctaacatcaagactccaatgatgagtgtgcctgttctgaatacaaagaaagctctgaagcgcgtgaagagcctaaagaagcagctcacccgcgtctgcctcggcgaggtcctgcagaagattgatgttcaggaaagcttttgtatggaagaaaagcagaataaattccaggtgtaccagcttcgcttccaattcttgccacatgcatactaccagcaggagaagtgcctgcggccagaggatattctccgttttatggaaacccggttcttcaaacttctgatggaaagcattaaaaaaaagaacaataaagccagtgcctttagaaacgtgaatacgcgtagggctacacaacgtgacctcgataatgctggcgagctggggcgtagtcgtggcgaacaggaaggtgatgaggaggaggaaggtcatatcgtcgatgccgaagcagaggagggagacgctgacgccagcgatgctaaacgcaaggagaagcaggaggaggaggtcgattatgagtccgaagaagaggaggagcgtgaaggcgaagaaaacgacgacgaggatatgcaggaagagcgcaatccccaccgcgagggagctcgcaaaacgcaggagcaggacgaagaagttgggcttggaacagaggaggatccctccttaccagctctgctgacacagccccgtaagccaacgcacagccaagagccacagggacccgaagctatggagcggagggtgcaagccgtgagggaaattcaccctttcatcgatgattatcagtatgatacagaggagagtttgtggtgtcaggtgaccgtgaagctgcccctgatgaaaatcaacttcgacatgtcatcccttgtcgtgagcctcgcccacggagcagtaatctacgcaacgaagggtattacacggtgtttgctgaacgagacgacgaataataaaaatgaaaaggaactggtgcttaatacggagggaatcaacctccctgaactctttaagtatgccgaggtcctggatctgcggagactgtatagcaatgacattcacgccatcgccaacacctacgggatcgaggccgcattacgggtcatcgagaaggagatcaaggacgtcttcgctgtgtacgggatcgctgtcgaccccagacatctgtcattggtagccgattacatgtgttttgagggcgtgtataagcccttaaatcgattcggcatccgttctaattcatcccccctgcagcagatgaccttcgagacatctttccagttcctcaagcaggcgaccatgctaggttcacacgatgagctgagatccccgtctgcctgcttggtcgttgggaaggtggttaggggcggaactggcctcttcgagctgaaacagcccctgcggtag

SEQ ID NO: 186671 - DNA, 4979 bp, Artificial Sequence
  derived and/or modified sequence
atgctcattagcaaaaatatgccatggcgacggcttcaaggcatttcttttggcatgtacagcgcagaagagctgaaaaaactgagtgtgaaatctattactaacccgaggtacctggatagtctgggaaatccaagcgcaaatggcctgtatgatctggccctgggcccagccgactctaaagaagtatgcagcacatgcgttcaggactttagcaattgcagtggccatctcggacacattgagctcccgttgaccgtgtacaacccactcctatttgacaaactgtacctactcctgcgtggcagttgcctgaactgccatatgctcacctgccccagagctgtcatacatctattgctctgccaactacgggtgctggaggtgggggctctgcaggctgtgtatgagttggagcgcatcctgaacaggtttctcgaggagaatccagatcccagtgcttcagagatcagagaggaactggaacaatacacaacagaaattgtccagaacaaccttctgggcagtcaaggtgcccatgtgaaaaacgtatgcgagtccaagagtaaacttatcgcccttttttggaaggcccacatgaatgccaaaagatgtccacattgcaagaccgggcgatcggtggtcagaaaggagcacaacagcaaactgacgataacattcccagctatggttcaccgtaccgctggtcagaaagattctgagccgctggggatcgaggaggctcagatagggaagcgaggttaccttacacctaccagtgcgagggaacacctgagtgcattatggaagaacgaaggcttcttcttgaattatctcttctcaggaatggacgatgatgggatggaatccagatttaatccctccgttttttttttagactttttggtcgtgcccccttctagatacaggcctgtgagtaggctaggggaccagatgtttaccaacggacagacggtaaacttgcaggcggtgatgaaggacgttgtactgatccgaaagttgctggccttgatggcccaagaacagaagctgcccgaggaagttgccacgcccaccactgatgaggaaaaggatagtcttattgcaatcgatcgctctttcctgtctaccctgcctgggcagtctctgattgataagttgtacaacatttggatccgcttgcagtcccatgtcaatatagtcttcgattcagaaatggacaaactaatgatggacaagtatccaggcatacggcagatattggaaaaaaaagagggtctatttcggaagcacatgatggggaaaagggtagactacgcggctaggtcagtgatatgtccggatatgtatattaacaccaatgagatcggaatccccatggtattcgccaccaaattgacctacccacaacccgttactccctggaatgtacaggagctgagacaggctgttataaatggccctaacgtgcatcctggtgcctctatggtcatcaatgaagatggaagccgcaccgcactctctgcagtcgacatgacacaaagggaagccgtcgccaagcagctgctgacacctgcgacaggcgctcccaagccccagggcactaagatagtatgtcgccatgtaaagaacggagatatcctcctgctgaaccgtcagccaactctccatcgtccgagcatccaggcccatcgcgcaagaatcctccccgaagagaaggtgctgagactgcactatgctaactgcaaagcctacaatgccgatttcgacggtgatgagatgaacgcgcactttccacagtctgaactggggagagcagaggcttacgtattggcatgtaccgatcagcagtatctggtgccaaaggacggccagcctctagcaggactcattcaagaccacatggtctcaggggcttctatgaccacccgtggatgcttctttacaagagagcattatatggagctggtgtaccggggtctcacagataaagtgggccgtgtcaaattgctgtcccccagcattttaaaacctttcccactgtggactggtaagcaagttgtcagtacactccttatcaatatcattcccgaagatcacattccgctcaatctgtctgggaaagctaagatcaccggcaaagcctgggtcaaagaaacccccaggtccgtcccaggcttcaatcccgacagcatgtgtgagtcacaggtgattataagagagggtgagctcctgtgtggcgtcctggataaagcccattatggcagttctgcctacggcctggttcactgctgttacgaaatctatggaggagagacatccggcaaggtgctgacgtgcctagcccgactgttcaccgcgtatctgcagctgtacagaggcttcacgctgggagttgaggacattttggtaaagcccaaggcagacgtgaagagacagagaattattgaggagtctacacactgtggcccacaggcggtgagggcagcactgaacctgcccgaggcagcttcgtatgacgaggtccgaggtaagtggcaggatgcccacctgggcaaggaccagagggattttaacatgatagacctcaaattcaaggaggaagtcaaccattacagcaacgagattaataaggcgtgcatgccatttggtttacacagacagttccctgaaaattcgctccaaatgatggtgcagagtggcgcaaaagggagcacagtgaacacaatgcagatctcatgcctactcggccagatcgaactcgaggggagacggcctccgcttatggccagcgggaaatccctaccatgctttgagccgtatgagtttacgcccagggctgggggatttgtgaccggaaggttccttaccggcatcaaacctccagaatttttctttcactgtatggccggacgtgagggactggtcgatacagctgtcaagacgagccgcagcggctacctgcaacgctgtattattaagcacctggagggacttgtggtccagtatgacctaaccgtgcgagatagcgatgggagtgtggttcagtttctgtacggtgaagacggactggacatccctaaaacccagtttctccaacccaagcagtttcctttcctcgccagcaattacgaggtcattatgaagagtcaacacctccacgaggtcctctccagggccgaccctaagaaagcactgcatcatttccgggctattaagaagtggcagagcaagcaccccaacaccttgttgagaagaggcgcattcttgtcatactcccagaaaatacaggaggccgtgaaggccctgaaactagaatccgagaacagaaatggacgatccccaggtactcaggaaatgctgcggatgtggtacgagctggatgaggaaagcaggcgcaagtatcagaagaaagcagccgcttgtcctgatccatcacttagcgtctggcgccctgatatttacttcgcgtccgtctctgagactttcgaaacaaaggtggacgattactctcaggagtgggccgctcagaccgagaagtcatatgagaaatccgaactatccctggaccggcttcgtacattgctacagttgaaatggcagaggagtttgtgcgagcccggtgaagcagttggactgttggccgcacagtcaattggagagcccagtacacagatgactctgaataccttccatttcgccggacggggtgagatgaacgtaaccttaggcattccccgactgcgcgagatcctgatggtggccagtgccaacattaaaacccctatgatgtccgttcccgtcctgaataccaagaaggcactaaaacgggttaagagtctaaagaagcagctgacacgggtgtgcctaggggaagttcttcagaagattgatgtccaggagagcttttgtatggaggagaaacagaataaattccaagtgtaccaactccggtttcaatttctcccgcacgcatactaccagcaagagaaatgcttgcgccctgaggacattctgaggttcatggagacacggttctttaaactgctgatggagtctattaagaaaaaaaacaacaaagcctccgctttccggaacgtcaatacacggagagccacccagagggacctggacaacgccggtgagctcgggcgtagtcggggagagcaagagggggacgaagaagaggagggccacatagttgacgccgaagccgaggaaggagacgcagacgcctccgatgctaagaggaaagaaaagcaagaggaggaagtagactacgagagcgaggaggaggaagagcgcgagggggaagaaaacgatgatgaggacatgcaggaggaacgaaacccacatcgagagggggctagaaagacacaggagcaggatgaggaggtgacagttaaactccctttaatgaaaatcaattttgacatgtccagtttggtggtaagcctcgcacacggagctgtgatttatgccaccaagggaattactcgttgcctcctgaatgagacaacaaataataagaatgagaaggaactggtgctcaatacagaaggtatcaacctgcctgaactatttaaatatgccgaagtactcgacttgcgtcgtctttatagcaacgacatacatgccatcgctaacacctatggtattgaggccgcattgcgcgttatcgagaaggagattaaagatgtgttcgctgtttacggtattgcagtggaccctaggcatctgagcctagtcgcggattacatgtgctttgagggagtgtacaagcctttgaatcggttcggcattaggtctaactcatcacctttgcagcagatgacatttgagacaagctttcagttcctaaagcaggccactatgctcggaagtcatgatgaattacggtccccttcggcgtgcttggtggtaggcaaggttgtaagaggaggcacaggcctctttgagcttaaacagccactccggta

SEQ ID NO: 186672 - DNA, 5163 bp, Artificial Sequence
  derived and/or modified sequence
atgctgatcagcaagaacatgccctggagaagactgcagggcatcagcttcggcatgtacagcgccgaggagctgaagaagctgagcgtgaagagcatcaccaaccccagatacctggacagcctgggcaaccccagcgccaacggcctgtacgacctggccctgggccccgccgacagcaaggaggtgtgcagcacctgcgtgcaggacttcagcaactgcagcggccacctgggccacatcgagctgcccctgaccgtgtacaaccccctgctgttcgacaagctgtacctgctgctgagaggcagctgcctgaactgccacatgctgacctgccccagagccgtgatccacctgctgctgtgccagctgagagtgctggaggtgggcgccctgcaggccgtgtacgagctggagagaatcctgaacagattcctggaggagaaccccgaccccagcgccagcgagatcagagaggagctggagcagtacaccaccgagatcgtgcagaacaacctgctgggcagccagggcgcccacgtgaagaacgtgtgcgagagcaagagcaagctgatcgccctgttctggaaggcccacatgaacgccaagagatgcccccactgcaagaccggcagaagcgtggtgagaaaggagcacaacagcaagctgaccatcaccttccccgccatggtgcacagaaccgccggccagaaggacagcgagcccctgggcatcgaggaggcccagatcggcaagagaggctacctgacccccaccagcgccagagagcacctgagcgccctgtggaagaacgagggcttcttcctgaactacctgttcagcggcatggacgacgacggcatggagagcagattcaaccccagcgtgttcttcctggacttcctggtggtgccccccagcagatacagacccgtgagcagactgggcgaccagatgttcaccaacggccagaccgtgaacctgcaggccgtgatgaaggacgtggtgctgatcagaaagctgctggccctgatggcccaggagcagaagctgcccgaggaggtggccacccccaccaccgacgaggagaaggacagcctgatcgccatcgacagaagcttcctgagcaccctgcccggccagagcctgatcgacaagctgtacaacatctggatcagactgcagagccacgtgaacatcgtgttcgacagcgagatggacaagctgatgatggacaagtaccccggcatcagacagatcctggagaagaaggagggcctgttcagaaagcacatgatgggcaagagagtggactacgccgccagaagcgtgatctgccccgacatgtacatcaacaccaacgagatcggcatccccatggtgttcgccaccaagctgacctacccccagcccgtgaccccctggaacgtgcaggagctgagacaggccgtgatcaacggccccaacgtgcaccccggcgccagcatggtgatcaacgaggacggcagcagaaccgccctgagcgccgtggacatgacccagagagaggccgtggccaagcagctgctgacccccgccaccggcgcccccaagccccagggcaccaagatcgtgtgcagacacgtgaagaacggcgacatcctgctgctgaacagacagcccaccctgcacagacccagcatccaggcccacagagccagaatcctgcccgaggagaaggtgctgagactgcactacgccaactgcaaggcctacaacgccgacttcgacggcgacgagatgaacgcccacttcccccagagcgagctgggcagagccgaggcctacgtgctggcctgcaccgaccagcagtacctggtgcccaaggacggccagcccctggccggcctgatccaggaccacatggtgagcggcgccagcatgaccaccagaggctgcttcttcaccagagagcactacatggagctggtgtacagaggcctgaccgacaaggtgggcagagtgaagctgctgagccccagcatcctgaagcccttccccctgtggaccggcaagcaggtggtgagcaccctgctgatcaacatcatccccgaggaccacatccccctgaacctgagcggcaaggccaagatcaccggcaaggcctgggtgaaggagacccccagaagcgtgcccggcttcaaccccgacagcatgtgcgagagccaggtgatcatcagagagggcgagctgctgtgcggcgtgctggacaaggcccactacggcagcagcgcctacggcctggtgcactgctgctacgagatctacggcggcgagaccagcggcaaggtgctgacctgcctggccagactgttcaccgcctacctgcagctgtacagaggcttcaccctgggcgtggaggacatcctggtgaagcccaaggccgacgtgaagagacagagaatcatcgaggagagcacccactgcggcccccaggccgtgagagccgccctgaacctgcccgaggccgccagctacgacgaggtgagaggcaagtggcaggacgcccacctgggcaaggaccagagagacttcaacatgatcgacctgaagttcaaggaggaggtgaaccactacagcaacgagatcaacaaggcctgcatgcccttcggcctgcacagacagttccccgagaacagcctgcagatgatggtgcagagcggcgccaagggcagcaccgtgaacaccatgcagatcagctgcctgctgggccagatcgagctggagggcagaagaccccccctgatggccagcggcaagagcctgccctgcttcgagccctacgagttcacccccagagccggcggcttcgtgaccggcagattcctgaccggcatcaagccccccgagttcttcttccactgcatggccggcagagagggcctggtggacaccgccgtgaagaccagcagaagcggctacctgcagagatgcatcatcaagcacctggagggcctggtggtgcagtacgacctgaccgtgagagacagcgacggcagcgtggtgcagttcctgtacggcgaggacggcctggacatccccaagacccagttcctgcagcccaagcagttccccttcctggccagcaactacgaggtgatcatgaagagccagcacctgcacgaggtgctgagcagagccgaccccaagaaggccctgcaccacttcagagccatcaagaagtggcagagcaagcaccccaacaccctgctgagaagaggcgccttcctgagctacagccagaagatccaggaggccgtgaaggccctgaagctggagagcgagaacagaaacggcagaagccccggcacccaggagatgctgagaatgtggtacgagctggacgaggagagcagaagaaagtaccagaagaaggccgccgcctgccccgaccccagcctgagcgtgtggagacccgacatctacttcgccagcgtgagcgagaccttcgagaccaaggtggacgactacagccaggagtgggccgcccagaccgagaagagctacgagaagagcgagctgagcctggacagactgagaaccctgctgcagctgaagtggcagagaagcctgtgcgagcccggcgaggccgtgggcctgctggccgcccagagcatcggcgagcccagcacccagatgaccctgaacaccttccacttcgccggcagaggcgagatgaacgtgaccctgggcatccccagactgagagagatcctgatggtggccagcgccaacatcaagacccccatgatgagcgtgcccgtgctgaacaccaagaaggccctgaagagagtgaagagcctgaagaagcagctgaccagagtgtgcctgggcgaggtgctgcagaagatcgacgtgcaggagagcttctgcatggaggagaagcagaacaagttccaggtgtaccagctgagattccagttcctgccccacgcctactaccagcaggagaagtgcctgagacccgaggacatcctgagattcatggagaccagattcttcaagctgctgatggagagcatcaagaagaagaacaacaaggccagcgccttcagaaacgtgaacaccagaagagccacccagagagacctggacaacgccggcgagctgggcagaagcagaggcgagcaggagggcgacgaggaggaggagggccacatcgtggacgccgaggccgaggagggcgacgccgacgccagcgacgccaagagaaaggagaagcaggaggaggaggtggactacgagagcgaggaggaggaggagagagagggcgaggagaacgacgacgaggacatgcaggaggagagaaacccccacagagagggcgccagaaagacccaggagcaggacgaggaggtgggcctgggcaccgaggaggaccccagcctgcccgccctgctgacccagcccagaaagcccacccacagccaggagccccagggccccgaggccatggagagaagagtgcaggccgtgagagagatccaccccttcatcgacgactaccagtacgacaccgaggagagcctgtggtgccaggtgaccgtgaagctgcccctgatgaagatcaacttcgacatgagcagcctggtggtgagcctggcccacggcgccgtgatctacgccaccaagggcatcaccagatgcctgctgaacgagaccaccaacaacaagaacgagaaggagctggtgctgaacaccgagggcatcaacctgcccgagctgttcaagtacgccgaggtgctggacctgagaagactgtacagcaacgacatccacgccatcgccaacacctacggcatcgaggccgccctgagagtgatcgagaaggagatcaaggacgtgttcgccgtgtacggcatcgccgtggaccccagacacctgagcctggtggccgactacatgtgcttcgagggcgtgtacaagcccctgaacagattcggcatcagaagcaacagcagccccctgcagcagatgaccttcgagaccagcttccagttcctgaagcaggccaccatgctgggcagccacgacgagctgagaagccccagcgcctgcctggtggtgggcaaggtggtgagaggcggcaccggcctgttcgagctgaagcagcccctgagatag

SEQ ID NO: 186673 - DNA, 4980 bp, Artificial Sequence
  derived and/or modified sequence
atgctgatcagcaagaacatgccctggagaagactgcagggcatcagcttcggcatgtacagcgccgaggagctgaagaagctgagcgtgaagagcatcaccaaccccagatacctggacagcctgggcaaccccagcgccaacggcctgtacgacctggccctgggccccgccgacagcaaggaggtgtgcagcacctgcgtgcaggacttcagcaactgcagcggccacctgggccacatcgagctgcccctgaccgtgtacaaccccctgctgttcgacaagctgtacctgctgctgagaggcagctgcctgaactgccacatgctgacctgccccagagccgtgatccacctgctgctgtgccagctgagagtgctggaggtgggcgccctgcaggccgtgtacgagctggagagaatcctgaacagattcctggaggagaaccccgaccccagcgccagcgagatcagagaggagctggagcagtacaccaccgagatcgtgcagaacaacctgctgggcagccagggcgcccacgtgaagaacgtgtgcgagagcaagagcaagctgatcgccctgttctggaaggcccacatgaacgccaagagatgcccccactgcaagaccggcagaagcgtggtgagaaaggagcacaacagcaagctgaccatcaccttccccgccatggtgcacagaaccgccggccagaaggacagcgagcccctgggcatcgaggaggcccagatcggcaagagaggctacctgacccccaccagcgccagagagcacctgagcgccctgtggaagaacgagggcttcttcctgaactacctgttcagcggcatggacgacgacggcatggagagcagattcaaccccagcgtgttcttcctggacttcctggtggtgccccccagcagatacagacccgtgagcagactgggcgaccagatgttcaccaacggccagaccgtgaacctgcaggccgtgatgaaggacgtggtgctgatcagaaagctgctggccctgatggcccaggagcagaagctgcccgaggaggtggccacccccaccaccgacgaggagaaggacagcctgatcgccatcgacagaagcttcctgagcaccctgcccggccagagcctgatcgacaagctgtacaacatctggatcagactgcagagccacgtgaacatcgtgttcgacagcgagatggacaagctgatgatggacaagtaccccggcatcagacagatcctggagaagaaggagggcctgttcagaaagcacatgatgggcaagagagtggactacgccgccagaagcgtgatctgccccgacatgtacatcaacaccaacgagatcggcatccccatggtgttcgccaccaagctgacctacccccagcccgtgaccccctggaacgtgcaggagctgagacaggccgtgatcaacggccccaacgtgcaccccggcgccagcatggtgatcaacgaggacggcagcagaaccgccctgagcgccgtggacatgacccagagagaggccgtggccaagcagctgctgacccccgccaccggcgcccccaagccccagggcaccaagatcgtgtgcagacacgtgaagaacggcgacatcctgctgctgaacagacagcccaccctgcacagacccagcatccaggcccacagagccagaatcctgcccgaggagaaggtgctgagactgcactacgccaactgcaaggcctacaacgccgacttcgacggcgacgagatgaacgcccacttcccccagagcgagctgggcagagccgaggcctacgtgctggcctgcaccgaccagcagtacctggtgcccaaggacggccagcccctggccggcctgatccaggaccacatggtgagcggcgccagcatgaccaccagaggctgcttcttcaccagagagcactacatggagctggtgtacagaggcctgaccgacaaggtgggcagagtgaagctgctgagccccagcatcctgaagcccttccccctgtggaccggcaagcaggtggtgagcaccctgctgatcaacatcatccccgaggaccacatccccctgaacctgagcggcaaggccaagatcaccggcaaggcctgggtgaaggagacccccagaagcgtgcccggcttcaaccccgacagcatgtgcgagagccaggtgatcatcagagagggcgagctgctgtgcggcgtgctggacaaggcccactacggcagcagcgcctacggcctggtgcactgctgctacgagatctacggcggcgagaccagcggcaaggtgctgacctgcctggccagactgttcaccgcctacctgcagctgtacagaggcttcaccctgggcgtggaggacatcctggtgaagcccaaggccgacgtgaagagacagagaatcatcgaggagagcacccactgcggcccccaggccgtgagagccgccctgaacctgcccgaggccgccagctacgacgaggtgagaggcaagtggcaggacgcccacctgggcaaggaccagagagacttcaacatgatcgacctgaagttcaaggaggaggtgaaccactacagcaacgagatcaacaaggcctgcatgcccttcggcctgcacagacagttccccgagaacagcctgcagatgatggtgcagagcggcgccaagggcagcaccgtgaacaccatgcagatcagctgcctgctgggccagatcgagctggagggcagaagaccccccctgatggccagcggcaagagcctgccctgcttcgagccctacgagttcacccccagagccggcggcttcgtgaccggcagattcctgaccggcatcaagccccccgagttcttcttccactgcatggccggcagagagggcctggtggacaccgccgtgaagaccagcagaagcggctacctgcagagatgcatcatcaagcacctggagggcctggtggtgcagtacgacctgaccgtgagagacagcgacggcagcgtggtgcagttcctgtacggcgaggacggcctggacatccccaagacccagttcctgcagcccaagcagttccccttcctggccagcaactacgaggtgatcatgaagagccagcacctgcacgaggtgctgagcagagccgaccccaagaaggccctgcaccacttcagagccatcaagaagtggcagagcaagcaccccaacaccctgctgagaagaggcgccttcctgagctacagccagaagatccaggaggccgtgaaggccctgaagctggagagcgagaacagaaacggcagaagccccggcacccaggagatgctgagaatgtggtacgagctggacgaggagagcagaagaaagtaccagaagaaggccgccgcctgccccgaccccagcctgagcgtgtggagacccgacatctacttcgccagcgtgagcgagaccttcgagaccaaggtggacgactacagccaggagtgggccgcccagaccgagaagagctacgagaagagcgagctgagcctggacagactgagaaccctgctgcagctgaagtggcagagaagcctgtgcgagcccggcgaggccgtgggcctgctggccgcccagagcatcggcgagcccagcacccagatgaccctgaacaccttccacttcgccggcagaggcgagatgaacgtgaccctgggcatccccagactgagagagatcctgatggtggccagcgccaacatcaagacccccatgatgagcgtgcccgtgctgaacaccaagaaggccctgaagagagtgaagagcctgaagaagcagctgaccagagtgtgcctgggcgaggtgctgcagaagatcgacgtgcaggagagcttctgcatggaggagaagcagaacaagttccaggtgtaccagctgagattccagttcctgccccacgcctactaccagcaggagaagtgcctgagacccgaggacatcctgagattcatggagaccagattcttcaagctgctgatggagagcatcaagaagaagaacaacaaggccagcgccttcagaaacgtgaacaccagaagagccacccagagagacctggacaacgccggcgagctgggcagaagcagaggcgagcaggagggcgacgaggaggaggagggccacatcgtggacgccgaggccgaggagggcgacgccgacgccagcgacgccaagagaaaggagaagcaggaggaggaggtggactacgagagcgaggaggaggaggagagagagggcgaggagaacgacgacgaggacatgcaggaggagagaaacccccacagagagggcgccagaaagacccaggagcaggacgaggaggtgaccgtgaagctgcccctgatgaagatcaacttcgacatgagcagcctggtggtgagcctggcccacggcgccgtgatctacgccaccaagggcatcaccagatgcctgctgaacgagaccaccaacaacaagaacgagaaggagctggtgctgaacaccgagggcatcaacctgcccgagctgttcaagtacgccgaggtgctggacctgagaagactgtacagcaacgacatccacgccatcgccaacacctacggcatcgaggccgccctgagagtgatcgagaaggagatcaaggacgtgttcgccgtgtacggcatcgccgtggaccccagacacctgagcctggtggccgactacatgtgcttcgagggcgtgtacaagcccctgaacagattcggcatcagaagcaacagcagccccctgcagcagatgaccttcgagaccagcttccagttcctgaagcaggccaccatgctgggcagccacgacgagctgagaagccccagcgcctgcctggtggtgggcaaggtggtgagaggcggcaccggcctgttcgagctgaagcagcccctgagatag

SEQ ID NO: 186674 - protein, 407 aa, Artificial Sequence
  derived and/or modified sequence
MAAPCAEDPSLERHFKGHRDAVTCVDFSINTKQLASGSMDSCLMVWHMKPQSRAYRFTGHKDAVTCVNFSPSGHLLASGSRDKTVRIWVPNVKGESTVFRAHTATVRSVHFCSDGQSFVTASDDKTVKVWATHRQKFLFSLSQHINWVRCAKFSPDGRLIVSASDDKTVKLWDKSSRECVHSYCEHGGFVTYVDFHPSGTCIAAAGMDNTVKVWDVRTHRLLQHYQLHSAAVNGLSFHPSGNYLITASSDSTLKILDLMEGRLLYTLHGHQGPATTVAFSRTGEYFASGGSDEQVMVWKSNFDIVDHGEVTKVPRPPATLASSMGNLPEVDFPVPPGRGRSVESVQSQPQEPVSVPQTLTSTLEHIVGQLDVLTQTVSILEQRLTLTEDKLKQCLENQQLIMQRATP

SEQ ID NO: 186675 - protein, 369 aa, Artificial Sequence
  derived and/or modified sequence
MDSCLMVWHMKPQSRAYRFTGHKDAVTCVNFSPSGHLLASGSRDKTVRIWVPNVKGESTVFRAHTATVRSVHFCSDGQSFVTASDDKTVKVWATHRQKFLFSLSQHINWVRCAKFSPDGRLIVSASDDKTVKLWDKSSRECVHSYCEHGGFVTYVDFHPSGTCIAAAGMDNTVKVWDVRTHRLLQHYQLHSAAVNGLSFHPSGNYLITASSDSTLKILDLMEGRLLYTLHGHQGPATTVAFSRTGEYFASGGSDEQVMVWKSNFDIVDHGEVTKVPRPPATLASSMGNLPEVDFPVPPGRGRSVESVQSQPQEPVSVPQTLTSTLEHIVGQLDVLTQTVSILEQRLTLTEDKLKQCLENQQLIMQRATP

SEQ ID NO: 186676 - DNA, 1224 bp, Artificial Sequence
  derived and/or modified sequence
atggctgcaccatgtgccgaggacccatccttggagagacacttcaagggtcaccgtgatgccgtgacttgcgtggactttagtataaacacaaagcagctggcctctggttccatggactcatgtctgatggtgtggcatatgaaaccacaaagcagggcttacagatttacaggccataaggacgctgttacatgcgtcaatttttctccttcaggacatctgctcgcttccggctccagggacaagacagtaagaatctgggtgcccaacgtaaagggcgaatctactgttttcagggcccataccgcaacggttagatccgtacacttctgttctgatggccaatcttttgtgacagcctccgatgacaaaactgtgaaggtctgggccacacataggcaaaagttcctcttttctctgtcccagcatatcaattgggttcggtgtgcgaagtttagcccggacggaagattaatcgtgagcgcttccgatgataagaccgtgaagctttgggataaaagcagcagagaatgcgtccactcttattgtgaacatgggggatttgtaacatacgttgatttccacccctctggcacctgtattgccgcggccggcatggataatacggtgaaggtatgggacgtccgtactcatcgacttctgcagcattatcaactgcacagcgcagcggttaacggattgagttttcacccttccggcaactacctgattaccgcatcatccgactctacactcaaaatcctggacctgatggaaggccgtctcctgtacacactacacggccaccagggtcctgccacaaccgtggcctttagtcgcacgggagaatacttcgctagcggcggatcagatgagcaggtcatggtttggaaatccaacttcgatatcgtggaccatggcgaggtgacaaaggttccgaggcctcccgcaaccctggcatcatctatgggtaacttgccagaagtggacttccctgtgccccccggaagaggaagaagtgtcgagagcgtgcagtcacagccacaggaaccagtcagtgttccccaaacactgacctccacccttgagcacatcgtgggacagctggacgtgctgactcagacagtctccattctcgaacaacgcctgaccctaactgaggataagcttaagcaatgcctggagaatcagcagctgattatgcagcgtgccacaccctag

SEQ ID NO: 186677 - DNA, 1224 bp, Artificial Sequence
  derived and/or modified sequence
atggccgccccctgtgccgaggaccccagcctggagcggcacttcaagggccacagagatgctgtgacctgtgtggacttcagcatcaacaccaagcagctggccagcggctccatggacagctgcctgatggtgtggcacatgaagccccagagccgggcctaccgcttcaccggccacaaggatgctgtgacctgtgtgaacttcagccccagcggccacctgctggccagcggcagccgggacaagacagtgcgcatctgggtgcccaacgtgaagggggagagcacagtgttccgggcccacacagccaccgtgcgctctgtgcacttctgcagtgatggccagagctttgtgacagccagtgatgacaagacagtgaaggtgtgggccacccaccggcagaagttcctgttcagcctgagccagcacatcaactgggtgcgctgtgccaagttctccccagatggccgcctcatcgtgtctgccagtgatgacaagacagtgaagctgtgggacaagagcagccgggagtgtgtgcacagctactgtgagcacggcggctttgtgacctacgtggacttccaccccagcggcacctgcatcgctgctgctggcatggacaacacagtgaaggtgtgggatgtgaggacccaccggctgctgcagcactaccagctgcacagcgctgctgtgaatggcctgtccttccaccccagcggcaactacctgatcacagccagcagtgacagcaccctgaagatcctggacctgatggagggccgcctgctgtacaccctgcacggccaccagggccctgccaccaccgtggccttcagcaggactggagagtactttgccagcggcggcagtgatgagcaggtgatggtgtggaagagcaactttgacatcgtggaccatggagaggtgaccaaggtgccccggcccccagccaccctggccagctccatgggcaacctgcctgaggtggacttccctgtgcccccaggccggggccgctctgtggagagcgtgcagagccagccccaggagcctgtgtctgtgccccagaccctgaccagcaccctggagcacatcgtgggccagctggatgtgctgacccagacagtgtccatcctggagcagaggctgaccctgacagaggacaagctgaagcagtgcctggagaaccagcagctgatcatgcagagggccaccccctag

SEQ ID NO: 186678 - DNA, 1224 bp, Artificial Sequence
  derived and/or modified sequence
atggccgccccctgcgccgaggaccccagcctggagcggcacttcaagggtcacagggacgcggttacttgtgttgacttctcaataaataccaagcagctagcgagcggatcgatggatagctgtctcatggtttggcacatgaagcctcagtcgcgagcctacagattcaccggtcataaagacgccgtgacatgcgtgaatttctcccccagcggccatttactggctagtggtagtagagataaaaccgtccgaatatgggtccccaatgttaagggcgaatccaccgtattcagagctcacacagctaccgtgagatctgtacacttctgtagtgacggccagtcgtttgttaccgcttcagacgataagaccgtgaaggtatgggccacacatcgccaaaagtttctcttttctctcagtcagcacattaattgggtcagatgtgccaagttttctcctgacggaagattgatcgtttcagcctccgacgacaaaacagttaaactttgggacaaatctagccgcgaatgtgtgcattcctattgcgaacatggggggttcgtgacctacgtcgacttccatccatctggcacctgtatagctgccgccggaatggataataccgttaaggtttgggacgtccgtacacaccggttgttacagcactaccaactgcacagcgcggccgtaaacggattgtcttttcacccttccggcaactaccttatcactgcatcaagcgattccactctcaagatcctggatctcatggagggccggctgctctatacattgcatggacatcagggccccgctacaactgtggccttttctaggactggcgagtactttgcgtccggggggagcgacgaacaggttatggtatggaaaagtaattttgacattgtggaccatggcgaggtaactaaagttcctcgacctcctgccacacttgcatcatctatgggaaatctcccagaggtggattttcccgttcccccaggtcgcggccggagcgtcgaaagcgtgcagagccagccacaggagccagtctccgtgcctcaaaccctgacgagtactctggaacatatcgtcggccaactggatgtcctgacccaaacagtgagtattttagagcaacgcctcacgcttactgaggataagctgaagcagtgcttagaaaatcagcagctgataatgcaacgtgccactccgtag

SEQ ID NO: 186679 - DNA, 1224 bp, Artificial Sequence
  derived and/or modified sequence
atggccgctccctgtgctgaggatccttccctcgagcggcattttaagggccatcgtgatgccgtgacctgcgtagacttttcgattaatactaaacagttagctagcggatccatggactcctgcctgatggtctggcacatgaagccacagtctcgcgcttataggtttacgggacacaaggacgccgttacatgcgtaaacttctctcccagtgggcatctgttggcaagtggaagtcgggacaagacagtgcgcatatgggtacctaacgtcaaaggagaatctactgttttccgagcacatacagctacagtgaggtctgtgcatttctgcagtgatgggcaatcattcgtgaccgcaagcgacgataaaactgtgaaagtgtgggctacccatcggcagaaattcttgtttagtctgagccagcacattaattgggtgcggtgtgccaagttctccccagacgggcgactcattgtgtcagcttccgacgataagacagtaaagttgtgggacaaatcctccagagagtgtgtgcattcatactgtgagcacggcggttttgtgacctacgtggattttcaccctagtggcacttgcatcgctgccgcaggtatggacaacaccgtgaaggtgtgggatgtacggacccaccgtctgctgcagcattaccagctgcatagcgcagccgtgaacggactgtcctttcatcctagcggaaactacctcatcactgcaagctcagactctacactgaagatccttgacctgatggaaggtaggcttctttacaccctgcatggacatcaggggcctgcaacgacggttgcctttagccgtaccggagaatattttgcaagcggaggctccgatgaacaggtcatggtttggaagtctaacttcgacatcgtggatcacggagaagttaccaaggtccctcgcccacctgctaccttagcatcctcaatgggcaatctgcctgaggtggactttccggtccccccagggagagggaggtcagtcgaaagcgtgcaatcacagccgcaggaacccgtgtcggtcccacagacacttacgtccacgctagaacatattgttggtcagttagatgtcttaacacagaccgtctctattttggagcagagacttacactaaccgaggacaaacttaagcagtgtctggagaaccaacaactcataatgcagcgggcaacaccatag

SEQ ID NO: 186680 - DNA, 1760 bp, Artificial Sequence
  derived and/or modified sequence
ccgcagctgccttcggcgccgccagccccgccatggctgcgccctgcgcggaagagtgctggccctggggaagccccttcctcacccaggcttcacacatttgaccctggctctctctcaggaggacccctcgctggaaaggcattttaagggccaccgagatgcagttacctgtgtggacttcagtatcaacacaaagcagctggccagtggctccatggactcatgcctcatggtctggcacatgaagccgcagtcacgcgcctaccgcttcactggccacaaggatgccgtcacctgtgtgaacttctctccttcgggacacctgcttgcttccggctcccgagacaagactgtccgcatctgggtacccaatgtcaaaggtgagtccactgtgtttcgtgcacacacagccacagtgaggagtgtccacttctgcagtgatggccagtccttcgtgacagcctctgacgacaagacagtcaaagtgtgggcaactcatcgccagaaattcctgttctccctgagccagcatatcaactgggtccgctgtgccaagttctcccccgacgggcggctcatcgtgtctgccagtgatgacaagactgttaagctgtgggacaagagcagccgggaatgtgtccactcgtattgtgagcatggcggctttgtcacctatgtggacttccaccccagtgggacgtgcattgccgctgccggcatggacaacacagtgaaggtgtgggacgtgcggactcaccggctgctgcagcattatcagttgcacagtgcagcagtgaacgggctctctttccacccgtcgggaaactacctgatcacagcctccagtgactcaaccctgaagatcctggacctgatggagggccggctgctctacacactccacgggcatcagggaccagccaccactgttgccttttcaagaacgggggagtattttgcttctggaggctctgatgaacaagtgatggtttggaagagtaactttgatattgttgatcatggagaagtcacgaaagtgccgaggcccccagccacactggccagctccatggggaatctgccagaagtggacttccctgtccccccaggcagaggcaggagtgtggagtctgtgcagagccagccccaggagcccgtgagtgtgccccagacactgactagcacgctggagcacattgtgggccagctggatgtcctcactcagacagtctccattctggagcagcggttgacactgacagaagacaagctgaagcagtgtctggagaaccagcagctaatcatgcagagagcaacaccatgatcaggggagcaggaatcaggagctcggtggatttgcaggtggcaggccagggatttgtaccatgggacttgggtaaataaaggggactgaactctgtgggaatcacatccatactggagccctggatttttgcagttctgccctccaccttgctatctgcaccaggaggctctccacctggcagccagaggtccccagtgggccgggctcacacacaaatgatgcttcagacccgaatgagaggaccacattttgcttaatgtaaaggagccacttgaaaatgtctgctccttcggggtcctgagattgtggctccccctctggaggaggtggctccacgatgccttgattttcactcatcatttggacatgtgactggcttttcctacctctgccatggtgtagaaattgattgcacattgattggatgagc

SEQ ID NO: 186681 - DNA, 1898 bp, Artificial Sequence
  derived and/or modified sequence
aacggccaccgcagctgccttcggcgccgccagccccgccatggctgcgccctgcgcggaggacccctcgctggaaaggcattttaagggccaccgagatgcagttacctgtgtggacttcagtatcaacacaaagcagctggccagtggctccatggactcatgcctcatggtctggcacatgaagccgcagtcacgcgcctaccgcttcactggccacaaggatgccgtcacctgtgtgaacttctctccttcgggacacctgcttgcttccggctcccgagacaagactgtccgcatctgggtacccaatgtcaaaggtgagtccactgtgtttcgtgcacacacagccacagtgaggagtgtccacttctgcagtgatggccagtccttcgtgacagcctctgacgacaagacagtcaaagtgtgggcaactcatcgccagaaattcctgttctccctgagccagcatatcaactgggtccgctgtgccaagttctcccccgacgggcggctcatcgtgtctgccagtgatgacaagactgttaagctgtgggacaagagcagccgggaatgtgtccactcgtattgtgagcatggcggctttgtcacctatgtggacttccaccccagtgggacgtgcattgccgctgccggcatggacaacacagtgaaggtgtgggacgtgcggactcaccggctgctgcagcattatcagttgcacagtgcagcagtgaacgggctctctttccacccgtcgggaaactacctgatcacagcctccagtgactcaaccctgaagatcctggacctgatggagggccggctgctctacacactccacgggcatcagggaccagccaccactgttgccttttcaagaacgggggagtattttgcttctggaggctctgatgaacaagtgatggtttggaagagtaactttgatattgttgatcatggagaagtcacgaaagtgccgaggcccccagccacactggccagctccatggggaatctgccagaagtggacttccctgtccccccaggcagaggcaggagtgtggagtctgtgcagagccagccccaggagcccgtgagtgtgccccagacactgactagcacgctggagcacattgtgggccagctggatgtcctcactcagacagtctccattctggagcagcggttgacactgacagaagacaagctgaagcagtgtctggagaaccagcagctaatcatgcagagagcaacaccatgatcaggggagcaggaatcaggagctcggtggatttgcaggtggcaggccagggatttgtaccatgggacttgggtaaataaaggggactgaactctgtgggaatcacatccatactggagccctggatttttgcagttctgccctccaccttgctatctgcaccaggaggctctccacctggcagccagaggtccccagtgggccgggctcacacacaaatgatgcttcagacccgaatgagaggaccacattttgcttaatgtaaaggagccacttgaaaatgtctgctccttcggggtcctgagattgtggctccccctctggaggaggtggctccacgatgccttgattttcactcatcatttggacatgtgactggcttttcctacctctgccatggtgtagaaattgattgcacattgattggatgagccgggggttttctctaaatctgactaaaggcccaaagtgggcccatctgagtcaggtttgttgagaacaagccctctcaagtgggtggtggcttttcagtggccctgatttctgttccacacgtgttcactggagccaggtgacttcctccttgcgtgagtgagggcacaggaatctcaaaattaaacctgacttcattgca

SEQ ID NO: 186682 - DNA, 1224 bp, Artificial Sequence
  derived and/or modified sequence
atggccgccccctgcgccgaggaccccagcctggagagacacttcaagggccacagagacgccgtgacctgcgtggacttcagcatcaacaccaagcagctggccagcggcagcatggacagctgcctgatggtgtggcacatgaagccccagagcagagcctacagattcaccggccacaaggacgccgtgacctgcgtgaacttcagccccagcggccacctgctggccagcggcagcagagacaagaccgtgagaatctgggtgcccaacgtgaagggcgagagcaccgtgttcagagcccacaccgccaccgtgagaagcgtgcacttctgcagcgacggccagagcttcgtgaccgccagcgacgacaagaccgtgaaggtgtgggccacccacagacagaagttcctgttcagcctgagccagcacatcaactgggtgagatgcgccaagttcagccccgacggcagactgatcgtgagcgccagcgacgacaagaccgtgaagctgtgggacaagagcagcagagagtgcgtgcacagctactgcgagcacggcggcttcgtgacctacgtggacttccaccccagcggcacctgcatcgccgccgccggcatggacaacaccgtgaaggtgtgggacgtgagaacccacagactgctgcagcactaccagctgcacagcgccgccgtgaacggcctgagcttccaccccagcggcaactacctgatcaccgccagcagcgacagcaccctgaagatcctggacctgatggagggcagactgctgtacaccctgcacggccaccagggccccgccaccaccgtggccttcagcagaaccggcgagtacttcgccagcggcggcagcgacgagcaggtgatggtgtggaagagcaacttcgacatcgtggaccacggcgaggtgaccaaggtgcccagaccccccgccaccctggccagcagcatgggcaacctgcccgaggtggacttccccgtgccccccggcagaggcagaagcgtggagagcgtgcagagccagccccaggagcccgtgagcgtgccccagaccctgaccagcaccctggagcacatcgtgggccagctggacgtgctgacccagaccgtgagcatcctggagcagagactgaccctgaccgaggacaagctgaagcagtgcctggagaaccagcagctgatcatgcagagagccaccccctag

SEQ ID NO: 186683 - protein, 1075 aa, Artificial Sequence
  derived and/or modified sequence
MRGGKCNMLSSLGCLLLCGSITLALGNAQKLPKGKRPNLKVHINTTSDSILLKFLRPSPNVKLEGLLLGYGSNVSPNQYFPLPAEGKFTEAIVDAEPKYLIVVRPAPPPSQKKSCSGKTRSRKPLQLVVGTLTPSSVFLSWGFLINPHHDWTLPSHCPNDRFYTIRYREKDKEKKWIFQICPATETIVENLKPNTVYEFGVKDNVEGGIWSKIFNHKTVVGSKKVNGKIQSTYDQDHTVPAYVPRKLIPITIIKQVIQNVTHKDSAKSPEKAPLGGVILVHLIIPGLNETTVKLPASLMFEISDALKTQLAKNETLALPAESKTPEVEKISARPTTVTPETVPRSTKPTTSSALDVSETTLASSEKPWIVPTAKISEDSKVLQPQTATYDVFSSPTTSDEPEISDSYTATSDRILDSIPPKTSRTLEQPRATLAPSETPFVPQKLEIFTSPEMQPTTPAPQQTTSIPSTPKRRPRPKPPRTKPERTTSAGTITPKISKSPEPTWTTPAPGKTQFISLKPKIPLSPEVTHTKPAPKQTPRAPPKPKTSPRPRIPQTQPVPKVPQRVTAKPKTSPSPEVSYTTPAPKDVLLPHKPYPEVSQSEPAPLETRGIPFIPMISPSPSQEELQTTLEETDQSTQEPFTTKIPRTTELAKTTQAPHRFYTTVRPRTSDKPHIRPGVKQAPRPSGADRNVSVDSTHPTKKPGTRRPPLPPRPTHPRRKPLPPNNVTGKPGSAGIISSGPITTPPLRSTPRPTGTPLERIETDIKQPTVPASGEELENITDFSSSPTRETDPLGKPRFKGPHVRYIQKPDNSPCSITDSVKRFPKEEATEGNATSPPQNPPTNLTVVTVEGCPSFVILDWEKPLNDTVTEYEVISRENGSFSGKNKSIQMTNQTFSTVENLKPNTSYEFQVKPKNPLGEGPVSNTVAFSTESADPRVSEPVSAGRDAIWTERPFNSDSYSECKGKQYVKRTWYKKFVGVQLCNSLRYKIYLSDSLTGKFYNIGDQRGHGEDHCQFVDSFLDGRTGQQLTSDQLPIKEGYFRAVRQEPVQFGEIGGHTQINYVQWYECGTTIPGKW

SEQ ID NO: 186684 - DNA, 3228 bp, Artificial Sequence
  derived and/or modified sequence
atgcggggtgggaagtgcaatatgttgagctcactggggtgcctgctgctgtgtgggagtattacgctcgctttggggaatgcacagaaactccccaagggaaaaagaccaaatctgaaagtacatattaatacaacctccgactccattctgctgaagtttctgagaccttctcccaatgttaagctggaaggcctgttattaggatacggatcgaatgtgtcccccaaccagtacttccctctccccgcagaaggcaagttcactgaagcgatcgtggacgctgagccaaagtatctgattgtagtgcgccctgcaccaccccctagccagaagaagagctgcagcggtaagacgcgctctcggaagcccctgcagctggtggtcggaactttgactccaagcagcgttttcttgtcatggggctttcttattaaccctcaccacgattggacactaccctcccattgccctaacgatcgattctacaccattcggtaccgcgagaaagacaaggagaagaaatggatctttcagatctgccccgcaactgagactatcgtggagaacctgaagcccaatacagtgtacgagttcggggttaaggataatgtggaggggggaatttggtctaagatattcaatcacaaaacagtggtgggatcaaagaaagtgaatggaaaaatacagtcaacctatgatcaggaccataccgtacccgcatacgttcccaggaaactgatcccgatcaccattatcaagcaggtgattcagaacgtgactcacaaggattcagctaaaagcccagagaaggccccactggggggtgtgattctggtgcatcttatcataccgggattaaatgaaactaccgtcaagttgccggcatctctgatgtttgagataagcgacgcgctcaagacgcaactcgctaaaaacgagactctcgctttgcccgctgagtccaaaactccagaagtggagaagatatccgccagacctacaaccgttactcctgagaccgtgcctcggagcactaagccaaccaccagtagtgccctggatgtgtcggagacaactttagccagctcagaaaaaccgtggattgtccccaccgctaagattagcgaagattccaaagtgctgcaacctcaaaccgccacttatgatgtgttcagtagcccaaccacttctgacgagcccgagatctccgattcctacacggctacgtccgacagaatccttgattctatcccccctaagacaagtcgcactttggagcagcctcgggcaaccctcgcaccctctgaaacaccctttgtgcctcagaagctggagatattcaccagtcccgagatgcagccaacgactccagccccacagcagacgacctcaattcccagcactccaaagcggagaccccgtccaaagccgcctagaactaaacccgaaaggaccacaagcgccggaacaatcacccctaagatctcaaagtctccagagcctacttggactactccagcacccggtaaaacacagttcattagtttgaaaccaaaaatcccattatcccctgaagtgacccatacgaaaccagctccgaaacagactcccagagcacccccaaagccgaaaacgagtcccagaccccgtatacctcagactcagcccgtccccaaagtgccacagcgtgttacagctaaacccaaaaccagcccaagccctgaggtgagctacacaacgccggcacccaaggacgtcctcttgcctcacaaaccctatccagaggttagccaatccgagcctgctcctctggagacgcgtggcatccccttcattcctatgatcagcccgtcgccatcccaagaggagctacagacgaccctggaagaaaccgaccaatcaacacaggagcctttcaccactaagatcccccgtaccactgagcttgccaaaaccactcaagctccccaccgattttataccaccgtccggccaagaacaagcgacaagcctcatatcaggccaggagtcaagcaagcccctcggccatccggggcagacagaaacgtttccgtcgacagcacacatcctactaagaaaccaggcacccgcagacctccgcttcctcctaggccgacgcaccctcgcagaaagccactgcctcctaacaatgttaccgggaaacccggatccgcagggattatcagtagtggtcccattaccacacctccgctgcgtagtacacctaggcctacaggtacccctctcgaacgtattgagaccgacattaagcagcctacagtgcctgcatcaggtgaggaactggagaacattaccgacttttcctccagcccaacccgcgaaacggatcccctgggtaagcctcggtttaaaggcccacacgtgcgctacatacagaagccggacaattccccctgcagcatcactgactctgtgaagagatttccgaaagaggaagccacggaaggcaacgctacttccccaccacagaatccccctaccaaccttactgtcgttaccgtcgaggggtgtccctcctttgtgatacttgactgggaaaagccactgaatgataccgtaaccgagtacgaggtgattagcagggagaacggttcgttcagtgggaaaaataagagcatccagatgactaatcagacctttagcaccgttgagaatctcaagcctaataccagctacgagttccaggtcaagccaaagaatccactgggagaaggccctgtctctaatacagtggccttcagcaccgaatctgccgatcctcgggtctccgagcctgtcagtgccggaagagatgcaatttggacagaaagaccatttaatagcgactcatactcagaatgcaaggggaaacaatatgtcaagcgaacctggtataagaaattcgttggggtgcaactctgtaactctctgcgctataagatttatttgagtgattctctgaccggtaagttctacaatatcggcgaccagagagggcatggcgaagaccattgccagtttgtagacagtttccttgacggccgaactggacagcaactcacaagcgatcagctccccatcaaagagggttattttcgcgcagttcgtcaggagcccgtgcagtttggggaaattggaggccatacacaaatcaattatgtgcagtggtacgaatgtgggactactatcccagggaagtggtag

SEQ ID NO: 186685 - DNA, 3228 bp, Artificial Sequence
  derived and/or modified sequence
atgcgagggggtaagtgcaatatgctctccagtctgggatgcttgctcctgtgcggttctataaccctcgcccttgggaacgctcagaagctcccgaaaggtaagaggcctaacctgaaggtgcacattaacacgacaagtgactcgattctgctgaagttccttaggccttccccaaacgttaagcttgaaggtctcctgcttggctatggcagcaacgtcagccctaaccaatatttccccctgcctgccgagggtaagttcactgaagctattgtcgatgcagagcctaaatatcttattgtggtgcggcccgcgcctcctccctctcagaaaaagagctgctcaggcaaaacccggagtagaaagccccttcagttagtagtaggtaccctaacccctagctccgtctttctcagctggggtttcctaataaacccacatcacgattggaccttaccatcccattgcccaaatgatcgcttctacaccattagataccgtgaaaaggacaaggaaaaaaaatggattttccagatatgccccgcaaccgagacaatcgtggaaaacctgaaacccaatactgtttatgagtttggtgtgaaggataacgttgaaggaggcatctggtccaaaatttttaaccataaaaccgtcgttggaagtaagaaggtgaatgggaaaatccagtccacctacgatcaagatcacacggtacctgcctacgtaccgaggaagttaatcccgattacaataattaagcaggtgatacagaatgtgacccacaaggattctgccaaatcccctgaaaaggctcccctcggaggagttatccttgtacacttaattattcccggcctgaatgagacgaccgtgaaactgccagcctccctcatgttcgagatttctgacgccctgaaaactcagttggctaaaaacgagacactcgctctacccgctgaaagtaagacccccgaagtcgagaaaatttcggccaggccaaccacagtgacgcccgaaacagttccaagatctacaaaaccaacaaccagtagcgctctggacgtgagcgagaccacactggcttcatctgaaaagccctggatagtgccaacagcaaaaatttccgaggacagtaaggtcttacagccccaaactgcgacctacgatgttttcagtagcccgacaactagtgatgagcccgagatcagcgattcctacacggcgacttcagaccgaatcctggattctatcccacctaaaactagcaggactctggagcagcccagggccacactggcgccctcagagacaccttttgttccccagaagctagagattttcaccagccctgaaatgcagcctaccacccccgcccctcagcaaacaactagcattccatcaaccccgaagagacggccccggccgaagccacccagaactaagccagaaagaacgacgtccgccggaacaatcactccaaaaatttctaaaagccccgaaccgacatggacgacccccgctccgggtaaaacccaattcatttcattgaagcccaagattcctctgagcccggaggtgacgcacaccaagcccgcgccaaaacagacaccaagagcccctcccaaaccaaagacttctccgcgacctagaatccctcaaacacagcctgtgcccaaagtcccccagagggttactgcaaagcccaagacctctccaagcccagaggtgtcctacaccacccctgctcctaaggatgtcctgcttccccacaaaccctaccctgaggtgtcacagagcgagcccgctcctctcgagacccgaggaatcccgttcattcccatgatttcaccgagcccctcccaggaagaattgcaaacgacattggaggagaccgaccaatcgacacaagagccattcactaccaaaattccccgcacaaccgagctcgccaagaccacccaggccccccatcgtttctatacaactgtccgcccaagaacatccgacaagccacatatccgccctggagtaaaacaggccccccgcccaagcggagccgacaggaacgtatcggtggattcaactcatcccaccaagaagccagggacaagacgccccccactgcctcctcgacccactcacccacggcgcaagcctcttcctccaaataacgttaccggaaaacctggctctgctggaattatctcgagcgggcccatcactaccccccctttacgaagtactcctcggccaaccggcactccattagaaagaatagaaactgatatcaagcagcccacggtgcccgcatccggggaagaactggaaaatataaccgatttcagctcaagtccgacgcgcgagactgatccactcgggaaaccaaggttcaaaggaccccacgtgaggtatatacagaaacccgacaactccccgtgctccattactgacagcgtgaagaggtttcccaaggaagaggcaaccgagggaaacgccacttccccgccccagaaccctccaactaatctgaccgttgtgactgtcgaaggatgcccgagtttcgtgattttagactgggagaagccactgaatgataccgtaacagaatacgaagtaatctcgcgtgaaaatggatcttttagtggaaaaaataaaagcatacagatgaccaaccaaacgttctcaaccgttgaaaatctgaagcccaacacatcctacgagttccaagtgaagcctaagaacccattgggcgaaggccccgtgagcaacacggtggctttctcaacggagtccgctgaccctcgagtttccgagcccgtgtctgccggaagggacgcaatttggacggaacgcccctttaattccgatagttatagcgaatgcaaaggaaagcaatatgttaagcgtacttggtataagaagtttgttggtgtgcaactctgcaatagtctgcgctataaaatatatctatctgattccctcactggaaagttctataacatcggagatcagaggggccacggggaggaccactgtcagtttgtcgactcgttcctggacggtcggacagggcagcagcttacgtcagaccaactgcccattaaagaagggtatttcagggccgtgaggcaggaaccagttcaattcggcgaaatcggtggacacacccagattaactatgttcagtggtacgagtgcgggacaactatccccggcaaatggtag

SEQ ID NO: 186686 - DNA, 3228 bp, Artificial Sequence
  derived and/or modified sequence
atgaggggcggaaagtgtaatatgcttagttccctgggctgtctcttactttgcggctcgatcaccctagcacttggcaacgcgcagaaactccctaaaggtaagcgcccaaacctgaaagtccatattaataccacctctgattcaattctgctcaagttcctacgacccagccctaacgttaaactagaaggacttctcctgggttacggatcgaatgtcagtcctaatcaatacttcccacttccagcagaaggcaaatttaccgaagccatcgtcgacgcggaacccaagtacttgatcgtggttaggccggcccctcccccttcgcagaagaagtcctgcagcggcaaaacccgctctcgtaaacccctgcaattagtcgtcggcacactgactcccagctctgttttcctctcatggggattcctgattaacccccatcatgactggacattaccttcccattgcccaaacgaccgattctacacgattagataccgcgaaaaagataaagagaagaagtggatattccagatttgccctgccacagagacgattgtcgaaaacttgaaacccaataccgtgtacgagttcggagttaaagataacgtcgaaggcggcatctggtccaaaatcttcaatcacaagacagtcgttggcagtaaaaaagtgaatggaaaaatccagagcacctatgaccaggaccacacagtccctgcctatgtcccccgcaagttaattccgatcaccattattaagcaggtcatccagaatgtgacccacaaagatagcgcaaaaagtccagagaaggctcccctgggaggcgtcatcctggtccatctaatcatccccggcttgaacgaaaccacggttaaactgcctgcctctcttatgttcgagatctcagatgcattgaaaacccagctggctaagaatgaaactctcgcactacccgcagaatccaaaacccccgaggtcgaaaaaattagcgctaggccgaccaccgtgaccccagaaaccgtgcctagatccaccaaacccaccacaagtagcgcgcttgatgtgtccgaaaccacacttgcttcatcagagaagccatggatcgtgcctacagccaaaattagtgaggactcaaaagtcctacagccacagactgcaacttacgacgttttctcttctccaaccacctccgatgaacccgagatttccgatagctacaccgcgacaagtgacagaatcctcgacagtataccccctaaaacttctcgcactttagagcagccacgcgccaccctggcaccatctgagacaccctttgtgcctcaaaaactcgaaatctttaccagtcctgagatgcagcccaccacccccgccccccaacagacaaccagcattccatccactccaaaacgacgaccacgacccaagccgccccgaaccaagcctgagagaacaaccagcgcaggcacgattacaccaaaaatctcgaaatcacctgaaccaacgtggaccacccctgcgcccggcaaaacccagtttatcagcttgaaaccaaagattccactgagccccgaagtcactcataccaaaccagcccctaaacagaccccaagagcacctcctaaacccaaaaccagccccagacctagaataccgcagactcaacccgtaccaaaggtcccacagagagtcacagccaagcctaaaacttctcccagccccgaggtgagctatacgaccccagcacctaaggacgtactattgcctcataagccgtaccctgaagtcagtcagtcagaacccgccccccttgaaacacggggcattcccttcatccctatgatcagcccatcacccagccaagaggaactgcaaacaaccttagaagaaaccgaccaatctacccaggagcccttcacaactaaaatcccccggacaaccgagcttgcgaagacgactcaggcgccacaccgcttttatacaacagttaggcccagaacctccgataagccccacatcaggcccggtgttaaacaggcccctcgaccctctggagcggaccgcaacgtgagcgtggattctacccatccaacaaagaaacccggaactcgtagaccaccactgccccccagaccaacccacccacgcaggaagcccctgccaccaaataacgttactgggaagcctggaagcgccggtatcatcagcagcggaccgattacaacccctccattacgatcaactcctcgccctactggtacccctctggaaagaattgagactgacataaagcaacccactgtccccgcatcaggagaggaactagaaaatataaccgatttttcttcgagccctacacgcgaaacagatcccttgggtaagcctcgttttaaggggccccacgtgaggtatatacagaaacccgacaactccccgtgctccattactgacagcgtgaagaggtttcccaaggaagaggcaaccgagggaaacgccacttccccgccccagaaccctccaactaatctgaccgttgtgactgtcgaaggatgcccgagtttcgtgattttagactgggagaagccactgaatgataccgtaacagaatacgaagtaatctcgcgtgaaaatggatcttttagtggaaaaaataaaagcatacagatgaccaaccaaacgttctcaaccgttgaaaatctgaagcccaacacaagttacgaatttcaagtcaagcctaaaaatcccctgggtgaagggcccgtcagtaatactgtcgctttctcaaccgagtccgccgaccctcgcgtgtctgagccagtttccgccgggagagatgcaatctggaccgaaagaccatttaactctgacagttattctgagtgcaagggaaagcagtatgtaaagcgcacttggtataaaaaattcgtaggagtccaactgtgtaactccttgcgatataaaatttatttgtccgattcactcaccggcaaattctacaacataggagaccagcgggggcacggcgaggaccattgccagttcgtcgactcttttttagacggtagaaccggtcagcagcttaccagtgatcagctgccaatcaaagagggatattttagagctgtgaggcaggagcccgttcaattcggcgaaatcgggggccatactcaaatcaattatgtgcaatggtatgaatgcggcactacaattccagggaaatggtag

SEQ ID NO: 186687 - DNA, 4498 bp, Artificial Sequence
  derived and/or modified sequence
gtgagtaagcccacggcacagctaagtgcagccgcccgcctctgtcactgggagacagtccacttaaatgcagctccagggttgcgaggcacccaccagcatcattccccatgcgaggtggcaaatgcaacatgctctccagtttggggtgtctacttctctgtggaagtattacactagccctgggaaatgcacagaaattgccaaaaggtaaaaggccaaacctcaaagtccacatcaataccacaagtgactccatcctcttgaagttcttgcgtccaagtccaaatgtaaagcttgaaggtcttctcctgggatatggcagcaatgtatcaccaaaccagtacttccctcttcccgctgaagggaaattcacagaagctatagttgatgcagagccgaaatatctgatagttgtgcgacctgctccacctccaagtcaaaagaagtcatgttcaggtaaaactcgttctcgcaaacctctgcagctggtggttggcactctgacaccgagctcggtcttcctgtcctggggtttcctcatcaacccacaccatgactggacattgccaagtcactgtcccaatgacagattttatacaattcgctatcgagaaaaggataaagaaaagaagtggatttttcaaatctgtccagccactgaaacaattgtggaaaacctaaagcccaacacagtttatgaatttggagtgaaagacaatgtggaaggtggaatttggagtaagattttcaatcacaagactgttgttggaagtaaaaaagtaaatgggaaaatccaaagtacctatgaccaagaccacacagtgccagcatatgtcccaaggaaactaatcccaataacaatcatcaagcaagtgattcagaatgttactcacaaggattcagctaaatccccagaaaaagctccactgggaggagtgatactagtccaccttattattccaggtcttaatgaaactactgtaaaacttcctgcatccctaatgtttgagatttcagatgcactcaagacacaattagctaagaatgaaaccttggcattacctgccgaatctaaaacaccagaggttgaaaaaatctcagcacgacccacaacagtgactcctgaaacagttccaagaagcactaaacccactacgtctagtgcattagatgtttcagaaacaacactggcttcaagtgaaaagccatggattgtgcctacagctaaaatatctgaagattccaaagttctgcagcctcaaactgcaacttatgatgttttctcaagccctacaacatcagatgagcctgagatatcagattcctacacagcaacaagtgatcgtattctggattctatcccacctaaaacttctagaactcttgaacagccaagggcaacactggctccaagtgaaacaccatttgttcctcaaaaactggaaatctttaccagtccagaaatgcagcctacgacacctgctccccagcaaactacatctatcccttctacacctaaacgacgcccccggcccaaaccgccaagaaccaaacctgaaagaaccacaagtgccggaacaattacacctaaaatttctaaaagccctgaacctacatggacaacaccggctcccggtaaaacacaatttatttctctgaaacctaaaatccctctcagcccagaagtgacacacaccaaacctgctcccaagcagacaccacgtgctcctcctaagccaaaaacatcaccacgcccaagaatcccacaaacacaaccagttcctaaggtgccccagcgtgttactgcaaaaccaaaaacgtcaccaagtccagaagtgtcatacaccacacctgctccaaaagatgtgctccttcctcataaaccataccctgaggtctctcagagcgaacctgctcctctagagacacgaggcatcccttttatacccatgatttccccaagtcctagtcaagaggaactacagaccactctggaagaaacagaccaatccacccaagaacctttcacaactaagattccacgaacaactgaactagcaaagacaactcaggcgccacacagattttatactactgtgaggcccagaacatctgacaagccacacatcagacctggggtcaagcaagcacccaggccatcaggtgctgatagaaatgtatcagtggactctacccaccccactaaaaagccagggactcgccgcccacccttgccacccagacctacacacccacgaagaaaacctttaccaccaaataatgtcactggaaagccaggaagtgcaggaatcatttcatcaggcccaataactacaccacccctgaggtcaacacccaggcctactggaactcccttggagagaatagagacagatataaagcaaccaacagttcctgcctctggagaagaactggaaaatataactgactttagctcaagcccaacaagagaaactgatcctcttgggaagccaagattcaaaggacctcatgtgcgatacatccaaaagcctgacaacagtccctgctccattactgactctgtcaaacggttccccaaagaggaggccacagaggggaatgccaccagcccaccacagaacccacccaccaacctcactgtggtcaccgtggaagggtgcccctcatttgtcatcttggactgggaaaagccactaaatgacactgtcactgaatatgaagttatatccagagaaaatgggtcattcagtgggaagaacaagtccattcaaatgacaaatcagacattttccacagtagaaaatctgaaaccaaacacgagttatgaattccaggtgaaacccaaaaacccgcttggtgaaggcccggtcagcaacacagtggcattcagtactgaatcagcggacccaagagtgagtgagccagtttctgcaggaagagatgccatctggactgaaagaccctttaattcagactcttactcagagtgtaagggcaaacaatatgtcaaaaggacatggtataaaaaatttgtaggagtgcagctgtgcaactctctcagatacaagatttacttgagcgactccctcacaggaaaattttataacataggtgatcagaggggccatggagaagatcactgccagtttgtggattcatttttagatggacgcactgggcagcaactcacttctgaccagttaccaatcaaagaaggttatttcagagcagttcgccaggaacctgtccaatttggagaaataggtggtcacacccaaatcaattatgttcagtggtatgaatgtgggactacaattcctggaaaatggtagatgctgcacaaagttaccttctgtttcatcattgcaaacaaaaatcattgaaaatactatgccgcattcatttaaagctattttgtttactatgtataaaagtctacaatctaattaatagcaatactagatgtttattattagaaaagattgctgagagtatttatcaggttttacaaagtcattttaagaaagcaagatactgatgttaacagaataacatttttggggaagctggctccctattcatggtattttaagagatcatttgtatattatttatcacactgttgtaatgatgttttgagatacttttataacaaaattaacatcaaaaaggtatatactttttaaaaaaaatttacttttattgatgtgtactcttcctattgatgagttaattccataaatctctacttagtttaacttattggatcaaattatcttcagcatgtatatctggggaaaaaaggtccgaattttcacatttatatttaaacttcaattttttatatttaaacttcaattttttagcaacagctgaatagctttgcggaggagtttaatagttacacattcatgctaatatacatttcctttaaacatccacaaattcttaaaaagattgaatcagtaaatttcatttcagctaaaaatggagtctaatatattgtttcaaaagatacatttttacccaccataaatgttacaatatctgaatatgctttgtcaaactatccctttatgcaatcgtcttcatattgtttttatgattctaatcaagctgtatgtagagactgaatgtgaagtcaagtctgagcacaaaaagataatgcacgatgagattgcctaccattttataggatatttactatgtatttatacgttaagacctctatgaatgaatgtatcagagaatgtctttgtaactgtttaattcaatctgtaataaaaatctaactaactaactcatttatttctattaaaaaggtattgtcctttaggcggggaatgggaatccttgctgcactgttgcagtcattctgaaaggacctttccctgtacttacctttcaacatgcttcaatcttatcaacgctacattttgtatttttcaaacaagtataaattctgcaataaagagatgtagtttttttttaa

SEQ ID NO: 186688 - DNA, 3228 bp, Artificial Sequence
  derived and/or modified sequence
atgagaggcggcaagtgcaacatgctgagcagcctgggctgcctgctgctgtgcggcagcatcaccctggccctgggcaacgcccagaagctgcccaagggcaagagacccaacctgaaggtgcacatcaacaccaccagcgacagcatcctgctgaagttcctgagacccagccccaacgtgaagctggagggcctgctgctgggctacggcagcaacgtgagccccaaccagtacttccccctgcccgccgagggcaagttcaccgaggccatcgtggacgccgagcccaagtacctgatcgtggtgagacccgcccccccccccagccagaagaagagctgcagcggcaagaccagaagcagaaagcccctgcagctggtggtgggcaccctgacccccagcagcgtgttcctgagctggggcttcctgatcaacccccaccacgactggaccctgcccagccactgccccaacgacagattctacaccatcagatacagagagaaggacaaggagaagaagtggatcttccagatctgccccgccaccgagaccatcgtggagaacctgaagcccaacaccgtgtacgagttcggcgtgaaggacaacgtggagggcggcatctggagcaagatcttcaaccacaagaccgtggtgggcagcaagaaggtgaacggcaagatccagagcacctacgaccaggaccacaccgtgcccgcctacgtgcccagaaagctgatccccatcaccatcatcaagcaggtgatccagaacgtgacccacaaggacagcgccaagagccccgagaaggcccccctgggcggcgtgatcctggtgcacctgatcatccccggcctgaacgagaccaccgtgaagctgcccgccagcctgatgttcgagatcagcgacgccctgaagacccagctggccaagaacgagaccctggccctgcccgccgagagcaagacccccgaggtggagaagatcagcgccagacccaccaccgtgacccccgagaccgtgcccagaagcaccaagcccaccaccagcagcgccctggacgtgagcgagaccaccctggccagcagcgagaagccctggatcgtgcccaccgccaagatcagcgaggacagcaaggtgctgcagccccagaccgccacctacgacgtgttcagcagccccaccaccagcgacgagcccgagatcagcgacagctacaccgccaccagcgacagaatcctggacagcatcccccccaagaccagcagaaccctggagcagcccagagccaccctggcccccagcgagacccccttcgtgccccagaagctggagatcttcaccagccccgagatgcagcccaccacccccgccccccagcagaccaccagcatccccagcacccccaagagaagacccagacccaagccccccagaaccaagcccgagagaaccaccagcgccggcaccatcacccccaagatcagcaagagccccgagcccacctggaccacccccgcccccggcaagacccagttcatcagcctgaagcccaagatccccctgagccccgaggtgacccacaccaagcccgcccccaagcagacccccagagccccccccaagcccaagaccagccccagacccagaatcccccagacccagcccgtgcccaaggtgccccagagagtgaccgccaagcccaagaccagccccagccccgaggtgagctacaccacccccgcccccaaggacgtgctgctgccccacaagccctaccccgaggtgagccagagcgagcccgcccccctggagaccagaggcatccccttcatccccatgatcagccccagccccagccaggaggagctgcagaccaccctggaggagaccgaccagagcacccaggagcccttcaccaccaagatccccagaaccaccgagctggccaagaccacccaggccccccacagattctacaccaccgtgagacccagaaccagcgacaagccccacatcagacccggcgtgaagcaggcccccagacccagcggcgccgacagaaacgtgagcgtggacagcacccaccccaccaagaagcccggcaccagaagaccccccctgccccccagacccacccaccccagaagaaagcccctgccccccaacaacgtgaccggcaagcccggcagcgccggcatcatcagcagcggccccatcaccaccccccccctgagaagcacccccagacccaccggcacccccctggagagaatcgagaccgacatcaagcagcccaccgtgcccgccagcggcgaggagctggagaacatcaccgacttcagcagcagccccaccagagagaccgaccccctgggcaagcccagattcaagggcccccacgtgagatacatccagaagcccgacaacagcccctgcagcatcaccgacagcgtgaagagattccccaaggaggaggccaccgagggcaacgccaccagccccccccagaacccccccaccaacctgaccgtggtgaccgtggagggctgccccagcttcgtgatcctggactgggagaagcccctgaacgacaccgtgaccgagtacgaggtgatcagcagagagaacggcagcttcagcggcaagaacaagagcatccagatgaccaaccagaccttcagcaccgtggagaacctgaagcccaacaccagctacgagttccaggtgaagcccaagaaccccctgggcgagggccccgtgagcaacaccgtggccttcagcaccgagagcgccgaccccagagtgagcgagcccgtgagcgccggcagagacgccatctggaccgagagacccttcaacagcgacagctacagcgagtgcaagggcaagcagtacgtgaagagaacctggtacaagaagttcgtgggcgtgcagctgtgcaacagcctgagatacaagatctacctgagcgacagcctgaccggcaagttctacaacatcggcgaccagagaggccacggcgaggaccactgccagttcgtggacagcttcctggacggcagaaccggccagcagctgaccagcgaccagctgcccatcaaggagggctacttcagagccgtgagacaggagcccgtgcagttcggcgagatcggcggccacacccagatcaactacgtgcagtggtacgagtgcggcaccaccatccccggcaagtggtag

SEQ ID NO: 186689 - DNA, 3228 bp, Artificial Sequence
  derived and/or modified sequence
atgagaggcgggaaatgtaacatgctgtcgtccctgggatgtctgctgctgtgtggctctatcaccctcgcgcttgggaacgcacaaaaattacctaagggcaagagacctaacctcaaagttcatattaatacaacatccgattccatcctgctgaaatttctgagacccagccctaacgtgaagctggaaggtctgctgctgggatacgggagtaatgtatcaccaaaccagtactttcctttgcccgccgaggggaaatttactgaggccatcgtggatgccgagcccaagtatctgattgttgtgcgcccagcccctccaccctctcagaaaaagtcatgctccggaaagacccggagccggaagcccctccaactggtcgttggaacactcacaccttctagtgtgtttttgtcctgggggttcctgatcaacccgcaccacgactggacactgcccagtcactgccccaacgacagattttacacaattcgttaccgagaaaaggacaaggagaaaaagtggatttttcagatttgcccagcaacagaaactatcgttgagaacctcaagccgaatacggtatatgagtttggagtgaaagacaacgtggagggaggcatttggtcaaagatattcaatcacaagaccgtcgtcggcagcaagaaagtgaacggcaaaatccagagcacttatgatcaggaccacactgtcccagcctacgttccaaggaagctgatccctataaccattatcaaacaagtgattcagaacgtgacacataaggatagcgcgaaatccccagaaaaggcacccctcgggggcgtgattctcgttcatctgatcatacctggcctaaatgagactactgttaaacttcccgcgtctcttatgttcgaaataagtgacgcattgaaaacgcagctggcaaagaacgagaccctggcactcccagcagaaagcaaaacacctgaagtggagaaaataagcgctcggccaacaactgtgaccccggagactgtacctcgatctactaagccaacaacatccagcgctctagatgtgagcgagacaactctggcatcatctgagaaaccttggatagtgccaacagcaaaaatctcagaggacagcaaagtgctccagccccagactgctacttatgacgtgttttcgagcccaacgacatcagacgagcccgagatctctgattcgtacaccgcaactagtgataggatccttgactctatccctcccaagacctcacgaacacttgaacagccgcgcgcaacacttgctccctcagagaccccattcgtccctcaaaagttggaaatatttaccagcccagaaatgcaaccgaccactcccgccccccaacagactacatcaatccccagcaccccaaaaagacgaccgcggcctaagccacctaggactaagcccgaacggacaacctcagccgggaccattacacctaagatttcaaaaagtccagagcccacctggaccacaccagcaccagggaagacgcagttcatttccttaaagcctaagatacctctgagtccggaggtgacacacaccaaacctgcccccaaacaaactccacgcgctccccccaaaccaaaaaccagcccgagaccgagaattccccaaacccagccagtccccaaggtgccccagcgggtgactgctaagcctaagacttctccttcccccgaggtgtcttacaccacacccgcccccaaagacgtgctcctgccccataagccctatcccgaggtcagtcagagcgaacccgcacctctcgagacccgtgggataccctttatcccaatgatctcaccttctccaagtcaggaggaactccaaacaacgctagaggagacggatcagtcaacgcaggagcccttcacaactaaaattcctaggactaccgagctcgctaagacaacccaggcccctcaccgtttctatacaacggttcgtccgaggacgtctgacaagccacacatccgcccaggtgtcaagcaggctccgcggccctccggtgctgatcggaacgtttctgtggactcgacccacccaaccaagaagcctggcacacgcaggcccccgctcccccctagacccacacacccccggaggaagccgctgccccctaataatgtgacaggaaaaccagggtcagcaggcatcatatctagcggccctattaccactccacccctgcggagcactccaaggccaaccggtacccccctagagcggatcgagacggatataaagcagcccacagtgccagcttcgggggaggaattggaaaatataaccgactttagttcctcccctaccagagagaccgaccctctcgggaaacccaggtttaagggtcctcacgtgaggtacatacagaagcccgataattctccttgttccatcactgactctgtgaagaggttcccaaaggaggaggccacagagggaaatgccacgagtcctccccagaacccaccaacaaatctgaccgtggtcactgttgagggctgtccatctttcgtgatactcgattgggaaaagccactgaacgacacagtgacggagtacgaggtcattagccgggaaaacggtagcttttctgggaaaaataagagcatccagatgaccaaccagacttttagcacggtagaaaatctgaaacccaataccagctatgaatttcaggtgaagccaaaaaatcccctcggggagggccccgtctccaatactgttgcattcagtactgagagcgccgacccaagagtgagcgagcctgtgtctgccgggagagatgcgatctggaccgaacggccgtttaacagtgattcttattcagaatgcaaaggcaagcaatacgtcaagaggacctggtataagaaatttgtgggagtacagctctgcaatagtctgcgctataaaatctacctgtctgatagtcttaccggaaagttttataacatcggcgatcagcgcggccacggcgaagaccactgtcagttcgtggatagcttcttggatggacgcaccgggcagcaattgacaagcgaccaactgcccattaaggaagggtatttcagggccgtgaggcaagagccagtgcagttcggcgaaatcggtgggcacacccagatcaactatgtgcagtggtatgagtgcggtacaaccatccctggtaagtggtag

SEQ ID NO: 186690 - DNA, 3228 bp, Artificial Sequence
  derived and/or modified sequence
atgagaggaggcaagtgcaacatgctgagcagcctgggctgcctgctgctgtgtggcagcatcaccctggccctgggcaatgcccagaagctgcccaagggcaagaggcccaacctgaaggtgcacatcaacaccaccagtgacagcatcctgctgaagttcctgcggcccagccccaacgtgaagctggagggcctgctgctgggctacggcagcaatgtgagccccaaccagtacttccccctgcctgctgagggcaagttcacagaggccatcgtggatgctgagcccaagtacctgattgtggtgcggcctgcccccccacccagccagaagaagagctgcagcggcaagaccaggagcaggaagcccctgcagctggtggtgggcaccctgacccccagcagcgtcttcctgtcctggggcttcctgatcaacccccaccacgactggaccctgcccagccactgccccaatgaccgcttctacaccatccgctaccgggagaaggacaaggagaagaagtggatcttccagatctgcccagccacagagaccatcgtggagaacctgaagcccaacacagtgtatgaatttggagtgaaggacaacgtggagggcggcatctggagcaagatcttcaaccacaagacagtggtgggcagcaagaaggtgaatggcaagatccagagcacctatgaccaggaccacacagtgcctgcctacgtgcccaggaagctgatccccatcaccatcatcaagcaggtgatccagaatgtgacccacaaggacagcgccaagagccctgagaaggcccccctgggcggcgtcatcctggtgcacctgatcatccctggcctgaatgagaccaccgtgaagctgcctgccagcctgatgtttgagatcagtgatgccctgaagacccagctggccaagaatgagaccctggccctgcctgctgagagcaagaccccagaggtggagaagatcagcgcccggcccaccaccgtgaccccagagaccgtgcccaggagcaccaagcccaccaccagcagcgccctggatgtgtctgagaccaccctggccagcagcgagaagccctggatcgtgcccacagccaagatcagcgaggacagcaaggtgctgcagccccagacagccacctatgatgtgttcagcagccccaccaccagtgatgagcctgagatcagtgacagctacacagccaccagtgaccgcatcctggacagcatcccccccaagaccagcaggaccctggagcagccccgggccaccctggcccccagcgagaccccatttgtgccccagaagctggagatcttcaccagccctgagatgcagcccaccaccccagccccccagcagaccaccagcatccccagcacccccaagaggcggccccggcccaagccacccaggaccaagccagagaggaccaccagcgctggcaccatcacccccaagatcagcaagagccctgagcccacctggaccaccccagcccctgggaagacccagttcatcagcctgaagcccaagatccccctgagccctgaggtgacccacaccaagccagcccccaagcagaccccccgggccccacccaagcccaagaccagcccccggccccgcatcccccagacccagcctgtgcccaaggtgccccagagggtgacagccaagcccaagaccagccccagccctgaggtgtcctacaccaccccagcccccaaggatgtgctgctgccccacaagccctacccagaggtgtcccagagcgagcccgcccccctggagacccggggcatccccttcatccccatgatcagccccagccccagccaggaggagctgcagaccaccctggaggagacagaccagagcacccaggagcccttcaccaccaagatccccaggaccacagagctggccaagaccacccaggccccccaccgcttctacaccaccgtgcggcccaggaccagtgacaagccccacatccggcctggggtgaagcaggccccccggcccagcggggctgacagaaatgtgtctgtggacagcacccaccccaccaagaagccaggcaccaggaggcctcccctgcccccccggcccacccaccccaggaggaagcccctgccccccaacaacgtgacaggcaagccaggcagcgctggcatcatcagcagcggccccatcaccaccccacccctgcggagcaccccccggcccaccggcacccccctggagcgcatcgagacagacatcaagcagcccaccgtgcctgccagcggggaggagctggagaacatcacagacttcagcagcagccccacccgggagacagaccccctgggcaagccccgcttcaagggcccccacgtgcgctacatccagaagccagacaacagcccctgcagcatcacagattctgtgaagcgcttccccaaggaggaggccacagagggcaatgccaccagccccccccagaacccccccaccaacctgactgtggtgacagtggagggctgccccagctttgtgatcctggactgggagaagcccctgaatgacacagtgacagaatatgaagtcatcagcagagaaaatggcagcttcagcggcaagaacaagagcatccagatgaccaaccagaccttcagcacagtggagaacctgaagcccaacaccagctatgagttccaggtgaagcccaagaaccccctgggggagggccctgtgagcaacacagtggccttcagcacagagagcgctgacccccgggtgtctgagcctgtgtctgctggaagagatgccatctggacagagcggcccttcaacagcgacagctacagtgaatgtaaaggcaagcagtatgtgaagaggacctggtacaagaagtttgtgggcgtgcagctgtgcaacagcctgcgctacaagatctacctgagtgacagcctgaccgggaagttctacaacatcggggaccagaggggccacggggaggaccactgccagtttgtggacagcttcctggatggccgcacaggccagcagctgaccagtgaccagctgcccatcaaggagggctacttccgggctgtgcggcaggagcctgtgcagtttggagaaattggaggccacacccagatcaactacgtgcagtggtatgaatgtggcaccaccatccctgggaagtggtag

SEQ ID NO: 186691 - DNA, 3228 bp, Artificial Sequence
  derived and/or modified sequence
atgcggggcggcaagtgcaacatgctgagcagcctgggctgcctgcttctctgtggaagcattacgctggccttgggcaatgcccagaagcttcccaaggggaagagacctaatttaaaggtgcacatcaacacaacctctgatagcatcctattgaagttcctgcgtccgagtccgaatgtgaagctggagggcctgctgctcggatacggatctaatgtgagtcctaaccagtattttcctttgcctgcagagggcaagttcaccgaagccattgtagacgccgagcctaagtatctcatcgttgtacggcctgctcctccaccttcccagaagaaatcctgtagcgggaagacccgctcacgaaaacccttgcagctagtggttggaaccctgacaccttctagtgtgttcctatcttggggttttctgataaacccccaccacgactggacgctcccatcccactgccccaacgacaggttttatacaatcagatatagggagaaagacaaggagaagaagtggatcttccagatttgtcccgcgaccgaaacgattgtggagaatctgaaacctaacaccgtgtatgagtttggagtgaaggacaacgttgaggggggtatctggagtaaaatcttcaaccacaagaccgtggtggggtccaaaaaggtcaatggaaagatccagtcaacctacgatcaagatcacacagtgcccgcctacgtgccccggaaactgataccaatcaccatcatcaaacaggtgattcaaaatgtgacccataaggatagcgctaagtcccctgagaaggcccccctgggaggtgtgatcctggtacatctaattatccctggactgaacgaaactacggtcaagttaccagccagtctcatgtttgaaatcagcgacgcactcaagacccagctggctaagaacgaaactttagctttacctgcagaatctaaaacccccgaagttgagaaaatttccgctcgtcctacgactgtcacccccgagaccgtcccacggtctacaaagcccaccaccagcagtgcattagatgtaagcgagactaccctggcgagtagcgaaaaaccatggattgtccctactgccaagatctccgaagactctaaagtgttgcagccacagacagcaacttatgacgtgttctcatccccaactacatccgatgagcctgagatttctgatagctacacagccacatcagatcggatcctggattccatcccccctaaaactagtcggacactggagcagcctagggctacgttggccccgagtgagaccccctttgtgccccagaaacttgagatttttacaagccctgaaatgcagcctacaactcccgctccccagcagaccacttctatcccctccacaccaaaaaggcgacctcggcccaaaccaccacgcacaaaaccagaacggaccacttcagctggaaccatcacccctaaaatctccaagtccccagagccgacttggaccactccagctccagggaaaacccaattcatttccctgaagccgaagattcctctgtctccagaagtgacacatactaagcccgcccctaaacagactcccagggcgccaccaaaaccgaagacctctcctcgacccagaatcccccagacccagcctgtacccaaggttcctcaaagagtgacggctaagccaaaaacttccccctccccggaggtgtcctatactacccctgcacccaaggatgtcctcctgccccacaagccttaccccgaagtttcacagagcgagcccgcaccacttgagacgcggggcattccctttattcccatgattagcccctccccctctcaggaggaactgcagacaacgctggaagaaaccgaccagagcactcaagagccttttaccactaaaattccacgaacgactgagttggcaaaaaccacacaggccccgcaccgtttttacactaccgtcagaccacgcacatcagataagccccacattagaccaggcgttaaacaggcacctagaccaagtggggcggatcgaaacgtttccgtcgattctacgcatccgaccaagaaacccggtactcgccgaccacctttgccgccaagacctacccacccacgcaggaagcctctgccccctaacaatgtcaccggtaagcccggtagcgcaggcataatcagctctggacccatcaccacaccccccctacgctcaacccccaggcctacgggaaccccgctggaacgtatcgagaccgacatcaagcagccaaccgtgcctgccagcggcgaagaactcgaaaacattaccgatttttctagttctcccacacgtgaaacagacccgctgggaaagccccggttcaaaggccctcacgtacgttacatccaaaagcctgataactcgccatgtagcattacggactcggtcaagcgcttcccgaaggaagaggccacagaaggtaacgctacctctccgcctcagaaccctccgacgaacctcaccgtcgtcaccgttgagggttgcccttccttcgtgatcttggactgggagaagcccctgaatgataccgtcactgagtacgaggttatctctcgggaaaatgggtcctttagcggtaaaaataagtctattcagatgacaaatcagaccttttcaaccgttgagaatctcaagccgaatacatcttacgagtttcaggttaagccgaaaaatccattgggcgagggtccagtttctaacaccgtagcattctcaacggaatccgctgaccctagggtttctgagcctgtcagtgccggaagagacgcaatttggaccgaacgcccctttaacagtgatagctatagcgagtgtaagggcaaacagtacgttaagcgaacttggtacaaaaagtttgtcggggttcagttatgcaacagtctgcggtacaagatatatctgtcggattctttgacaggaaaattctataatattggcgaccagcgggggcacggggaggaccattgccaattcgtcgattcctttctggatggtaggaccgggcaacagttgaccagcgaccagctacctattaaagagggctattttcgcgctgtgagacaggagcctgtacagttcggtgagatcggaggccacacccagatcaattatgtgcagtggtatgaatgcggtaccacaatcccaggaaagtggtag

SEQ ID NO: 186692 - RNA, 3228 nt, Artificial Sequence
  derived and/or modified sequence
augcgaggggguaagugcaauaugcucuccagucugggaugcuugcuccugugcgguucuauaacccucgcccuugggaacgcucagaagcucccgaaagguaagaggccuaaccugaaggugcacauuaacacgacaagugacucgauucugcugaaguuccuuaggccuuccccaaacguuaagcuugaaggucuccugcuuggcuauggcagcaacgucagcccuaaccaauauuucccccugccugccgaggguaaguucacugaagcuauugucgaugcagagccuaaauaucuuauuguggugcggcccgcgccuccucccucucagaaaaagagcugcucaggcaaaacccggaguagaaagccccuucaguuaguaguagguacccuaaccccuagcuccgucuuucucagcugggguuuccuaauaaacccacaucacgauuggaccuuaccaucccauugcccaaaugaucgcuucuacaccauuagauaccgugaaaaggacaaggaaaaaaaauggauuuuccagauaugccccgcaaccgagacaaucguggaaaaccugaaacccaauacuguuuaugaguuuggugugaaggauaacguugaaggaggcaucugguccaaaauuuuuaaccauaaaaccgucguuggaaguaagaaggugaaugggaaaauccaguccaccuacgaucaagaucacacgguaccugccuacguaccgaggaaguuaaucccgauuacaauaauuaagcaggugauacagaaugugacccacaaggauucugccaaauccccugaaaaggcuccccucggaggaguuauccuuguacacuuaauuauucccggccugaaugagacgaccgugaaacugccagccucccucauguucgagauuucugacgcccugaaaacucaguuggcuaaaaacgagacacucgcucuacccgcugaaaguaagacccccgaagucgagaaaauuucggccaggccaaccacagugacgcccgaaacaguuccaagaucuacaaaaccaacaaccaguagcgcucuggacgugagcgagaccacacuggcuucaucugaaaagcccuggauagugccaacagcaaaaauuuccgaggacaguaaggucuuacagccccaaacugcgaccuacgauguuuucaguagcccgacaacuagugaugagcccgagaucagcgauuccuacacggcgacuucagaccgaauccuggauucuaucccaccuaaaacuagcaggacucuggagcagcccagggccacacuggcgcccucagagacaccuuuuguuccccagaagcuagagauuuucaccagcccugaaaugcagccuaccacccccgccccucagcaaacaacuagcauuccaucaaccccgaagagacggccccggccgaagccacccagaacuaagccagaaagaacgacguccgccggaacaaucacuccaaaaauuucuaaaagccccgaaccgacauggacgacccccgcuccggguaaaacccaauucauuucauugaagcccaagauuccucugagcccggaggugacgcacaccaagcccgcgccaaaacagacaccaagagccccucccaaaccaaagacuucuccgcgaccuagaaucccucaaacacagccugugcccaaagucccccagaggguuacugcaaagcccaagaccucuccaagcccagagguguccuacaccaccccugcuccuaaggauguccugcuuccccacaaacccuacccugaggugucacagagcgagcccgcuccucucgagacccgaggaaucccguucauucccaugauuucaccgagccccucccaggaagaauugcaaacgacauuggaggagaccgaccaaucgacacaagagccauucacuaccaaaauuccccgcacaaccgagcucgccaagaccacccaggccccccaucguuucuauacaacuguccgcccaagaacauccgacaagccacauauccgcccuggaguaaaacaggccccccgcccaagcggagccgacaggaacguaucgguggauucaacucaucccaccaagaagccagggacaagacgccccccacugccuccucgacccacucacccacggcgcaagccucuuccuccaaauaacguuaccggaaaaccuggcucugcuggaauuaucucgagcgggcccaucacuacccccccuuuacgaaguacuccucggccaaccggcacuccauuagaaagaauagaaacugauaucaagcagcccacggugcccgcauccggggaagaacuggaaaauauaaccgauuucagcucaaguccgacgcgcgagacugauccacucgggaaaccaagguucaaaggaccccacgugagguauauacagaaacccgacaacuccccgugcuccauuacugacagcgugaagagguuucccaaggaagaggcaaccgagggaaacgccacuuccccgccccagaacccuccaacuaaucugaccguugugacugucgaaggaugcccgaguuucgugauuuuagacugggagaagccacugaaugauaccguaacagaauacgaaguaaucucgcgugaaaauggaucuuuuaguggaaaaaauaaaagcauacagaugaccaaccaaacguucucaaccguugaaaaucugaagcccaacacauccuacgaguuccaagugaagccuaagaacccauugggcgaaggccccgugagcaacacgguggcuuucucaacggaguccgcugacccucgaguuuccgagcccgugucugccggaagggacgcaauuuggacggaacgccccuuuaauuccgauaguuauagcgaaugcaaaggaaagcaauauguuaagcguacuugguauaagaaguuuguuggugugcaacucugcaauagucugcgcuauaaaauauaucuaucugauucccucacuggaaaguucuauaacaucggagaucagaggggccacggggaggaccacugucaguuugucgacucguuccuggacggucggacagggcagcagcuuacgucagaccaacugcccauuaaagaaggguauuucagggccgugaggcaggaaccaguucaauucggcgaaaucgguggacacacccagauuaacuauguucagugguacgagugcgggacaacuauccccggcaaaugguag

SEQ ID NO: 186693 - RNA, 3228 nt, Artificial Sequence
  derived and/or modified sequence
augaggggcggaaaguguaauaugcuuaguucccugggcugucucuuacuuugcggcucgaucacccuagcacuuggcaacgcgcagaaacucccuaaagguaagcgcccaaaccugaaaguccauauuaauaccaccucugauucaauucugcucaaguuccuacgacccagcccuaacguuaaacuagaaggacuucuccuggguuacggaucgaaugucaguccuaaucaauacuucccacuuccagcagaaggcaaauuuaccgaagccaucgucgacgcggaacccaaguacuugaucgugguuaggccggccccucccccuucgcagaagaaguccugcagcggcaaaacccgcucucguaaaccccugcaauuagucgucggcacacugacucccagcucuguuuuccucucauggggauuccugauuaacccccaucaugacuggacauuaccuucccauugcccaaacgaccgauucuacacgauuagauaccgcgaaaaagauaaagagaagaaguggauauuccagauuugcccugccacagagacgauugucgaaaacuugaaacccaauaccguguacgaguucggaguuaaagauaacgucgaaggcggcaucugguccaaaaucuucaaucacaagacagucguuggcaguaaaaaagugaauggaaaaauccagagcaccuaugaccaggaccacacagucccugccuaugucccccgcaaguuaauuccgaucaccauuauuaagcaggucauccagaaugugacccacaaagauagcgcaaaaaguccagagaaggcuccccugggaggcgucauccugguccaucuaaucauccccggcuugaacgaaaccacgguuaaacugccugccucucuuauguucgagaucucagaugcauugaaaacccagcuggcuaagaaugaaacucucgcacuacccgcagaauccaaaacccccgaggucgaaaaaauuagcgcuaggccgaccaccgugaccccagaaaccgugccuagauccaccaaacccaccacaaguagcgcgcuugauguguccgaaaccacacuugcuucaucagagaagccauggaucgugccuacagccaaaauuagugaggacucaaaaguccuacagccacagacugcaacuuacgacguuuucucuucuccaaccaccuccgaugaacccgagauuuccgauagcuacaccgcgacaagugacagaauccucgacaguauacccccuaaaacuucucgcacuuuagagcagccacgcgccacccuggcaccaucugagacacccuuugugccucaaaaacucgaaaucuuuaccaguccugagaugcagcccaccacccccgccccccaacagacaaccagcauuccauccacuccaaaacgacgaccacgacccaagccgccccgaaccaagccugagagaacaaccagcgcaggcacgauuacaccaaaaaucucgaaaucaccugaaccaacguggaccaccccugcgcccggcaaaacccaguuuaucagcuugaaaccaaagauuccacugagccccgaagucacucauaccaaaccagccccuaaacagaccccaagagcaccuccuaaacccaaaaccagccccagaccuagaauaccgcagacucaacccguaccaaaggucccacagagagucacagccaagccuaaaacuucucccagccccgaggugagcuauacgaccccagcaccuaaggacguacuauugccucauaagccguacccugaagucagucagucagaacccgccccccuugaaacacggggcauucccuucaucccuaugaucagcccaucacccagccaagaggaacugcaaacaaccuuagaagaaaccgaccaaucuacccaggagcccuucacaacuaaaaucccccggacaaccgagcuugcgaagacgacucaggcgccacaccgcuuuuauacaacaguuaggcccagaaccuccgauaagccccacaucaggcccgguguuaaacaggccccucgacccucuggagcggaccgcaacgugagcguggauucuacccauccaacaaagaaacccggaacucguagaccaccacugccccccagaccaacccacccacgcaggaagccccugccaccaaauaacguuacugggaagccuggaagcgccgguaucaucagcagcggaccgauuacaaccccuccauuacgaucaacuccucgcccuacugguaccccucuggaaagaauugagacugacauaaagcaacccacuguccccgcaucaggagaggaacuagaaaauauaaccgauuuuucuucgagcccuacacgcgaaacagaucccuuggguaagccucguuuuaaggggccccacgugagguauauacagaaacccgacaacuccccgugcuccauuacugacagcgugaagagguuucccaaggaagaggcaaccgagggaaacgccacuuccccgccccagaacccuccaacuaaucugaccguugugacugucgaaggaugcccgaguuucgugauuuuagacugggagaagccacugaaugauaccguaacagaauacgaaguaaucucgcgugaaaauggaucuuuuaguggaaaaaauaaaagcauacagaugaccaaccaaacguucucaaccguugaaaaucugaagcccaacacaaguuacgaauuucaagucaagccuaaaaauccccugggugaagggcccgucaguaauacugucgcuuucucaaccgaguccgccgacccucgcgugucugagccaguuuccgccgggagagaugcaaucuggaccgaaagaccauuuaacucugacaguuauucugagugcaagggaaagcaguauguaaagcgcacuugguauaaaaaauucguaggaguccaacuguguaacuccuugcgauauaaaauuuauuuguccgauucacucaccggcaaauucuacaacauaggagaccagcgggggcacggcgaggaccauugccaguucgucgacucuuuuuuagacgguagaaccggucagcagcuuaccagugaucagcugccaaucaaagagggauauuuuagagcugugaggcaggagcccguucaauucggcgaaaucgggggccauacucaaaucaauuaugugcaaugguaugaaugcggcacuacaauuccagggaaaugguag

SEQ ID NO: 186694 - protein, 737 aa, Artificial Sequence
  derived and/or modified sequence
MELGCWTQLGLTFLQLLLISSLPREYTVINEACPGAEWNIMCRECCEYDQIECVCPGKREVVGYTIPCCRNEENECDSCLIHPGCTIFENCKSCRNGSWGGTLDDFYVKGFYCAECRAGWYGGDCMRCGQVLRAPKGQILLESYPLNAHCEWTIHAKPGFVIQLRFVMLSLEFDYMCQYDYVEVRDGDNRDGQIIKRVCGNERPAPIQSIGSSLHVLFHSDGSKNFDGFHAIYEEITACSSSPCFHDGTCVLDKAGSYKCACLAGYTGQRCENLLEAGKSKIKASEDSLSVLEERNCSDPGGPVNGYQKITGGPGLINGRHAKIGTVVSFFCNNSYVLSGNEKRTCQQNGEWSGKQPICIKACREPKISDLVRRRVLPMQVQSRETPLHQLYSAAFSKQKLQSAPTKKPALPFGDLPMGYQHLHTQLQYECISPFYRRLGSSRRTCLRTGKWSGRAPSCIPICGKIENITAPKTQGLRWPWQAAIYRRTSGVHDGSLHKGAWFLVCSGALVNERTVVVAAHCVTDLGKVTMIKTADLKVVLGKFYRDDDRDEKTIQSLQISAIILHPNYDPILLDADIAILKLLDKARISTRVQPICLAASRDLSTSFQESHITVAGWNVLADVRSPGFKNDTLRSGVVSVVDSLLCEEQHEDHGIPVSVTDNMFCASWEPTAPSDICTAETGGIAAVSFPGRASPEPRWHLMGLVSWSYDKTCSHRLSTAFTKVLPFKDWIERNMK

SEQ ID NO: 186695 - DNA, 2214 bp, Artificial Sequence
  derived and/or modified sequence
atggagctggggtgctggactcagctggggctgaccttcctgcagttgctgctgattagtagtctgccacgggaatatacagtgatcaacgaggcttgtccaggggctgaatggaacatcatgtgcagggagtgttgtgaatatgatcagatcgaatgcgtctgtcccggaaaaagggaagtagtcggatatacaattccatgttgcagaaatgaagagaatgagtgcgatagttgtctaatccacccagggtgcaccattttcgagaattgcaagtcatgtaggaacggatcttggggagggacattggatgacttttatgtcaaagggttctactgcgctgagtgcagagctggttggtatggaggcgactgcatgcgctgcggccaggtgcttagagcccctaaaggacagatattgttggagtcctatcctctgaacgcacactgtgagtggacgatccatgcaaagcccggatttgttatacagctccggttcgttatgctgtcgctggaattcgattatatgtgccagtatgactacgtggaggtccgcgatggagacaatcgcgacggccaaatcatcaaacgggtttgtggcaacgagagacctgcgcctatacagtccataggctcctctctccacgtgttatttcattctgacggttccaaaaactttgatggcttccacgcgatttacgaggagatcactgcttgctccagtagcccttgcttccacgacggaacctgcgtactggataaagccggatcctataagtgcgcctgcctggcaggctacactggccaaagatgcgagaacctgttagaagcaggaaagtccaaaatcaaggcatccgaagattccctgtcagtcctggaggaacgaaattgctcagaccctgggggacctgtcaatggctaccagaagattacaggtggacctggattaattaacgggagacacgccaaaataggtacagtggtatccttcttctgcaacaacagctatgtccttagcggcaacgagaaaagaacatgccagcagaatggcgagtggagtggcaagcaacctatttgcataaaggcgtgtagggaacccaagatctctgaccttgtgcggaggcgtgtgttgcctatgcaagtgcagtcacgtgaaacgcccctccaccagctatattccgcagcgttttccaaacagaagctgcaatctgcacctacaaagaaacctgccctgccctttggagatctgcccatgggataccagcacctgcacactcagcttcaatacgagtgcattagcccattttaccgccgactgggcagttctaggagaacctgcctccgaactggaaaatggtctggtagggccccttcatgcatccccatctgcgggaaaatagagaacatcaccgctcctaaaacacagggcctacggtggccctggcaggcagccatttaccggcgaaccagcggggtgcatgatggttccttgcataagggggcttggttcctggtgtgctccggggctcttgtgaacgagagaactgtcgttgtcgctgctcactgtgttacagaccttggaaaagtgactatgattaagactgcagatctgaaagtggtcctagggaagttctatagggatgatgatcgagatgagaaaacaatacagtccctgcagatttccgccatcatcttgcatcccaactacgaccccatcctcctggatgcagatattgccatcctcaagctgctggataaagccaggatttctactagagttcagccgatttgcctggccgcttccagagatctcagcacgtcctttcaagagtctcacataaccgtagctggttggaacgtcctggccgacgtgcgttcccccggtttcaaaaatgacaccctgcgcagcggcgtcgtcagcgtggtggactcgttactgtgcgaagaacagcatgaagaccatggaattcccgtgtctgtaacagataacatgttctgtgcctcttgggagccaactgcaccaagtgatatttgcaccgccgaaacaggtggcatcgccgcagtgtccttcccaggaagagcaagcccagagccccgatggcatctgatgggcttggtgtcgtggagttatgacaagacctgtagccatcgcttatcaacagcctttacgaaggtgctgcctttcaaggattggattgagcggaatatgaagtag

SEQ ID NO: 186696 - DNA, 2214 bp, Artificial Sequence
  derived and/or modified sequence
atggagctgggttgctggacccagctgggattaacatttttacagctgctgcttattagttccttgcctcgagaatacaccgtgatcaacgaggcatgtccaggagccgaatggaatatcatgtgtcgcgaatgttgtgagtacgatcagattgagtgtgtttgccccgggaagcgggaggtggtaggttacacaataccgtgctgtcggaacgaagaaaacgagtgcgactcctgtctcatccaccctggctgtactatctttgaaaactgcaagtcctgcaggaacggttcgtgggggggcaccttggatgatttttacgtaaagggattttattgtgccgaatgtcgcgccggctggtatggcggggactgtatgcgctgcggccaagtacttagagcacctaaagggcaaattctgctagagtcctatccactgaacgcccactgtgagtggacaatccacgccaaaccaggcttcgtcattcagttgaggtttgtgatgctctctctagagtttgactacatgtgccagtacgattacgtggaggtgagggacggtgacaatagagacggacagattatcaagagagtgtgtggcaatgaaaggcctgcccccatccagagcatcggctctagcctccacgttctgtttcactccgacggatccaaaaattttgacggttttcatgcaatctacgaagaaatcactgcatgtagttcctcaccatgcttccacgatggcacctgtgtcctggacaaggctggtagctataagtgcgcatgcctggcgggatataccggacagaggtgtgaaaatcttcttgaagctggaaaaagcaagataaaagccagcgaagactccctttccgtgctcgaagaacggaactgttctgatcctgggggcccagtgaacggctatcagaaaatcacagggggaccaggcctgatcaacgggagacatgccaaaattggtactgtggtaagcttcttttgcaataacagttacgttctgtctggaaatgaaaagcgcacctgccaacagaacggggaatggagcgggaaacaacccatctgcattaaagcatgtagagaaccaaagatctcggatcttgtgaggagaagagtactacctatgcaagtgcagtctagggaaactccacttcatcagctgtattccgccgctttcagcaaacagaaactgcagtctgcgccaactaagaagcctgcacttcccttcggagatctgcctatgggctatcagcatctacatactcaattgcagtatgaatgtatttcacccttctacagaaggctgggtagctcccgccggacctgcttaagaaccggtaagtggtcggggcgggcgccctcctgtatcccgatctgcggcaaaatcgagaatataaccgctccaaaaacgcaaggtctgcgctggccttggcaggccgccatatatagacgcacgtctggagtccacgacggctcccttcataaaggcgcttggtttcttgtgtgtagcggggctctggtgaacgaacgcactgtggtggtggccgctcactgcgtgaccgaccttggaaaagtcaccatgatcaagacagccgacttgaaagtggttcttggaaagttttatagagacgacgatcgggatgagaagacgatccagtcactgcagatttcggctattattctccacccgaattatgatccaatccttctcgacgctgatattgccattctgaagctcttagataaggctagaataagtacccgagtgcagcccatctgtctcgcagcgagccgagacctcagtacaagcttccaggagtctcacattacagtggctggatggaatgtacttgcagacgtgagatcccctggatttaagaacgataccctcagaagcggcgtggtgagtgtggtggattccttgctatgtgaggaacagcacgaagatcatgggataccggtgtctgttacagataatatgttctgcgccagttgggaaccaacggcccctagtgatatttgcaccgcagagactggcgggatcgcagccgtgtcctttcctgggcgagcctctcctgagcccagatggcacctcatgggccttgtatcttggagttacgataagacatgcagccacaggctctccacagcctttaccaaggtcctgccatttaaggactggattgaacggaacatgaaatag

SEQ ID NO: 186697 - DNA, 2214 bp, Artificial Sequence
  derived and/or modified sequence
atggaactcggttgttggactcaactcgggctgaccttcttgcaattactgttgataagctctctgcctcgagaatacaccgttatcaacgaggcctgtcccggggctgagtggaatattatgtgccgcgagtgttgcgagtacgatcaaatcgaatgcgtatgtccagggaaacgcgaagtggtgggctatacaatcccatgctgtcggaatgaagaaaacgagtgtgattcctgcctaattcatccaggctgtacaatctttgagaactgcaagtcatgtcgcaatgggtcgtggggcggaacgctcgacgacttctacgtcaaggggttctattgtgcagaatgccgcgctgggtggtatggcggagattgtatgagatgtggccaggtgctgagggcccccaagggacagattctgcttgaaagttaccctctgaacgctcactgcgagtggaccattcatgctaaaccaggcttcgttattcaactgcgatttgtgatgctatctttggagtttgactacatgtgtcaatacgactacgtggaagtgagagatggagacaaccgcgacggtcagattattaaaagagtctgtgggaatgagaggcctgctccaatacagtcaattgggtcatccctacacgtgctattccattccgacggttccaagaatttcgacggcttccatgcgatttacgaggaaattacagcctgctcctccagcccctgcttccacgacggaacttgtgttttagataaggccggatcatataaatgtgcttgccttgctggttataccggacagaggtgcgagaacctgttagaggctggcaaaagcaagatcaaggcatcagaggattccctctctgttcttgaggaaagaaactgcagcgatcctgggggcccagtgaacggctaccagaagatcaccggcggacccggactcatcaacgggagacacgctaaaattggaaccgtcgtctctttcttctgtaacaactcctatgtgttgagtggtaatgaaaaaagaacctgccagcaaaatggtgaatggagcggaaaacagccaatttgtattaaggcatgcagggagccaaagataagcgatttagtccgtcgtagagtcctacctatgcaagtacagtccagagagactcctcttcaccagttatactctgccgcattctcgaaacagaaactgcagtcagcaccaaccaaaaaacccgcattaccatttggcgatctccctatgggataccagcacctgcacacacagctccaatacgaatgcatcagtcccttttaccggcgactcggatcttcaaggaggacgtgcctgagaaccggaaaatggagcggtcgcgcgcccagttgcattcctatctgtggaaagatcgaaaacatcaccgcgcctaaaacacaaggactgagatggccttggcaggccgctatctaccgccgcacatcgggggtgcacgatgggtcacttcataagggtgcctggttcttagtttgctccggtgccctcgtcaatgaaagaacagtagtggtcgcagcacactgtgtcactgatctggggaaggttaccatgatcaaaacagccgacctcaaagttgttctgggcaagttctaccgcgatgacgaccgagatgaaaagactatccagtctctgcaaatttctgccattatacttcaccctaattatgatccaatactccttgacgccgatatcgctatccttaagctgctcgacaaagctagaatatccactcgcgtccagcctatctgcctggcagcatcacgcgatctttcaactagctttcaggagtctcacattactgttgcaggttggaacgtgctagccgacgtaagaagcccaggtttcaaaaatgacacccttcgaagtggcgttgtcagtgtggtagactccttgctgtgtgaagaacaacatgaagaccacgggatccctgtgtccgtcacagataacatgttctgcgcttcctgggagcccaccgccccctccgacatctgtacagccgagaccggtggcatcgcagctgtgtccttccctgggagagcttccccagagcccagatggcatcttatggggttagtttcctggagctacgacaaaacctgcagccatcgtctttctactgctttcactaaggtgcttccttttaaggactggatagagcggaacatgaagtag

SEQ ID NO: 186698 - DNA, 2786 bp, Artificial Sequence
  derived and/or modified sequence
cctccccagtagacgctcgggcaccagccgcggcaaggatggagctgggttgctggacgcagttggggctcacttttcttcagctccttctcatctcgtccttgccaagagagtacacagtcattaatgaagcctgccctggagcagagtggaatatcatgtgtcgggagtgctgtgaatatgatcagattgagtgcgtctgccccggaaagagggaagtcgtgggttataccatcccttgctgcaggaatgaggagaatgagtgtgactcctgcctgatccacccaggttgtaccatctttgaaaactgcaagagctgccgaaatggctcatgggggggtaccttggatgacttctatgtgaaggggttctactgtgcagagtgccgagcaggctggtacggaggagactgcatgcgatgtggccaggttctgcgagccccaaagggtcagattttgttggaaagctatcccctaaatgctcactgtgaatggaccattcatgctaaacctgggtttgtcatccaactaagatttgtcatgttgagcctggagtttgactacatgtgccagtatgactatgttgaggttcgtgatggagacaaccgcgatggccagatcatcaagcgtgtctgtggcaacgagcggccagctcctatccagagcataggatcctcactccacgtcctcttccactccgatggctccaagaattttgacggtttccatgccatttatgaggagatcacagcatgctcctcatccccttgtttccatgacggcacgtgcgtccttgacaaggctggatcttacaagtgtgcctgcttggcaggctatactgggcagcgctgtgaaaatcttctggaggctgggaagtccaagatcaaggcgtcagaagattcattgtctgtccttgaagaaagaaactgctcagaccctgggggcccagtcaatgggtaccagaaaataacagggggccctgggcttatcaacggacgccatgctaaaattggcaccgtggtgtctttcttttgtaacaactcctatgttcttagtggcaatgagaaaagaacttgccagcagaatggagagtggtcagggaaacagcccatctgcataaaagcctgccgagaaccaaagatttcagacctggtgagaaggagagttcttccgatgcaggttcagtcaagggagacaccattacaccagctatactcagcggccttcagcaagcagaaactgcagagtgcccctaccaagaagccagcccttccctttggagatctgcccatgggataccaacatctgcatacccagctccagtatgagtgcatctcacccttctaccgccgcctgggcagcagcaggaggacatgtctgaggactgggaagtggagtgggcgggcaccatcctgcatccctatctgcgggaaaattgagaacatcactgctccaaagacccaagggttgcgctggccgtggcaggcagccatctacaggaggaccagcggggtgcatgacggcagcctacacaagggagcgtggttcctagtctgcagcggtgccctggtgaatgagcgcactgtggtggtggctgcccactgtgttactgacctggggaaggtcaccatgatcaagacagcagacctgaaagttgttttggggaaattctaccgggatgatgaccgggatgagaagaccatccagagcctacagatttctgctatcattctgcatcccaactatgaccccatcctgcttgatgctgacatcgccatcctgaagctcctagacaaggcccgtatcagcacccgagtccagcccatctgcctcgctgccagtcgggatctcagcacttccttccaggagtcccacatcactgtggctggctggaatgtcctggcagacgtgaggagccctggcttcaagaacgacacactgcgctctggggtggtcagtgtggtggactcgctgctgtgtgaggagcagcatgaggaccatggcatcccagtgagtgtcactgataacatgttctgtgccagctgggaacccactgccccttctgatatctgcactgcagagacaggaggcatcgcggctgtgtccttcccgggacgagcatctcctgagccacgctggcatctgatgggactggtcagctggagctatgataaaacatgcagccacaggctctccactgccttcaccaaggtgctgccttttaaagactggattgaaagaaatatgaaatgaaccatgctcatgcactccttgagaagtgtttctgtatatccgtctgtacgtgtgtcattgcgtgaagcagtgtgggcctgaagtgtgatttggcctgtgaacttgggctgtgccagggcttctgacttcagggacaaaactcagtgaagggtgagtagacctccattgctggtaggctgatgccgcgtccactactaggacagccaattggaagatgccagggcttgcaagaagtaagtttcttcaaagaagaccatatacaaaacctctccactccactgacctggtggtcttccccaactttcagttatacgaatgccatcagcttgaccagggaagatctgggcttcatgaggccccttttgaggctctcaagttctagagagctgcctgtgggacagcccagggcagcagagctgggatgtggtgcatgcctttgtgtacatggccacagtacagtctggtccttttccttccccatctcttgtacacattttaataaaataagggttggcttctgaactacaaaacaaa

SEQ ID NO: 186699 - DNA, 2214 bp, Artificial Sequence
  derived and/or modified sequence
atggagctgggctgctggacccagctgggcctgaccttcctgcagctgctgctgatcagcagcctgcccagagagtacaccgtgatcaacgaggcctgccccggcgccgagtggaacatcatgtgcagagagtgctgcgagtacgaccagatcgagtgcgtgtgccccggcaagagagaggtggtgggctacaccatcccctgctgcagaaacgaggagaacgagtgcgacagctgcctgatccaccccggctgcaccatcttcgagaactgcaagagctgcagaaacggcagctggggcggcaccctggacgacttctacgtgaagggcttctactgcgccgagtgcagagccggctggtacggcggcgactgcatgagatgcggccaggtgctgagagcccccaagggccagatcctgctggagagctaccccctgaacgcccactgcgagtggaccatccacgccaagcccggcttcgtgatccagctgagattcgtgatgctgagcctggagttcgactacatgtgccagtacgactacgtggaggtgagagacggcgacaacagagacggccagatcatcaagagagtgtgcggcaacgagagacccgcccccatccagagcatcggcagcagcctgcacgtgctgttccacagcgacggcagcaagaacttcgacggcttccacgccatctacgaggagatcaccgcctgcagcagcagcccctgcttccacgacggcacctgcgtgctggacaaggccggcagctacaagtgcgcctgcctggccggctacaccggccagagatgcgagaacctgctggaggccggcaagagcaagatcaaggccagcgaggacagcctgagcgtgctggaggagagaaactgcagcgaccccggcggccccgtgaacggctaccagaagatcaccggcggccccggcctgatcaacggcagacacgccaagatcggcaccgtggtgagcttcttctgcaacaacagctacgtgctgagcggcaacgagaagagaacctgccagcagaacggcgagtggagcggcaagcagcccatctgcatcaaggcctgcagagagcccaagatcagcgacctggtgagaagaagagtgctgcccatgcaggtgcagagcagagagacccccctgcaccagctgtacagcgccgccttcagcaagcagaagctgcagagcgcccccaccaagaagcccgccctgcccttcggcgacctgcccatgggctaccagcacctgcacacccagctgcagtacgagtgcatcagccccttctacagaagactgggcagcagcagaagaacctgcctgagaaccggcaagtggagcggcagagcccccagctgcatccccatctgcggcaagatcgagaacatcaccgcccccaagacccagggcctgagatggccctggcaggccgccatctacagaagaaccagcggcgtgcacgacggcagcctgcacaagggcgcctggttcctggtgtgcagcggcgccctggtgaacgagagaaccgtggtggtggccgcccactgcgtgaccgacctgggcaaggtgaccatgatcaagaccgccgacctgaaggtggtgctgggcaagttctacagagacgacgacagagacgagaagaccatccagagcctgcagatcagcgccatcatcctgcaccccaactacgaccccatcctgctggacgccgacatcgccatcctgaagctgctggacaaggccagaatcagcaccagagtgcagcccatctgcctggccgccagcagagacctgagcaccagcttccaggagagccacatcaccgtggccggctggaacgtgctggccgacgtgagaagccccggcttcaagaacgacaccctgagaagcggcgtggtgagcgtggtggacagcctgctgtgcgaggagcagcacgaggaccacggcatccccgtgagcgtgaccgacaacatgttctgcgccagctgggagcccaccgcccccagcgacatctgcaccgccgagaccggcggcatcgccgccgtgagcttccccggcagagccagccccgagcccagatggcacctgatgggcctggtgagctggagctacgacaagacctgcagccacagactgagcaccgccttcaccaaggtgctgcccttcaaggactggatcgagagaaacatgaagtag

SEQ ID NO: 186700 - DNA, 2214 bp, Artificial Sequence
  derived and/or modified sequence
atggaactgggatgctggactcaactgggcttaacgtttctacagctgttgcttatcagttccctgccacgagagtataccgtgataaacgaggcctgtcccggtgcagaatggaacattatgtgtagagagtgctgcgaatacgatcagattgagtgtgtgtgcccgggcaaaagggaggtggtgggctataccattccttgttgccgtaatgaggagaacgagtgtgatagctgcctcatccacccaggctgcacaattttcgaaaattgcaagagttgtcgcaacgggtcttggggtgggaccctcgacgacttttacgttaagggtttctactgtgctgaatgtcgcgccggctggtatggcggggattgcatgcgctgcgggcaggtgttgagggcacccaagggtcagatcctgttggagagctacccactcaatgctcattgcgaatggactatacacgccaagcctggtttcgttatccagctgaggttcgtaatgttgtctctggaatttgattatatgtgccagtacgattatgtggaggtcagagacggggataacagggacggccaaatcattaagagggtttgtggtaatgaaagacccgcgccaattcaaagtattggcagcagcctccatgtgctgttccactccgatggatctaagaacttcgacgggttccatgcaatctatgaggaaatcaccgcctgcagctcttcaccttgtttccacgacggcacttgcgtactagataaggcaggcagctacaaatgcgcttgcctggctggttataccggacagcgatgtgagaatctccttgaagcaggaaagagtaaaattaaggctagtgaggattccctgagcgtcttggaggagcgaaattgctccgatccaggggggcctgtaaatggctaccagaagattacgggagggcccggtcttatcaacgggcgtcatgcaaagatcggaactgtagtgagcttcttctgcaataatagctatgtactctcgggaaacgaaaagagaacttgccagcagaacggggagtggtctggcaagcagcctatttgtatcaaggcttgccgtgaacctaaaatctcggatctcgtgcggaggcgggtgctccccatgcaggtccagtcaagggagacgccactgcaccagctctacagcgctgcttttagtaaacaaaaactacagagcgcaccaactaaaaagccagcccttcctttcggcgatctgcccatgggctaccaacatctccacacgcagctacagtacgagtgcatatctccattctatcgaagactggggtccagtcgccgaacatgtcttcggactggtaagtggagcgggagagcacccagctgtatacctatctgcggtaaaattgaaaatattaccgcgccaaagactcaaggtctgcgatggccctggcaagccgctatctaccggaggacctctggcgtccacgatggctcactgcataaaggcgcatggtttttagtgtgcagtggcgcactggtcaacgagaggaccgtggttgtggccgcccattgcgtgaccgacctcggcaaagttacaatgataaaaacagctgacttaaaagttgtgcttggtaagttctatagagatgacgacagggatgaaaaaaccatccagtccctccagatatccgccattattctccatcccaattatgaccccatcctgttggacgccgatatcgctatattgaagctgctggataaagctcgcatcagcacccgcgtccaaccgatatgtttagccgctagtagagatctcagtacatctttccaagagagccacatcaccgttgccggttggaatgtcctcgctgacgtaagaagccccggcttcaagaacgacaccttgcgatcaggtgtagtgagcgtcgtagactctcttctgtgcgaggaacaacacgaggatcacgggatcccagtgtctgtcactgacaacatgttttgtgctagttgggagcctactgctccgtctgacatttgcacagccgagactggcggtattgccgctgtgagctttcccggacgcgctagcccagaaccaagatggcatctgatggggctagttagttggagttacgacaagacttgctctcaccgcctcagcacggcatttactaaggtgctccctttcaaagactggatagaaagaaacatgaaatag

SEQ ID NO: 186701 - DNA, 2214 bp, Artificial Sequence
  derived and/or modified sequence
atggagctgggctgctggacccagctgggcctgaccttcctgcagctgctgctgatcagcagcctgccccgggagtacaccgtcatcaatgaggcctgccctggagctgagtggaacatcatgtgccgggagtgctgtgaatatgaccagattgaatgtgtgtgccctgggaagcgggaggtggtgggctacaccatcccctgctgcagaaatgaagaaaatgaatgtgacagctgcctgatccaccctggctgcaccatctttgagaactgcaagagctgcagaaatggctcctggggcggcaccctggatgacttctacgtgaagggcttctactgtgctgaatgtcgggccggctggtatggaggagactgcatgagatgtggccaggtgctgcgggcccccaagggccagatcctgctggagagctaccccctgaatgcccactgtgagtggaccatccacgccaagccaggcttcgtcatccagctgcgctttgtgatgctgagcctggagtttgactacatgtgccagtatgactatgtggaggtgagagatggagacaacagagatggccagatcatcaagagggtgtgtggaaatgaaagacctgcccccatccagagcatcggcagcagcctgcacgtgctcttccacagtgatggcagcaagaactttgatggcttccacgccatctatgaggagatcacagcctgcagcagcagcccctgcttccatgatggcacctgtgtgctggacaaggccggcagctacaagtgtgcctgcctggccggctacacaggccagagatgtgagaacctgctggaggccggcaagagcaagatcaaggccagcgaggacagcctgtctgtgctggaggagaggaactgcagcgaccccggcggccctgtgaatggctaccagaagatcactggaggccctggcctcatcaatggaagacatgccaagattggcaccgtggtgtccttcttctgcaacaacagctatgtgctgtctggaaatgagaagaggacctgccagcagaatggagagtggagcggcaagcagcccatctgcatcaaggcctgccgggagcccaagatcagtgacctggtgagaagaagagtgctgcccatgcaggtgcagagccgggagacccccctgcaccagctgtacagcgctgccttcagcaagcagaagctgcagagcgcccccaccaagaagccagccctgccctttggagacctgcccatgggctaccagcacctgcacacccagctgcagtatgagtgcatcagccccttctacagaaggctgggcagcagcaggaggacctgcctgaggacaggcaagtggagcggccgggcccccagctgcatccccatctgtgggaagattgagaacatcacagcccccaagacccagggcctgcgctggccctggcaggccgccatctacagaaggaccagcggcgtgcatgatggcagcctgcacaagggggcctggttcctggtgtgcagcggggccctggtgaatgaaagaacagtggtggtggccgcccactgtgtgacagacctgggcaaggtgaccatgatcaagacagctgacctgaaggtggtgctgggcaagttctacagagatgatgacagagatgagaagaccatccagagcctgcagatcagcgccatcatcctgcaccccaactatgaccccatcctgctggatgctgacatcgccatcctgaagctgctggacaaggcccgcatcagcaccagggtgcagcccatctgcctggccgccagccgggacctgagcaccagcttccaggagagccacatcaccgtggccggctggaatgtgctggctgatgtgcgcagccctggcttcaagaatgacaccctgcggtctggagtggtgtctgtggtggacagcctgctgtgtgaggagcagcacgaggaccacggcatccctgtgtctgtgacagacaacatgttctgtgcctcctgggagcccacagcccccagcgacatctgcacagctgagaccggcggcattgctgctgtgtccttccctggccgggccagccctgagccccgctggcacctgatgggcctggtgtcctggagctatgacaagacctgcagccaccggctgagcacagccttcaccaaggtgctgcccttcaaggactggattgaaagaaacatgaagtag

SEQ ID NO: 186702 - DNA, 2214 bp, Artificial Sequence
  derived and/or modified sequence
atggagctgggctgctggacccagctgggcctgaccttcctgcagcttctgttaatcagctctctgcctcgcgaatataccgtgatcaatgaggcttgcccaggtgcagaatggaacattatgtgtcgggagtgctgcgaatatgaccagattgaatgcgtgtgccccggtaaaagagaggtcgtgggttacaccatcccctgttgccggaacgaagagaacgagtgtgatagctgccttattcatcccggatgcactatcttcgaaaattgcaaatcttgccggaacgggtcctggggcgggactctggatgatttctacgtaaaaggtttttactgtgctgagtgcagggcaggctggtatggtggggattgcatgcgctgtggccaggtcctccgtgctccaaaaggacagattctgctggaatcctatcccctcaacgctcactgtgagtggacaatacacgcaaaaccagggtttgtgatccagttacggttcgtgatgctgagcttagaattcgactatatgtgtcagtatgattatgtcgaagtcagggatggggacaacagagatggacaaattatcaagagggtctgcgggaacgaaagaccagctcccattcagtcaatcggaagctcccttcatgtgctcttccacagcgatgggagcaagaactttgacggatttcatgctatttatgaagaaatcacagcgtgtagctcttccccgtgtttccatgacggcacctgcgtgcttgacaaggcgggctcatataagtgtgcatgcctggctgggtatactgggcaacgctgcgagaatctgctcgaggcgggtaagagtaagatcaaggcctcggaggactctttatccgtgcttgaggaacgcaattgttctgaccctggtggacctgttaatgggtatcagaagatcacggggggacctggtctaataaatggacgacatgcgaagattggaacagtcgtctcatttttctgcaacaatagctacgtcctgagcggtaatgagaagaggacctgtcaacagaatggtgaatggtctggaaaacagccaatctgcattaaggcatgtagggaacctaagatcagtgatctggtaagacgtcgcgtgctgcctatgcaggtgcagtcacgggaaacccccctacaccaattgtactcagccgcattctctaagcaaaaattacagtcagctcccactaagaagcctgctctgccatttggagacctgcccatgggctaccagcatctgcatacacagctacaatatgagtgtatcagtcccttctatcgccgcctgggctctagcaggaggacttgcctcagaacggggaaatggtcaggcagggcgccttcctgcatccccatctgcgggaaaattgaaaatataactgcaccaaaaacacaggggctgcgctggccctggcaggcagccatttataggagaacatctggagtccacgatggaagccttcataaaggagcctggtttctggtttgcagcggcgccctggtcaatgagaggacagtcgtggtcgcggcccactgcgtcacagatctcggtaaagtgactatgattaagactgcagacctgaaggtggtgctaggaaagttttacagggacgatgaccgggacgaaaagaccatacagagcctgcagatttcagccattatcctgcaccctaattacgaccccattctcctagacgctgacatcgcgatccttaagctccttgataaggcgaggattagtacgcgtgtgcagcctatttgcttagccgcgtctagagacttaagcacctccttccaggagagccatatcacagtggccggctggaacgttctcgcagatgtcaggtcccccggctttaagaatgacaccttgcgatccggcgtcgtttcagttgtggactcattgctgtgtgaagagcaacacgaagatcatggcatccctgtctctgtaaccgacaacatgttttgcgccagctgggagccaaccgctcctagcgatatttgtacagctgaaacgggcggcattgctgcagttagcttccctgggagagcctcacctgaaccgcgctggcatttaatgggcctggtgagttggtcttacgacaagacttgctcccatcggttgtccaccgcctttaccaaggttctgcccttcaaagactggatagagcggaatatgaagtag

SEQ ID NO: 186703 - RNA, 2214 nt, Artificial Sequence
  derived and/or modified sequence
auggagcuggguugcuggacccagcugggauuaacauuuuuacagcugcugcuuauuaguuccuugccucgagaauacaccgugaucaacgaggcauguccaggagccgaauggaauaucaugugucgcgaauguugugaguacgaucagauugaguguguuugccccgggaagcgggaggugguagguuacacaauaccgugcugucggaacgaagaaaacgagugcgacuccugucucauccacccuggcuguacuaucuuugaaaacugcaaguccugcaggaacgguucgugggggggcaccuuggaugauuuuuacguaaagggauuuuauugugccgaaugucgcgccggcugguauggcggggacuguaugcgcugcggccaaguacuuagagcaccuaaagggcaaauucugcuagaguccuauccacugaacgcccacugugaguggacaauccacgccaaaccaggcuucgucauucaguugagguuugugaugcucucucuagaguuugacuacaugugccaguacgauuacguggaggugagggacggugacaauagagacggacagauuaucaagagaguguguggcaaugaaaggccugcccccauccagagcaucggcucuagccuccacguucuguuucacuccgacggauccaaaaauuuugacgguuuucaugcaaucuacgaagaaaucacugcauguaguuccucaccaugcuuccacgauggcaccuguguccuggacaaggcugguagcuauaagugcgcaugccuggcgggauauaccggacagaggugugaaaaucuucuugaagcuggaaaaagcaagauaaaagccagcgaagacucccuuuccgugcucgaagaacggaacuguucugauccugggggcccagugaacggcuaucagaaaaucacagggggaccaggccugaucaacgggagacaugccaaaauugguacugugguaagcuucuuuugcaauaacaguuacguucugucuggaaaugaaaagcgcaccugccaacagaacggggaauggagcgggaaacaacccaucugcauuaaagcauguagagaaccaaagaucucggaucuugugaggagaagaguacuaccuaugcaagugcagucuagggaaacuccacuucaucagcuguauuccgccgcuuucagcaaacagaaacugcagucugcgccaacuaagaagccugcacuucccuucggagaucugccuaugggcuaucagcaucuacauacucaauugcaguaugaauguauuucacccuucuacagaaggcuggguagcucccgccggaccugcuuaagaaccgguaaguggucggggcgggcgcccuccuguaucccgaucugcggcaaaaucgagaauauaaccgcuccaaaaacgcaaggucugcgcuggccuuggcaggccgccauauauagacgcacgucuggaguccacgacggcucccuucauaaaggcgcuugguuucuuguguguagcggggcucuggugaacgaacgcacuguggugguggccgcucacugcgugaccgaccuuggaaaagucaccaugaucaagacagccgacuugaaagugguucuuggaaaguuuuauagagacgacgaucgggaugagaagacgauccagucacugcagauuucggcuauuauucuccacccgaauuaugauccaauccuucucgacgcugauauugccauucugaagcucuuagauaaggcuagaauaaguacccgagugcagcccaucugucucgcagcgagccgagaccucaguacaagcuuccaggagucucacauuacaguggcuggauggaauguacuugcagacgugagauccccuggauuuaagaacgauacccucagaagcggcguggugagugugguggauuccuugcuaugugaggaacagcacgaagaucaugggauaccggugucuguuacagauaauauguucugcgccaguugggaaccaacggccccuagugauauuugcaccgcagagacuggcgggaucgcagccguguccuuuccugggcgagccucuccugagcccagauggcaccucaugggccuuguaucuuggaguuacgauaagacaugcagccacaggcucuccacagccuuuaccaagguccugccauuuaaggacuggauugaacggaacaugaaauag

SEQ ID NO: 186704 - RNA, 2214 nt, Artificial Sequence
  derived and/or modified sequence
auggaacucgguuguuggacucaacucgggcugaccuucuugcaauuacuguugauaagcucucugccucgagaauacaccguuaucaacgaggccugucccggggcugaguggaauauuaugugccgcgaguguugcgaguacgaucaaaucgaaugcguauguccagggaaacgcgaaguggugggcuauacaaucccaugcugucggaaugaagaaaacgagugugauuccugccuaauucauccaggcuguacaaucuuugagaacugcaagucaugucgcaaugggucguggggcggaacgcucgacgacuucuacgucaagggguucuauugugcagaaugccgcgcugggugguauggcggagauuguaugagauguggccaggugcugagggcccccaagggacagauucugcuugaaaguuacccucugaacgcucacugcgaguggaccauucaugcuaaaccaggcuucguuauucaacugcgauuugugaugcuaucuuuggaguuugacuacaugugucaauacgacuacguggaagugagagauggagacaaccgcgacggucagauuauuaaaagagucugugggaaugagaggccugcuccaauacagucaauugggucaucccuacacgugcuauuccauuccgacgguuccaagaauuucgacggcuuccaugcgauuuacgaggaaauuacagccugcuccuccagccccugcuuccacgacggaacuuguguuuuagauaaggccggaucauauaaaugugcuugccuugcugguuauaccggacagaggugcgagaaccuguuagaggcuggcaaaagcaagaucaaggcaucagaggauucccucucuguucuugaggaaagaaacugcagcgauccugggggcccagugaacggcuaccagaagaucaccggcggacccggacucaucaacgggagacacgcuaaaauuggaaccgucgucucuuucuucuguaacaacuccuauguguugagugguaaugaaaaaagaaccugccagcaaaauggugaauggagcggaaaacagccaauuuguauuaaggcaugcagggagccaaagauaagcgauuuaguccgucguagaguccuaccuaugcaaguacaguccagagagacuccucuucaccaguuauacucugccgcauucucgaaacagaaacugcagucagcaccaaccaaaaaacccgcauuaccauuuggcgaucucccuaugggauaccagcaccugcacacacagcuccaauacgaaugcaucagucccuuuuaccggcgacucggaucuucaaggaggacgugccugagaaccggaaaauggagcggucgcgcgcccaguugcauuccuaucuguggaaagaucgaaaacaucaccgcgccuaaaacacaaggacugagauggccuuggcaggccgcuaucuaccgccgcacaucgggggugcacgaugggucacuucauaagggugccugguucuuaguuugcuccggugcccucgucaaugaaagaacaguaguggucgcagcacacugugucacugaucuggggaagguuaccaugaucaaaacagccgaccucaaaguuguucugggcaaguucuaccgcgaugacgaccgagaugaaaagacuauccagucucugcaaauuucugccauuauacuucacccuaauuaugauccaauacuccuugacgccgauaucgcuauccuuaagcugcucgacaaagcuagaauauccacucgcguccagccuaucugccuggcagcaucacgcgaucuuucaacuagcuuucaggagucucacauuacuguugcagguuggaacgugcuagccgacguaagaagcccagguuucaaaaaugacacccuucgaaguggcguugucagugugguagacuccuugcugugugaagaacaacaugaagaccacgggaucccuguguccgucacagauaacauguucugcgcuuccugggagcccaccgcccccuccgacaucuguacagccgagaccgguggcaucgcagcuguguccuucccugggagagcuuccccagagcccagauggcaucuuaugggguuaguuuccuggagcuacgacaaaaccugcagccaucgucuuucuacugcuuucacuaaggugcuuccuuuuaaggacuggauagagcggaacaugaaguag

SEQ ID NO: 186705 - protein, 486 aa, Artificial Sequence
  derived and/or modified sequence
MAWAPPGERLREDARCPVCLDFLQEPVSVDCGHSFCLRCISEFCEKSDGAQGGVYACPQCRGPFRPSGFRPNRQLAGLVESVRRLGLGAGPGARRCARHGEDLSRFCEEDEAALCWVCDAGPEHRTHRTAPLQEAAGSYQVKLQMALELMRKELEDALTQEANVGKKTVIWKEKVEMQRQRFRLEFEKHRGFLAQEEQRQLRRLEAEERATLQRLRESKSRLVQQSKALKELADELQERCQRPALGLLEGVRGVLSRSKAVTRLEAENIPMELKTACCIPGRRELLRKFQVDVKLDPATAHPSLLLTADLRSVQDGEPWRDVPNNPERFDTWPCILGLQSFSSGRHYWEVLVGEGAEWGLGVCQDTLPRKGETTPSPENGVWALWLLKGNEYMVLASPSVPLLQLESPRCIGIFLDYEAGEISFYNVTDGSYIYTFNQLFSGLLRPYFFICDATPLILPPTTIAGSGNWASRDHLDPASDVRDDHL

SEQ ID NO: 186706 - DNA, 5158 bp, Artificial Sequence
  derived and/or modified sequence
gggagacggtgcgggcggccgggagcgcagccctccgggaggcgggtcatggcctgggcgccgcccggggagcggctgcgcgaggatgcgcggtgcccggtgtgcctggatttcctgcaggagccggtcagcgtggactgcggccacagcttctgcctcaggtgcatctccgagttctgcgagaagtcggacggcgcgcagggcggcgtctacgcctgtccgcagtgccggggccccttccggccctcgggctttcgccccaaccggcagctggcgggcctggtggagagcgtgcggcggctggggttgggcgcggggcccggggcgcggcgatgcgcgcggcacggcgaggacctgagccgcttctgcgaggaggacgaggcggcgctgtgctgggtgtgcgacgccggccccgagcacaggacgcaccgcacggcgccgctgcaggaggccgccggcagctaccaggtaaagctccagatggctctggaacttatgaggaaagagttggaggacgccttgactcaggaggccaacgtggggaaaaagactgtcatttggaaggagaaagtggaaatgcagaggcagcgcttcagattggagtttgagaagcatcgtggctttctggcccaggaggagcaacggcagctgaggcggctggaggcggaggagcgagcgacgctgcagagactgcgggagagcaagagccggctggtccagcagagcaaggccctgaaggagctggcggatgagctgcaggagaggtgccagcgcccggccctgggtctgctggagggtgtgagaggagtcctgagcagaagtaaggctgtcacaaggctggaagcagagaacatccccatggaactgaagacagcatgctgcatccctgggaggagggagctcttaaggaagttccaagtggatgtaaagctggatcccgccacggcgcacccgagtctgctcttgaccgccgacctgcgcagtgtgcaggatggagaaccatggagggatgtccccaacaaccctgagcgatttgacacatggccctgcatcctgggtttgcagagcttctcatcagggaggcattactgggaggttctggtgggagaaggagcagagtggggtttaggggtctgtcaagacacactgccaagaaagggggaaaccacgccatctcctgagaatggggtctgggccctgtggctgctgaaagggaatgagtacatggtccttgcctccccatcagtgcctcttctccaactggaaagtcctcgctgcattgggattttcttggactatgaagccggtgaaatttcattctacaatgtcacagatggatcttatatctacacattcaaccaactcttctctggtcttcttcggccttactttttcatctgtgatgcaactcctcttatcttgccacccacaacaatagcagggtcaggaaattgggcatccagggatcatttagatcctgcttctgatgtaagagatgatcatctctaaaattctgttcccaagatgcagtcctagcgtagcgaacgttcctggagtggggtgaaggatatcaatatactaagttttaacagataccccatttaggtcagcacttgattcgttgttgctgtgaaatatgtccatgggacaaaagagggaatatgaaatatttgcatatgggaagattatagagcataataattttgtaaatggagcaatctcaacctctatttctagatcacattttcttgatgtcttccttcaaattaatgaccttggattacataaggatttctatgcattcattataatttgttattcctttcaatatccttgtatttcaaatcttccatataagaattagacatggcaattcttaaattgattcagaatggtctgatactattccagtatcacctccttaattctgtttctcctcgttttcctgattttccttctcattctctccttccccgctctgtctctctctccctgtcactctctctctcttgttccttattttttgtttcttacctcttactgtttaacctgttgcttccttctggattaatacatttagagccattcctttatatggtcacatttcctatgactttactcaattacttttaaaatcctttctattctgagactaatttttaagaattacaaagctcattcttctgaatctaatatcactaactcctagactttttccgttttctttggatacactttaagtaggaatttatcagaattttcattcaactcgttctttaatgcagatatttactagttataagaccttaaggctgggtgcagtggctcacgcctgtaatcccagcactttgggaggctgaggcgggtggatcacaagctcaggagttcaagaccagcctggccaacatggtgaaaccctgtctctactaaaaaaaaaaaaaaaatagaaaaattagctgggcatggtggcaggagcctgtaatcccagctattctggaggtggagacaggagaattgcttgaaccctggaggcggaggttgcagtgagccaatatctcaccactgtactccagcccagtgcgagactccatctcaaaaaagaaaaaagacctcaaacaacacttctctctctcttttagctgcttgttatggttcctatacatggaacaattatactggcctcactgtgttatggtaaatatttaaggtcatatttgatattgctggtttgaattcagcttttccatttaaatacattataatgatgatgatgaaatcatgataatatttaacttatttttaaagtatattctgtacctttccaacaaaaaggttaaaagtcattgaaggctaaccttactgccttctttgtatcactgtcttctaaataattattatgtctgggtacagtggctcacgcctgtaatcccagcactttgggaggccgaggtgggcagatcacgaggtcaggagattgagaccatcctggctaacacagtgaaaccccgtctctactaaaaatacaaaaagaaattagctgggcgtggtggtgggtgcctgttgtcccagctacttgggaggctgaggcaggagaatggcatgaacccaggaggcagagcttgtagtgagccgagatcgcgccactgcactccagccggggcaacagagcaagactccatctcaaaaataaataaataaataaataaataaataaataaataaataaatattacacaaatgctaaaatgtttaaatggtaaatgcttcaatgctaaccaaatattaattaatggcaaattatttaacattatctgataataatctgcagaaggtttaattttcctcctcaatttgaagttcaagatgtttttctcttccagggagattttttcgactgacatctttaacttaccttccaatcatattactaacgtagccttcttcctagattttttaattgtttgatcatgagcgaacacttctactctctgtgatagatttgcaaacagaggaaataacgcatcctcgtgtccctcttcttggtgttccacaggccatgtgtgccctagccctcgttcatgcaaggtctgtgtagggaaggtggacttcagctcagcaacagcatcccttcccacagggatcaggtgggtggcttgagataccccttccatggggcaccacccattcagtgagacggggaagccctgggtgggagggagaacacctccacatgtcttctactctctccataggatggaatgagtgtcccagtcccaggagtatccatttcccactgtgtagcccagtactctggtctcactgtctctgctgaatcctgtctcactgtgcatattattgtggtttatatcagtcagtaaaccaatgtgagtcttcatctcttgcattcttaggttcatagttttgtgtgtctcctgtaatgactcttctctttccctttccaactcctgaaagattgccactatttcctctggaactttgtttcgttaccagcaaaatcctcgacatccatacccgtttcctggctttccctctcctttcctctgaatggtagtcttttatattcagctgtccacttgacatcaaaatagacattttgaactcaatttgcctaaaacttacccacaaatttctccccaagtctctccctaactgcaacaacaaaaaccacaggcttctccctgtcactggatggcaactccattcttttgattgcttaagccaggcatccgattgagtactttcttgatttctccagcccacatccagtccatcggcaagccctgttggtcctaccttcagaatatgtccggggttcagttgtcctggccaccctgctgctgtaaccatggtcagaactccatcctgcccctctggattatgactttcgtttcctcacagtggtcctgcttgggctctaggcccttccactcccattctctctacagcagctgggctgattcctttagcacccaaggatatgttggcatcacagtgacttagataccatcacaaagacctcccattcaacttagagtgaaagtcagaatcctcacagtgaatccccaggccctagaggatgtgaacccccaggccctagaggatctgaacccccatccctcctctgattatctctcccacccccacttccctttgcattctgctccagctgccctggcctcatggctgggtttccaccaaagcaggcacttcccatcacagggccatttccccgcctgtggcttctgcttgacattcccttttccctgatatccccttgactcattattccctttcttccttaactcttctgagatccagcttctcagtgataccacacagccctactccccccagagcccatctagagctcacctttccagtcgcccttgccaggctcagtggaggctctttgttccccatacagtacgtgtcgtcgtactatattgttaggcttatttaatttatgtatgttttgcctttttgtgctaaatgtaaacaccacaaggggaggtatctttgtctgttgacaatgatacattcaatgtttctcaagcacccccaatgctggtttgtatgtggttatcattcaatctgtatttgttgaatgaataaatgattgactatgtggagagcaaaa

SEQ ID NO: 186707 - DNA, 1461 bp, Artificial Sequence
  derived and/or modified sequence
atggcctgggccccccccggcgagagactgagagaggacgccagatgccccgtgtgcctggacttcctgcaggagcccgtgagcgtggactgcggccacagcttctgcctgagatgcatcagcgagttctgcgagaagagcgacggcgcccagggcggcgtgtacgcctgcccccagtgcagaggccccttcagacccagcggcttcagacccaacagacagctggccggcctggtggagagcgtgagaagactgggcctgggcgccggccccggcgccagaagatgcgccagacacggcgaggacctgagcagattctgcgaggaggacgaggccgccctgtgctgggtgtgcgacgccggccccgagcacagaacccacagaaccgcccccctgcaggaggccgccggcagctaccaggtgaagctgcagatggccctggagctgatgagaaaggagctggaggacgccctgacccaggaggccaacgtgggcaagaagaccgtgatctggaaggagaaggtggagatgcagagacagagattcagactggagttcgagaagcacagaggcttcctggcccaggaggagcagagacagctgagaagactggaggccgaggagagagccaccctgcagagactgagagagagcaagagcagactggtgcagcagagcaaggccctgaaggagctggccgacgagctgcaggagagatgccagagacccgccctgggcctgctggagggcgtgagaggcgtgctgagcagaagcaaggccgtgaccagactggaggccgagaacatccccatggagctgaagaccgcctgctgcatccccggcagaagagagctgctgagaaagttccaggtggacgtgaagctggaccccgccaccgcccaccccagcctgctgctgaccgccgacctgagaagcgtgcaggacggcgagccctggagagacgtgcccaacaaccccgagagattcgacacctggccctgcatcctgggcctgcagagcttcagcagcggcagacactactgggaggtgctggtgggcgagggcgccgagtggggcctgggcgtgtgccaggacaccctgcccagaaagggcgagaccacccccagccccgagaacggcgtgtgggccctgtggctgctgaagggcaacgagtacatggtgctggccagccccagcgtgcccctgctgcagctggagagccccagatgcatcggcatcttcctggactacgaggccggcgagatcagcttctacaacgtgaccgacggcagctacatctacaccttcaaccagctgttcagcggcctgctgagaccctacttcttcatctgcgacgccacccccctgatcctgccccccaccaccatcgccggcagcggcaactgggccagcagagaccacctggaccccgccagcgacgtgagagacgaccacctgtag

SEQ ID NO: 186708 - DNA, 1461 bp, Artificial Sequence
  derived and/or modified sequence
atggcctgggcaccccctggggaaagactccgggaagacgcccgctgcccagtgtgtctcgattttctgcaagaaccggtctctgtcgattgcgggcacagcttttgtttaaggtgcatcagcgaattttgtgaaaagagtgacggggcccaaggtggtgtatacgcatgccctcaatgcaggggcccgtttaggccttcaggatttcggccgaaccgacagttagcaggtctggtcgagtcagtcaggcgacttggcttgggagctggaccaggggcaaggcggtgtgccaggcacggagaggacctgtctagattctgcgaggaagatgaagccgcactgtgctgggtgtgcgatgctggaccggaacatagaactcaccgcactgcccccctgcaggaagcggccgggtcatatcaggttaaattacagatggctctcgagctcatgcgcaaggagctggaggacgctttaactcaggaggctaatgtcgggaagaagaccgtgatctggaaagaaaaggtggaaatgcagcgtcagagatttaggttggaatttgagaagcacaggggtttccttgcgcaggaagagcagagacagctacgacgcctagaggccgaagaaagagcaactctacaaagacttagggagtccaagtctcgccttgtccagcagtcaaaggctctcaaggagttggcggacgaactgcaggagagatgtcagcgcccggccttgggactccttgaaggtgtgcgcggagtgctgagcagatccaaggcagtcaccagattagaagctgagaatatccctatggagttgaagaccgcttgttgcatacctggtcgcagggagctgctcagaaaatttcaagtagatgttaagctagatcctgcgactgcacacccctccctcctactgactgctgacctgcggtcggtacaagacggcgagccctggcgggacgtccccaataacccggagcggtttgacacatggccctgtatcttagggctgcagtcttttagcagtggacgtcattactgggaggtcctcgttggagagggagccgagtggggcctcggggtatgccaggatacactcccccgcaagggggaaactacccctagtcccgaaaacggggtgtgggccttatggttgttgaaaggaaacgaatacatggtcttggcctccccatcagtcccactgttgcagctggagagtccccggtgcattggtatatttcttgactacgaagctggtgaaatcagcttctataatgtgaccgatggaagttacatctacactttcaaccagttattcagcggtctcctacgcccgtacttctttatctgcgatgcaactccattaatactccccccaacaactattgccgggtcaggaaattgggccagccgggatcacctagaccccgcctctgatgtgagagatgatcatctctag

SEQ ID NO: 186709 - DNA, 1461 bp, Artificial Sequence
  derived and/or modified sequence
atggcctgggcccctcctggagagcggctgcgggaggatgcccgctgccctgtgtgcctggacttcctgcaggagcctgtgtctgtggactgtggccacagcttctgcctgcgctgcatcagcgagttctgtgagaagagtgatggagcccagggcggcgtgtatgcctgcccccagtgccggggccccttccggcccagcggcttccggcccaaccggcagctggccggcctggtggagagcgtgcggcggctgggcctgggcgccggccctggggcccggcgctgtgcccggcatggagaggacctgagccgcttctgtgaagaagatgaggccgccctgtgctgggtgtgtgatgctggccctgagcacaggacccacaggacagcccccctgcaggaggccgccggcagctaccaggtgaagctgcagatggccctggagctgatgaggaaggagctggaggatgccctgacccaggaggccaacgtgggcaagaagacagtcatctggaaggagaaggtggagatgcagaggcagcgcttccggctggagtttgagaagcaccggggcttcctggcccaggaggagcagaggcagctgcggcggctggaggccgaggagcgggccaccctgcagaggctgcgggagagcaagagccggctggtgcagcagagcaaggccctgaaggagctggctgatgagctgcaggagcgctgccagaggcctgccctgggcctgctggagggcgtgcggggcgtgctgagccgcagcaaggctgtgacccggctggaggccgagaacatccccatggagctgaagacagcctgctgcatccctggccggcgggagctgctgaggaagttccaggtggatgtgaagctggaccctgccacagcccaccccagcctgctgctgacagctgacctgcggtctgtgcaggatggagagccctggagagatgtgcccaacaaccctgagagatttgacacctggccctgcatcctgggcctgcagagcttcagcagcggccgccactactgggaggtgctggtgggggagggcgctgagtggggcctgggcgtgtgccaggacaccctgcccaggaagggggagaccacccccagcccagaaaatggagtgtgggccctgtggctgctgaagggaaatgagtacatggtgctggccagccccagcgtgcccctgctgcagctggagagcccccgctgcatcggcatcttcctggactatgaagctggggagatctccttctacaacgtgacagatggcagctacatctacaccttcaaccagctgttcagcggcctgctgcggccctacttcttcatctgtgatgccacccccctcatcctgccccccaccaccatcgccggcagcggcaactgggccagccgggaccacctggaccctgccagtgatgtgagagatgaccacctgtag

SEQ ID NO: 186710 - DNA, 1461 bp, Artificial Sequence
  derived and/or modified sequence
atggcctgggccccccccggcgagcggctgcgggaggacgcccggtgccctgtttgtctagatttcctgcaggaacctgtatctgtggattgtggacactcattttgtttgagatgtatttctgagttttgcgagaagtccgatggggcccagggcggcgtttacgcctgcccacagtgccgcggtcctttccggccatcgggcttccgccccaacaggcagctcgcaggactagtagaatccgtgcggaggctcgggctgggcgccggcccaggagctagaagatgcgcccgacacggcgaagacctcagcagattttgcgaggaagatgaggcagccctgtgctgggtttgcgatgcgggccccgaacacagaacccataggacagccccactgcaagaagcagccgggtcatatcaggtgaagttacagatggcactggaactgatgagaaaggaactggaggacgccctgactcaagaggcaaacgtcggcaaaaagaccgtcatatggaaggagaaggtcgagatgcagcgccagcggttccgcttggaatttgagaaacataggggtttcctcgctcaggaagaacaacgccagctcaggaggctggaggctgaggagagagccactcttcaacggctgagggagtcaaagtcaaggttggtacagcagagtaaagcactgaaagagctggccgatgaacttcaagagaggtgtcaacgacctgctttgggcctcttggagggagtgcgcggggtgctcagtcgcagcaaagccgtaacacggctggaagccgaaaatatacctatggagctgaagacggcctgctgcatccccgggcggagagaactgctaaggaaattccaagttgacgtgaagctggatcctgccacagcccacccctcgctcctgctgacagccgatctgcgaagtgttcaagacggtgaaccgtggcgcgatgtgccgaacaatccagagagattcgatacgtggccctgcatcctgggcctccaaagtttttcatcaggccgacactactgggaggttctggtgggggagggagccgagtggggcctgggagtctgccaggataccctgcccagaaagggcgaaacaactccgagccccgagaatggggtgtgggctctgtggctgttaaagggcaatgagtacatggttctcgctagccccagtgtcccgttgctgcagctggagtcaccaagatgcattggtatattcctggattacgaggctggtgaaatatccttttacaatgtaaccgacggtagctatatctacaccttcaatcagctcttttcaggcctgcttcggccttacttttttatatgtgacgctactcctcttattctccctccaactactatcgctggctccggaaactgggcctcccgggaccacctggaccccgccagtgatgtgagggatgatcacctgtag

SEQ ID NO: 186711 - DNA, 1461 bp, Artificial Sequence
  derived and/or modified sequence
atggcttgggctcctccaggcgaacgcctaagagaggatgccagatgtcctgtgtgtcttgattttttacaggagccagtgtctgtagattgtgggcattctttttgcttaaggtgcatatctgagttctgcgagaagtccgatggagcacaaggaggcgtctacgcctgtcctcagtgtcgcggtccgtttagaccatccggttttaggcccaatagacaactagccggacttgttgaatctgtcagacggctcggcctgggggcaggaccaggcgctcgacggtgtgcccgtcacggcgaggacttatcacgcttttgtgaagaggacgaggccgcactatgctgggtttgcgacgccggaccagaacacagaacccacagaaccgcccctcttcaagaggctgcaggaagctaccaggtgaagcttcagatggccctggagctgatgaggaaggagctcgaggacgccctcactcaggaggcaaatgtcgggaagaagacagtgatttggaaggagaaggtcgagatgcaaagacagcggttcagattggagttcgagaagcatagaggtttcttagctcaggaggagcagcgccagctgagaaggcttgaggctgaggagcgggctacactacagcgcctgagagagagtaaaagtaggctggttcaacagtctaaggccttgaaggagctcgcagacgaactccaggagcggtgtcagcgccctgccctgggccttttggaaggagtacggggagtactgagccgatcaaaggccgtcacccgcctggaagccgaaaacatccccatggagctgaagactgcttgctgtatccctggtcgtagggagctcttaaggaaattccaagtggatgtgaaactcgacccagccacggctcaccccagtttgctgctgacagcagatcttcgatcggtgcaggacggagagccgtggcgggatgtgccaaataaccccgagaggttcgatacctggccctgcatcttaggactacagagttttagctctggcagacactattgggaagtgcttgtgggcgaaggggcagagtggggattaggagtctgtcaggatacgctgcccagaaagggcgagactacaccctctccagaaaatggagtgtgggccctttggttgctgaaaggcaacgagtacatggtgctggcaagtccaagcgtgccattactccagttggaaagtccccgttgcattggcatattcctggattatgaggccggtgagatttcattttataatgtgaccgacggctcttacatttacacttttaaccagctattttccggactgctcaggccctacttcttcatttgcgacgccacacccctcattctgccacctaccaccatcgcaggaagcgggaactgggcttcacgggaccatctggacccagcatcggatgtccgggatgaccatctctag

SEQ ID NO: 186712 - DNA, 3225 bp, Artificial Sequence
  derived and/or modified sequence
gggagacggtgcgggcggccgggagcgcagccctccgggaggcgggtcatggcctgggcgccgcccggggagcggctgcgcgaggatgcgcggtgcccggtgtgcctggatttcctgcaggagccggtcagcgtggactgcggccacagcttctgcctcaggtgcatctccgagttctgcgagaagtcggacggcgcgcagggcggcgtctacgcctgtccgcagtgccggggccccttccggccctcgggctttcgccccaaccggcagctggcgggcctggtggagagcgtgcggcggctggggttgggcgcggggcccggggcgcggcgatgcgcgcggcacggcgaggacctgagccgcttctgcgaggaggacgaggcggcgctgtgctgggtgtgcgacgccggccccgagcacaggacgcaccgcacggcgccgctgcaggaggccgccggcagctaccaggtaaagctccagatggctctggaacttatgaggaaagagttggaggacgccttgactcaggaggccaacgtggggaaaaagactgtcatttggaaggagaaagtggaaatgcagaggcagcgcttcagattggagtttgagaagcatcgtggctttctggcccaggaggagcaacggcagctgaggcggctggaggcggaggagcgagcgacgctgcagagactgcgggagagcaagagccggctggtccagcagagcaaggccctgaaggagctggcggatgagctgcaggagaggtgccagcgcccggccctgggtctgctggagggtgtgagaggagtcctgagcagaagtaaggctgtcacaaggctggaagcagagaacatccccatggaactgaagacagcatgctgcatccctgggaggagggagctcttaaggaagttccaagtggatgtaaagctggatcccgccacggcgcacccgagtctgctcttgaccgccgacctgcgcagtgtgcaggatggagaaccatggagggatgtccccaacaaccctgagcgatttgacacatggccctgcatcctgggtttgcagagcttctcatcagggaggcattactgggaggttctggtgggagaaggagcagagtggggtttaggggtctgtcaagacacactgccaagaaagggggaaaccacgccatctcctgagaatggggtctgggccctgtggctgctgaaagggaatgagtacatggtccttgcctccccatcagtgcctcttctccaactggaaagtcctcgctgcattgggattttcttggactatgaagccggtgaaatttcattctacaatgtcacagatggatcttatatctacacattcaaccaactcttctctggtcttcttcggccttactttttcatctgtgatgcaactcctcttatcttgccacccacaacaatagcagggtcaggaaattgggcatccagggatcatttagatcctgcttctgatgtaagagatgatcatctctaaaattctgttcccaagatgcagtcctagcgtagcgaacgttcctggagtggggtgaaggatatcaatatactaagttttaacagataccccatttaggtcagcacttgattcgttgttgctgtgaaatatgtccatgggacaaaagagggaatatgaaatatttgcatatgggaagattatagagcataataattttgtaaatggagcaatctcaacctctatttctagatcacattttcttgatgtcttccttcaaattaatgaccttggattacataaggatttctatgcattcattataatttgttattcctttcaatatccttgtatttcaaatcttccatataagaattagacatggcaattcttaaattgattcagaatggtctgatactattccagtatcacctccttaattctgtttctcctcgttttcctgattttccttctcattctctccttccccgctctgtctctctctccctgtcactctctctctcttgttccttattttttgtttcttacctcttactgtttaacctgttgcttccttctggattaatacatttagagccattcctttatatggtcacatttcctatgactttactcaattacttttaaaatcctttctattctgagactaatttttaagaattacaaagctcattcttctgaatctaatatcactaactcctagactttttccgttttctttggatacactttaagtaggaatttatcagaattttcattcaactcgttctttaatgcagatatttactagttataagaccttaaggctgggtgcagtggctcacgcctgtaatcccagcactttgggaggctgaggcgggtggatcacaagctcaggagttcaagaccagcctggccaacatggtgaaaccctgtctctactaaaaaaaaaaaaaaaatagaaaaattagctgggcatggtggcaggagcctgtaatcccagctattctggaggtggagacaggagaattgcttgaaccctggaggcggaggttgcagtgagccaatatctcaccactgtactccagcccagtgcgagactccatctcaaaaaagaaaaaagacctcaaacaacacttctctctctcttttagctgcttgttatggttcctatacatggaacaattatactggcctcactgtgttatggtaaatatttaaggtcatatttgatattgctggtttgaattcagcttttccatttaaatacattataatgatgatgatgaaatcatgataatatttaacttatttttaaagtatattctgtacctttccaacaaaaaggttaaaagtcattgaaggctaaccttactgccttctttgtatcactgtcttctaaataattattatgtctgggtacagtggctcacgcctgtaatcccagcactttgggaggccgaggtgggcagatcacgaggtcaggagattgagaccatcctggctaacacagtgaaaccccgtctctactaaaaatacaaaaagaaattagctgggcgtggtggtgggtgcctgttgtcccagctacttgggaggctgaggcaggagaatggcatgaacccaggaggcagagcttgtagtgagccgagatcgcgccactgcactccagccggggcaacagagcaagactccatctcaaaaataaataaataaataaataaataaataaataaataaata

SEQ ID NO: 186713 - protein, 226 aa, Artificial Sequence
  derived and/or modified sequence
MADPGPDPESESESVFPREVGLFADSYSEKSQFCFCGHVLTITQNFGSRLGVAARVWDAALSLCNYFESQNVDFRGKKVIELGAGTGIVGILAALQGGDVTITDLPLALEQIQGNVQANVPAGGQAQVRALSWGIDHHVFPANYDLVLGADIVYLEPTFPLLLGTLQHLCRPHGTIYLASKMRKEHGTESFFQHLLPQHFQLELAQRDEDENVNIYRARHREPRPA

SEQ ID NO: 186714 - DNA, 681 bp, Artificial Sequence
  derived and/or modified sequence
atggccgaccccggccccgaccccgagagcgagagcgagagcgtgttccccagagaggtgggcctgttcgccgacagctacagcgagaagagccagttctgcttctgcggccacgtgctgaccatcacccagaacttcggcagcagactgggcgtggccgccagagtgtgggacgccgccctgagcctgtgcaactacttcgagagccagaacgtggacttcagaggcaagaaggtgatcgagctgggcgccggcaccggcatcgtgggcatcctggccgccctgcagggcggcgacgtgaccatcaccgacctgcccctggccctggagcagatccagggcaacgtgcaggccaacgtgcccgccggcggccaggcccaggtgagagccctgagctggggcatcgaccaccacgtgttccccgccaactacgacctggtgctgggcgccgacatcgtgtacctggagcccaccttccccctgctgctgggcaccctgcagcacctgtgcagaccccacggcaccatctacctggccagcaagatgagaaaggagcacggcaccgagagcttcttccagcacctgctgccccagcacttccagctggagctggcccagagagacgaggacgagaacgtgaacatctacagagccagacacagagagcccagacccgcctag

SEQ ID NO: 186715 - DNA, 681 bp, Artificial Sequence
  derived and/or modified sequence
atggccgaccctggcccggaccccgaatccgagtcggagtccgttttcccgcgtgaggtcgggctttttgcagactcctattcagagaaaagtcagttctgtttctgtggccatgtattgacaattactcaaaatttcgggtcccgcctgggagttgccgcccgggtctgggatgctgccctgtccctgtgtaactacttcgaatcccagaatgtggatttcaggggaaaaaaggtgattgaactaggagcgggcacaggcatcgttggaatccttgcagcgcttcagggtggagacgtaactattacagacttgcctctcgccctggaacagatacaggggaatgtgcaggccaacgtgcctgccggcggccaggcccaggtacgcgccctgagctggggtattgatcaccacgtctttccggccaactatgatctggtgctcggggctgatatcgtgtaccttgaacctactttcccattgctcctgggtaccttgcaacacctatgtagaccgcacggaaccatttatctggcatcgaagatgagaaaagaacatggtactgaaagtttctttcaacacctgctcccccaacattttcagcttgaattggctcagcgagacgaggacgagaatgtgaatatttacagagcacggcatcgggagccacgtccagcatag

SEQ ID NO: 186716 - DNA, 681 bp, Artificial Sequence
  derived and/or modified sequence
atggctgaccccggccctgaccctgagagcgagagcgagagcgtcttcccccgggaggtgggcctgtttgctgacagctacagcgagaagagccagttctgcttctgtggccacgtgctgaccatcacccagaactttggcagccggctgggcgtggccgcccgggtgtgggatgctgccctgagcctgtgcaactactttgagagccagaatgtggacttccggggcaagaaggtgattgagctgggcgccggcaccggcatcgtgggcatcctggccgccctgcagggcggagatgtgaccatcacagacctgcccctggccctggagcagatccagggcaatgtgcaggccaacgtgcctgctgggggccaggcccaggtgcgggccctgtcctggggcatcgaccaccacgtgtttcctgccaactatgacctggtgctgggcgctgacatcgtgtacctggagcccaccttccccctgctgctgggcaccctgcagcacctgtgccggccccacggcaccatctacctggccagcaagatgaggaaggagcacggcacagagagcttcttccagcacctgctgccccagcacttccagctggagctggcccagagagatgaagatgaaaatgtgaacatctaccgggcccggcaccgggagcccaggcctgcctag

SEQ ID NO: 186717 - DNA, 2563 bp, Artificial Sequence
  derived and/or modified sequence
ctcagggaggcggggctcgttccacagggacaccacgacggctcgcggcccccagcctctaccccgctccggatccgggatctgagcgccggccgcggtgcccaggcactcccttggcgggccggatggcggaccccggcccagatcccgaatctgagtcggaatcggtgttcccgcgggaggtcgggctctttgcagactcttactcggagaagagccagttctgtttctgtgggcatgtgctgaccatcacgcagaactttgggtcccgcctcggggtggcggcgcgcgtgtgggacgcggccctgagcctgtgcaattatttcgagagtcaaaatgtggatttccgaggcaagaaggtgatcgaactgggtgcggggacaggcatcgtggggatcttggcagcgctgcaggggggggatgttaccatcactgacctgcccctggccctagaacagatccagggcaacgtccaggccaatgtgccagctggaggccaggcccaggtgcgtgccttgtcctgggggattgaccatcatgtcttccctgcaaactatgacctggtgctgggggctgatatcgtgtacctggaacccaccttccctctgctgctggggaccctccaacacctgtgcaggccccatggcaccatctatctggcctccaagatgagaaaggagcatgggacagagagcttctttcagcacctcctgccccagcatttccaactggagctggctcagcgggatgaggatgaaaatgtcaacatctatagggccaggcacagggaaccaagacctgcttgacatcacccttgctgttcttctcaatctcttgctctaatgaaggaactgtgtatctcaaaaaccatatttccagagccacaaacatgaggaccaaaaaggatggatttccctggcctctctcactttcctccttccctctttgttaccccagatactcttgggcaggtgcagtgaggtgcctgcttacaaggaatcccagagttctggcagcactagtgttagaacaccaaggaggttcctggctcctgttctcagagaaggaggatggtaaggtatccaggatttttagggggtaagggagatatatgggatgtgagagcagtgattgtagacagactgtcactgatcacttccattcctgttgctgtttacacagaatggactttaaaaaaattctgtgggatttttttttctttttttctttttttttgagacagggtctcactctgtcatccaggctggagtgcagtggtgtgatcacagctcactgcagcctcaacctctgaaggcccagatgatcttcctgcctcagctccccaagtagctgggactagaggcatgcgccaccacacccggctaatttttgtattttcagtagagacagggtttcgccatgttgcccagggtggtctcaaactcctgggctcaagtgatccacccgccttgcctcccaaagtgctgggattgcaggcatggcccactgtgctagcctaggatttttttttttttttaagaaagaattaagccttaaaaatctattgtgcaagaacccaacttttactcaggagctgagaaggaagaagcctcaaaccacccatttcctgctttttagagatagagtctagtggaaccatggctctaactgggtcaagtcctcctagctctgaagctaaggctgcagagctgtcctttggactgtatttcttcatgctttccagagttagagccttgatcacggaacatcattgtgtgcagaagaatactgtacctagtactaagttcttttcatctttgatttttctttagcttcatcagtccttccttcctaatctctaatcccctgaagcctaacacagttcctaatgtgttttgccttaacctcttttctcttcccacattggtacttctggttggggctctctttacttactgcttaggcacatagtcaccttctctggactccctgcttccatgctttctccttcagtccattccgcaaactcttgtgatcttccaaaattagctctgattagctttcacttcctgtagaagcaagaacaagctcctctgcttggtacttagtctgtgtccatgtgatccaaaattaccttcctattgcatttcctactcctttgctacgtgtattggacctctggccaaattacaaaagatgtactctttgttctctaaaaccacactaaagttttctgacttctttcacactctttatgataatcctctgcctgaaaggctattgccacctgtcaaaatcttcattattctttgcctctttcctgagcctcttgcttgaatgtgatttctttctccctgagacccataaggttcatcttatgggaccttaatttgtcttgcatggacatttgtgattctcattttctcaccattaaattaccttggagggtagggctgtggtttactcctgtctaaacccctgaagcctaacacagttcctggcacacaacaggtgttcaacagatattgtgctcattcaataaatatttactcgctttgtttaa

SEQ ID NO: 186718 - DNA, 681 bp, Artificial Sequence
  derived and/or modified sequence
atggccgaccccggccccgaccccgagagcgagagcgagagcgtgtttccccgcgaagttgggctgttcgcagactcctattccgaaaagtctcaattttgtttctgtggacacgtactgaccattacccagaattttggaagtcgactgggagtcgcagcacgggtgtgggacgccgctcttagtctatgtaattattttgagtctcagaacgttgatttcaggggcaaaaaagtcatcgaacttggcgccgggacaggaatcgtcgggatcctggccgcgctgcagggaggcgacgtgacaattaccgatctaccactggcgcttgaacaaattcagggcaatgtgcaggcgaacgtgcccgctggcggccaggcgcaggtgcgcgccctgtcctggggaattgaccaccacgtgttccctgcgaattacgatcttgttctgggtgcagatattgtatatctggaacccacattcccactgcttctcggcactctgcagcacctttgtaggccccatggcaccatttatctggcaagcaagatgcgcaaagaacatggaacagagtctttcttccagcacctgctgccacagcatttccagctggagctggcacaaagggatgaggatgaaaacgtgaatatctacagagcgaggcacagggagcccaggccagcatag

SEQ ID NO: 186719 - DNA, 681 bp, Artificial Sequence
  derived and/or modified sequence
atggccgacccgggacctgacccggaatctgaaagcgagagcgttttcccgagggaagtaggcttgttcgccgattcttacagcgagaaatcccagttctgtttctgtgggcatgtactgacaattacccagaatttcggctccaggttaggcgtggccgctcgtgtgtgggatgcagccctctccctctgtaattatttcgaaagccagaacgtggactttcggggtaagaaagttatcgagctcggcgcaggaaccggcattgtgggaatactcgcggctctgcagggcggagatgtaacaatcacagatcttccactcgcactcgaacaaatccagggaaatgtgcaagcaaacgtgccagcaggaggccaggcacaggtgcgggcactcagttggggaattgaccaccacgtgttccccgcaaattatgatctggtgcttggcgcagatattgtatacttagaacctaccttcccccttttactgggaacgctgcaacacctgtgccggccacatggcactatatacctcgccagtaagatgcggaaagagcacggcaccgaatctttcttccagcacctgctgccccagcatttccagctagagctggcgcagcgggacgaggacgaaaatgtcaatatataccgggctcgtcatcgagaacccagacccgcttag

SEQ ID NO: 186720 - protein, 962 aa, Artificial Sequence
  derived and/or modified sequence
MASNSTKSFLADAGYGEQELDANSALMELDKGLRSGKLGEQCEAVVRFPRLFQKYPFPILINSAFLKLADVFRVGNNFLRLCVLKVTQQSEKHLEKILNVDEFVKRIFSVIHSNDPVARAITLRMLGSLASIIPERKNAHHSIRQSLDSHDNVEVEAAVFAAANFSAQSKDFAVGICNKISEMIQGLATPVDLKLKLIPILQHMHHDAILASSARQLLQQLVTSYPSTKMVIVSLHTFTLLAASSLVDTPKQIQLLLQYLKNDPRKAVKRLAIQDLKLLANKTPHTWSRENIQALCECALQTPYDSLKLGMLSVLSTLSGTIAIKHYFSIVPGNVSSSPRSSDLVKLAQECCYHNNRGIAAHGVRVLTNITVSCQEKDLLALEQDAVFGLESLLVLCSQDDSPGAQATLKIALNCMVKLAKGRPHLSQSVVETLLTQLHSAQDAARILMCHCLAAIAMQLPVLGDGMLGDLMELYKVIGRSATDKQQELLVSLATVIFVASQKALSVESKAVIKQQLESVSNGWTVYRIARQASRMGNHDMAKELYQSLLTQVASEHFYFWLNSLKEFSHAEQCLTGLQEENYSSALSCIAESLKFYHKGIASLTAASTPLNPLSFQCEFVKLRIDLLQAFSQLICTCNSLKTSPPPAIATTIAMTLGNDLQRCGRISNQMKQSMEEFRSLASRYGDLYQASFDADSATLRNVELQQQSCLLISHAIEALILDPESASFQEYGSTGTAHADSEYERRMMSVYNHVLEEVESLNRKYTPVSYMHTACLCNAIIALLKVPLSFQRYFFQKLQSTSIKLALSPSPRNPAEPIAVQNNQQLALKVEGVVQHGSKPGLFRKIQSVCLNVSSTLQSKSGQDYKIPIDNMTNEMEQRVEPHNDYFSTQFLLNFAILGTHNITVESSVKDANGIVWKTGPRTTIFVKSLEDPYSQQIRLQQQQAQQPLQQQQQRNAYTRF

SEQ ID NO: 186721 - DNA, 4417 bp, Artificial Sequence
  derived and/or modified sequence
agcgcgcggaagaaaaaccagcaagaaggcggcgggggaagatggcggtcctggggtagagtttgcaagctttctgactaggctagtcgagtaactattcgggtcatggcgtcaaactcaactaagtctttcctggcagatgccggctatggcgaacaggaactggatgccaactctgcccttatggaattggacaaaggcctaagatctggcaaacttggtgaacagtgtgaagcagttgttcgctttcccagactttttcagaagtatccattccctattcttatcaattctgcattcctaaagttagctgatgttttcagagttggaaataatttcctgaggctatgtgttcttaaagttacccaacaaagtgagaaacatttggagaagattctaaatgtggatgaatttgtgaagagaattttttctgtgattcatagtaatgatcctgtggcaagagccatcaccctccggatgttgggaagtctggcatcaataattcctgagaggaagaatgctcatcatagtattcgtcagagtttagattcacatgataatgtagaagttgaagctgctgtttttgctgctgcaaacttctctgcacagtcaaaggattttgctgtaggaatctgtaacaaaatcagtgaaatgattcaaggtttagcgacaccagtagacttgaagctaaaattgatacccattctacagcacatgcaccatgatgcaatcttggcttccagtgctcgtcagcttttacaacagctggtcacatcctatccgtccaccaaaatggtgattgtgtctttgcacactttcactctgcttgcagcgtcatctttggttgatacacctaagcagattcagcttctgttgcagtatttgaagaatgatcccaggaaggcagtaaagagacttgctattcaagatctgaaattacttgctaataaaacaccacatacttggagtagggagaatattcaggcactttgtgagtgtgccctccagactccttatgacagcttaaaactagggatgttgtctgtcctttccacactatcagggaccatcgccatcaaacattacttcagtatagttccaggaaatgtgagttcttctcccagatcttctgatttagtcaaattagcccaagagtgctgttaccataataacaggggcattgcagctcatggagttagagtcctaactaatataactgtttcttgtcaagaaaaggatcttttggcactggaacaagatgctgtctttggcctggaatccctactggtactttgtagtcaagatgatagtccaggtgctcaggccactttaaagattgctctaaactgtatggtgaagttggccaagggcaggccccatcttagccagtcagtagttgagaccttgttgactcaattgcacagtgctcaagacgctgcccggattttgatgtgccattgcctggcagccattgccatgcaactgccggtgctgggtgatgggatgcttggtgacctcatggagctgtacaaggtgattggacgatcagccacagacaagcaacaagaacttctggtgagtttggctactgtgatttttgttgcaagtcagaaggcattgtctgtggaaagtaaggcagtaattaagcagcagcttgaaagtgtctccaatggatggactgtataccgtattgccagacaggcttccagaatgggtaatcatgacatggccaaagagctttatcagagtttgctgactcaggttgcctcagaacatttctacttctggctaaatagtttgaaggagttttcacatgcagaacagtgtctcactgggttgcaagaggaaaattatagttcagcactttcttgcattgctgaatctttaaaattctatcacaaagggattgcttccttaacagcagctagtacaccactgaatcctttaagctttcagtgtgaatttgtaaaactcaggattgaccttttacaagccttctctcaacttatctgtacttgtaatagcctgaagacaagcccaccacctgcaattgccacaacaattgccatgaccttaggaaatgacctccagaggtgtggtcgcatctccaatcagatgaaacagtccatggaagaatttcgaagccttgcttctcgatatggagatctttaccaggcatcttttgatgctgactcagcaactttgaggaatgttgaactacagcagcagagctgtttactgatatctcatgcaatagaagccctgattttggatccagaatcagcaagtttccaggaatatggatctactggaacagcccatgctgatagtgaatatgaaagaagaatgatgtctgtatataatcatgtcttggaggaggtagaatcactcaatcggaaatatacccctgtttcttatatgcacacagcatgcctctgcaatgccatcattgctttgctgaaagttcccctttctttccagagatattttttccagaaactacagtctaccagcatcaagcttgctctgtcaccatcgccccggaatcctgcagagcccattgctgtccagaataaccagcagctggcgctaaaggtagagggagtggttcagcacggatctaaaccaggactcttccgcaaaattcagtctgtctgtctgaatgtttcttccacactgcagagtaaatctggacaagactacaagatacccattgacaacatgaccaatgagatggagcaaagggttgaacctcataatgattacttcagtactcaatttctgttgaactttgctatccttggaacacacaacattacagtggaatcttctgtgaaagatgccaatggtatagtatggaagactggtcccagaactaccatatttgtaaaatccctggaagacccttattcccagcaaattcgcttacaacagcagcaagcccagcagccattacagcagcagcagcaacgcaatgcctacacacggttttaaccatggaatgaatgcactgcagactctcaagagatcaatcaaattgccagaaacagtttggtttttcatatggaataagtattaaagttacagtgtagttcatttattcattgatttttgtaatgtaatattctggaaaaaattttgttttcttaaaaattttgtctgacagctgggcgtggttgctcacgcctgtaatcccagcactttgggaggctgaggtgggcggctcacgaggagatcaagaccatcctggctaacacagtgaaaccccgtctccactaaaaaatacaaaaaaattagccaagcatggtggcaggcgcctgtagtcccagctacttgggaggctgaggcaggagaatggtgtgaacctgggaggcggagcttgcagtgagccgagactgtgctccagcctgggcgacagagcgagactccgtctcaaaaaaataaataaatacattttgtctgaaaaataactgggatcctggccagaaagattgttctttcttgttttattattagttttttctgttgccaagcttttttttctttcaagaatagtcacatgttgagatcactgaattggtaaatttgaccgctactcttccaaaatacatcatttgctgcctgacttagacctaggattctgagttgttcattgggaggttctgaccagtcactacaaggtttatccatggtagcagaacctgagtccttctgtagatggacttgaaagtgttccgtgcaacatccagccttctggattatgaaagcccacagtctaacagtattgaaacatcctgctgtattagttcaaccacatatttatctcttcctgtgctaaagcagtctttattattttcatatttaattgaaacaaagagcagctagcaatttcatagaaaattaatttgttttttctgatgtgtctgcaactgtgtataatacagacatttcacattgtttccaaaagtgaagaacactcatttaatatcttcaatgttttaagttagaaggggtggatcttttcctttggttggtgattggtttggtttatacttgatgagttatgctagactgattgtttagagagagcagtctctttattacacaggctcagtttgttgggatgctcagggaacagagttttctggttagccagaaaacccccttttttcctattttaattctggttgaaaaccatgataaaatagactttcttagcacagtatggtagatataacttaactgctttttgattggggatcatttagggcttcaggatcacgatttctaaacatcagggatcatatggttgcagatgccgatgctataagtaatttggccggatgcagctcctaaggtaaagcagggtactttccctggaatttcctttttaaataaatatctgtttctttgcttg

SEQ ID NO: 186722 - DNA, 2889 bp, Artificial Sequence
  derived and/or modified sequence
atggcgtccaacagcacaaagagcttcctggccgacgccgggtatggtgaacaagagctggacgctaacagtgcacttatggagctggacaagggactgcgctccggtaaattaggtgagcagtgcgaggctgtggttcggtttccgcggctgtttcagaagtatcctttcccgattcttattaattcagccttccttaagctggcggatgtcttccgggtggggaataacttcctgcgactgtgcgtcttaaaggtcacacagcagtctgaaaaacacttagagaaaattctcaacgtcgacgagttcgtgaagagaatcttttccgtcattcattctaatgatcctgtagctagggccattaccttaaggatgctcggcagtcttgcctcaattattccagagagaaaaaatgcccaccacagcatacgccagtctcttgattcacacgacaatgtggaagtggaagctgcagtcttcgcagcggctaacttttccgctcagagtaaggactttgccgtcggaatctgcaataaaatctccgagatgattcaaggactggccactccagtggacctcaagttgaaactgattcctattcttcagcatatgcaccacgacgcaatcttggccagcagtgcaaggcagttgctgcagcagcttgtaacctcatacccctcaactaaaatggtgatcgttagtctccacacattcacattgctggccgcatccagtctcgtcgatacacctaagcagatccagctgctactgcaatatctcaagaacgatccacggaaagcagtgaagaggctggccatccaggacctcaaactgttggccaacaagacgccgcatacgtggtctcgcgaaaacattcaggctctgtgtgaatgcgcgctgcagactccgtacgacagtctgaaactgggcatgctgtctgttctgagcactctcagcggcactattgcgattaaacactattttagtatcgtccctggtaatgtatctagctccccccgatcaagcgacttagtgaagttagcccaggagtgttgctaccataataaccggggcatagccgctcacggcgtgagagtgctgaccaacataaccgtctcctgccaggaaaaagacctcctggctctggagcaagatgcggttttcggcctggagagtctgctcgtcctctgttcccaggatgacagcccaggagcccaagctacccttaaaatcgcactgaactgtatggtgaaattagctaagggacggcctcacttaagtcagtctgtggtggaaacactgctgacgcagttgcactctgcgcaggacgccgcgcggattctgatgtgccactgcctcgcagcaatcgctatgcagctgccagtcctaggtgatggtatgctcggagatttaatggaattgtacaaagtgatcggtagatccgccacagacaagcaacaggaacttcttgtgtctcttgccacagttattttcgtggccagtcagaaagccctgagtgtggaaagtaaggcagttattaagcagcagctcgaatccgtctctaacgggtggacagtctacaggatcgcccgtcaagcaagccgcatgggcaaccacgatatggccaaagaactgtatcagagtctactgacgcaagtagcttcagaacatttctatttctggttgaattctctgaaggaattcagccacgctgaacaatgtcttactggattgcaggaggagaactactcttccgccttgtcttgtatcgccgagtcgctgaagttctaccataagggcatcgcttccctgacagccgcgagtacacccctcaaccccctttcgttccagtgtgagttcgtaaaactgaggatcgacctgctccaggcattctcacaactgatatgtacatgcaattccttgaagacttcacccccgccagctattgccacaacaattgccatgactctgggcaacgaccttcaacggtgcgggagaatctccaaccagatgaagcagagcatggaagagtttcgaagcctggccagccgctatggggacctttatcaagccagctttgacgccgattctgcgacactccggaatgtggaactgcagcagcagtcttgcctgttaatttctcatgccattgaagccctgattttagaccctgagagcgccagctttcaggagtatgggtccaccggaaccgcccatgccgattcggagtatgaacgccgcatgatgtctgtatataaccacgtgttggaagaggttgaatcgctgaacaggaaatatactccggtgtcctacatgcataccgcttgcctgtgtaatgccataattgctcttctcaaagtacctctgagcttccagcggtacttctttcagaaactgcagagtacgagcatcaaattagctttatccccctccccccggaatcctgctgaacccatcgcggtacagaataaccagcagcttgctctgaaagtagagggcgtggttcagcatggcagtaagccgggactgtttcggaagatccagtcagtgtgtctgaacgtgtccagcacactgcagagcaaatccggccaggactataagattccgatagacaatatgacaaatgaaatggagcagcgtgttgagccccataatgactacttttccactcagttcctgctcaatttcgctattctaggtacacacaatatcaccgtggagtcctctgttaaggacgccaatggtatcgtttggaagacaggtcctcgcaccaccatatttgttaaaagcctcgaggacccttactcacagcagattcggctccagcagcagcaggctcagcagcctctgcagcagcagcaacagcgcaatgcctacacacggttctag

SEQ ID NO: 186723 - DNA, 2889 bp, Artificial Sequence
  derived and/or modified sequence
atggccagcaacagcaccaagagcttcctggctgatgctggctatggagagcaggagctggatgccaacagcgccctgatggagctggacaagggcctgcggagcggcaagctgggggagcagtgtgaggccgtggtgcgcttccccaggctcttccagaagtaccccttccccatcctgatcaacagcgccttcctgaagctggctgatgtgttccgggtgggcaacaacttcctgcggctgtgtgtgctgaaggtgacccagcagagcgagaagcacctggagaagatcctgaatgtggatgaatttgtgaagaggatcttcagcgtcatccacagcaatgaccctgtggcccgggccatcaccctgaggatgctgggcagcctggccagcatcatccctgagaggaagaatgcccaccacagcatccggcagagcctggacagccatgacaacgtggaggtggaggccgctgtgtttgctgctgccaacttcagcgcccagagcaaggactttgctgtgggcatctgcaacaagatcagcgagatgatccagggcctggccacccctgtggacctgaagctgaagctgatccccatcctgcagcacatgcaccatgatgccatcctggccagcagcgcccggcagctgctgcagcagctggtgaccagctaccccagcaccaagatggtgattgtgtccctgcacaccttcaccctgctggccgccagcagcctggtggacacccccaagcagatccagctgctgctgcagtacctgaagaatgaccccaggaaggctgtgaagaggctggccatccaggacctgaagctgctggccaacaagaccccccacacctggagccgggagaacatccaggccctgtgtgaatgtgccctgcagaccccctatgacagcctgaagctgggcatgctgtctgtgctgagcaccctgagcggcaccatcgccatcaagcactacttcagcatcgtgcctggaaatgtgagcagcagccccaggagcagtgacctggtgaagctggcccaggagtgctgctaccacaacaacagaggaattgctgcccacggcgtgcgggtgctgaccaacatcaccgtgtcctgccaggagaaggacctgctggccctggagcaggatgctgtgtttggcctggagagcctgctggtgctgtgcagccaggatgacagccctggggcccaggccaccctgaagatcgccctgaactgcatggtgaagctggccaagggccggccccacctgagccagagcgtggtggagaccctgctgacccagctgcacagcgcccaggatgctgcccgcatcctgatgtgccactgcctggccgccatcgccatgcagctgcctgtgctgggagatggcatgctgggggacctgatggagctgtacaaggtgattggccgcagcgccacagacaagcagcaggagctgctggtgtccctggccaccgtcatctttgtggccagccagaaggccctgtctgtggagagcaaggctgtgatcaagcagcagctggagagcgtgtccaatggctggacagtgtacagaattgcccggcaggccagcaggatgggcaaccacgacatggccaaggagctgtaccagagcctgctgacccaggtggccagcgagcacttctacttctggctgaacagcctgaaggagttcagccatgctgagcagtgcctgaccggcctgcaggaggagaactacagcagcgccctgagctgcatcgccgagagcctgaagttctaccacaagggcatcgccagcctgacagctgccagcacccccctgaaccccctgtccttccagtgtgaatttgtgaagctgagaattgacctgctgcaggccttcagccagctgatctgcacctgcaacagcctgaagaccagccccccaccagccatcgccaccaccatcgccatgaccctgggcaatgacctgcagagatgtggccgcatcagcaaccagatgaagcagagcatggaggagttccgcagcctggccagccgctatggagacctgtaccaggccagctttgatgctgacagcgccaccctgagaaatgtggagctgcagcagcagagctgcctgctgatcagccacgccatcgaggccctgatcctggaccctgagagcgccagcttccaggagtatggcagcactggaacagcccacgccgacagtgaatatgaaagaaggatgatgtctgtgtacaaccacgtgctggaggaggtggagagcctgaacaggaagtacacccctgtgtcctacatgcacacagcctgcctgtgcaatgccatcatcgccctgctgaaggtgcccctgtccttccagcgctacttcttccagaagctgcagagcaccagcatcaagctggccctgagccccagccccagaaatcctgctgagcccatcgctgtgcagaacaaccagcagctggccctgaaggtggagggcgtggtgcagcacggcagcaagccaggcctcttcaggaagatccagagcgtgtgcctgaatgtgagcagcaccctgcagagcaagagcggccaggactacaagatccccatcgacaacatgaccaatgagatggagcagagggtggagccccacaatgactacttcagcacccagttcctgctgaactttgccatcctgggcacccacaacatcaccgtggagagctctgtgaaggatgccaacggcatcgtgtggaagacaggccccaggaccaccatctttgtgaagagcctggaggacccctacagccagcagatccggctgcagcagcagcaggcccagcagcccctgcagcagcagcagcagagaaatgcctacacccgcttctag

SEQ ID NO: 186724 - DNA, 2889 bp, Artificial Sequence
  derived and/or modified sequence
atggccagcaacagcaccaagagcttcctggccgacgccggctacggtgagcaggagctggatgctaattctgctttgatggaactggataaaggactgcgatcaggcaagctgggagaacagtgtgaagccgtcgtgcgcttcccacggttgtttcaaaaatacccattccccatcctcattaattcggcattccttaaactcgctgatgtctttcgcgtgggtaataacttcctgaggctgtgtgttcttaaggtgacccaacagtcagagaaacatctcgagaagatcctcaatgtggatgagtttgttaaaagaatattcagcgtgatccactccaatgatcccgttgcacgagccatcacgctgagaatgttggggtccttggccagcatcatccctgagcgtaagaatgcacatcattctattcgccagagtctagactcacatgataatgtggaggtcgaggccgccgttttcgcagcagctaacttctctgcacagtccaaggatttcgcagtgggtatctgtaacaagatctctgaaatgatccaggggctggcgaccccggtggatctaaagctgaagctgattcccattttgcagcatatgcaccatgacgccatcctcgcgagctctgcacggcagttactccaacagctcgtcacctcttatccttccaccaagatggtaatcgtgtcgcttcatacttttacactgttggctgcctcctctctggtcgacacacccaagcagatacagctcctgctacagtatcttaagaacgacccaaggaaggctgttaagaggcttgctattcaggacttgaagttactcgctaacaaaacccctcatacttggagcagagaaaatattcaggccctgtgcgaatgcgctctccagactccgtatgattcactgaaactggggatgctctctgtgttaagtactctatctggtacaatcgctatcaagcactatttcagcattgtgccgggtaacgtatcatcctctcccagatcctctgatttagtgaaattggcccaggagtgctgctatcacaacaataggggaatcgctgcgcacggcgtacgggtgctcacaaacataaccgtctcgtgtcaagagaaggatctgcttgccctggaacaggacgctgtatttggcctggaatcactacttgttctctgtagccaggatgactcccctggtgcccaggctactcttaagatcgcccttaactgcatggtgaaactggccaaagggcggccacacctgagccagtccgtggtggagaccctcttgacccagttgcatagcgcccaggatgcggccagaatcctcatgtgtcattgcctagccgcaatagccatgcaactgcctgtgttaggggatggaatgctgggagatttaatggagctttacaaggttattggcagaagcgctacagacaagcaacaggagcttcttgtcagccttgctactgtgatcttcgtggctagtcagaaggccctgagtgtcgaatctaaggctgtcatcaagcagcagctcgaatccgtgagcaatgggtggacggtgtacaggattgctcggcaggcaagccgtatgggcaatcacgatatggcaaaggaactttatcagtccctgttaacccaggtcgcttctgagcacttctacttctggctcaactcattgaaggagttcagccatgcagaacaatgtctgacaggattacaggaagagaactactcctctgctctttcctgcatcgcggaatcgcttaaattctaccacaaaggcattgcgagcctgacggccgcaagtaccccactgaaccccctgtcctttcaatgtgaatttgtcaaactgagaattgatctgttgcaggccttcagccagctgatctgtacatgtaacagcctaaaaacgagccctcctcccgcgatcgcaacgaccatagccatgaccctgggcaatgatctccagagatgtggccggatatccaatcagatgaaacagtccatggaggaatttcggtccctggcctcgcgctatggagacctgtaccaggcctcttttgacgctgactccgctacccttagaaacgtggagttgcaacagcagagctgcctgctcatttctcacgctatcgaggcattaatcctggatccagagagcgccagctttcaggaatacggaagtactggtacagcacatgccgattcagagtatgaacggcgcatgatgagcgtctataatcatgttcttgaggaggtggagtcgctgaacaggaaatatacaccagtctcatatatgcacaccgcctgtctgtgtaatgcgataatcgcgttacttaaagtacccctgagctttcagcgatattttttccagaaactccagtcaacttccattaaattagctctgagccctagccctcggaacccagcagaacctatcgccgttcagaataatcaacagctggccctgaaggtggagggcgtggtgcagcacggcagcaaacccgggttgtttaggaagattcagtctgtctgcctgaacgtgtcatcgacactgcaaagcaagagtggacaggactataagatccctattgacaacatgactaacgagatggagcagagggtggaaccacacaacgattatttttctacacaatttctgcttaactttgctatactggggacacataacatcaccgttgagagctctgtgaaggacgcaaatggaatcgtctggaaaactggcccgagaaccacaatatttgtcaaaagcctggaggatccgtactctcagcagatacgcctgcaacagcaacaagcgcagcaacctttgcagcagcaacagcaacggaacgcctatacccggttttag

SEQ ID NO: 186725 - DNA, 2889 bp, Artificial Sequence
  derived and/or modified sequence
atggctagtaattctacaaagagcttcctggcagacgcaggctatggcgaacaggaactggacgcaaattcagcactaatggagctggataagggcctacggtccggtaaacttggggaacagtgtgaggcggtggtgcgctttccaagattgttccagaaataccccttcccaatcctgatcaatagtgcattcctgaaactcgcagacgtgttcagagtggggaacaatttcctgcggctctgcgtgctcaaggtgactcagcagagtgaaaagcacctggagaagattctgaacgttgacgaattcgttaaacgcatattctccgtgatacactccaatgaccctgttgcacgagcaatcacccttcgcatgctgggcagtctcgctagcattatacccgagcgcaaaaatgcccaccactcgatcagacagagcctcgacagccatgacaatgtggaggttgaagcggctgtcttcgcagccgctaatttcagcgctcagtccaaagacttcgcagtagggatctgcaataaaatcagtgaaatgatacagggactcgctacacccgtggaccttaagctgaaactgatccccatcctccagcatatgcatcatgatgcaatccttgcttctagcgccaggcagctcctccagcagctggtaacaagctacccatccaccaagatggtaatcgtgtccctgcataccttcaccttgctagcagcctcctcattggtggacactcctaaacagatccagctgctactacaatatctcaagaatgaccccagaaaggctgtgaagcgactggctatccaggacctcaaactcctggccaacaaaacgccccatacttggagcagagaaaatatccaagctttgtgcgagtgtgcgctgcagacgccctacgactctttaaaacttgggatgctgtcagtcctcagcaccctgagtggcaccatagcaatcaaacactattttagcatagtgcctggcaacgtgagttcgtctccccgaagttccgatcttgtgaagttagcacaggaatgttgctatcataacaatcgcggaatcgccgcacacggcgtgcgagtgctgactaatatcacagtgagttgtcaggagaaggacttgctcgcactagagcaggatgctgtttttgggctggagtctctgctggtcctctgttcacaggacgactctccaggcgcacaagctacgttgaagatagctcttaattgtatggtgaaactggccaagggtcgccctcatttgtcccagagtgtcgtcgaaactttgctgactcagctccactctgctcaggacgccgctcgaattttgatgtgtcattgtctggctgctattgccatgcagctgcccgtgctgggcgatggcatgctcggggacctcatggagctatataaagtgatcgggagatctgcaacggataagcagcaagagctgctggtgtccctggcaaccgtgatcttcgtggccagccagaaggctttgtctgtcgaaagcaaagctgtgatcaaacagcaattggagtcggtttcaaatggatggaccgtttaccggatcgctagacaagccagtcggatgggcaatcacgacatggctaaggagctttaccagtcactattaactcaggtagcaagcgagcacttctatttctggctaaactccttgaaggaattttcccatgccgaacaatgcctgactgggctccaggaggagaactactcctccgcactttcctgcatcgccgagagcctcaagttctatcacaagggaatagcctcactcacggcggcttcgaccccgctgaaccccctctcctttcaatgcgaattcgttaagttgcgaatcgacctgctgcaagctttcagccagttgatctgcacgtgtaattctctgaagacctcaccaccccctgccattgcaactaccattgccatgacccttggaaacgacctacaaaggtgtggcaggatatctaaccagatgaaacagagcatggaggagtttcggtcattggctagcaggtatggtgatctgtatcaggcatcctttgacgccgacagtgcaaccctgcgtaatgtcgaactgcagcagcagtcgtgcctgttaatttcacatgccatcgaagcgctaatcctggacccagaaagcgccagttttcaggaatacggctccacaggaacagcccatgccgattctgagtatgagcggaggatgatgtctgtttataaccacgtgctagaggaagttgaaagtctcaaccgaaagtatacacccgtttcatacatgcacactgcctgcctgtgcaatgcaattattgctctgctgaaggtgccactatctttccagaggtattttttccagaaactgcagtcaacatctattaagctcgccctgtcaccttctcccagaaaccccgctgagcctatcgccgtgcagaacaatcagcagctggccctgaaggtggagggggttgtgcagcacggatccaaaccgggtttattcaggaaaatccagtcagtgtgcttaaacgtgtcatctacgctgcagtcaaaatctgggcaggactacaagatccctatagataacatgactaacgagatggaacagagggtcgagccccacaacgattacttctccactcaattcctgctgaatttcgcgatcctggggacccataatataaccgtcgagtcctcagtgaaagatgctaacgggatcgtgtggaagaccgggcctcgaacaaccatctttgttaaatcgctggaggacccatacagccaacaaatccgactccagcagcagcaagctcagcaaccacttcagcagcagcaacagcgaaatgcatacacgagattctag

SEQ ID NO: 186726 - DNA, 2889 bp, Artificial Sequence
  derived and/or modified sequence
atggccagcaacagcaccaagagcttcctggccgacgccggctacggcgagcaggagctggacgccaacagcgccctgatggagctggacaagggcctgagaagcggcaagctgggcgagcagtgcgaggccgtggtgagattccccagactgttccagaagtaccccttccccatcctgatcaacagcgccttcctgaagctggccgacgtgttcagagtgggcaacaacttcctgagactgtgcgtgctgaaggtgacccagcagagcgagaagcacctggagaagatcctgaacgtggacgagttcgtgaagagaatcttcagcgtgatccacagcaacgaccccgtggccagagccatcaccctgagaatgctgggcagcctggccagcatcatccccgagagaaagaacgcccaccacagcatcagacagagcctggacagccacgacaacgtggaggtggaggccgccgtgttcgccgccgccaacttcagcgcccagagcaaggacttcgccgtgggcatctgcaacaagatcagcgagatgatccagggcctggccacccccgtggacctgaagctgaagctgatccccatcctgcagcacatgcaccacgacgccatcctggccagcagcgccagacagctgctgcagcagctggtgaccagctaccccagcaccaagatggtgatcgtgagcctgcacaccttcaccctgctggccgccagcagcctggtggacacccccaagcagatccagctgctgctgcagtacctgaagaacgaccccagaaaggccgtgaagagactggccatccaggacctgaagctgctggccaacaagaccccccacacctggagcagagagaacatccaggccctgtgcgagtgcgccctgcagaccccctacgacagcctgaagctgggcatgctgagcgtgctgagcaccctgagcggcaccatcgccatcaagcactacttcagcatcgtgcccggcaacgtgagcagcagccccagaagcagcgacctggtgaagctggcccaggagtgctgctaccacaacaacagaggcatcgccgcccacggcgtgagagtgctgaccaacatcaccgtgagctgccaggagaaggacctgctggccctggagcaggacgccgtgttcggcctggagagcctgctggtgctgtgcagccaggacgacagccccggcgcccaggccaccctgaagatcgccctgaactgcatggtgaagctggccaagggcagaccccacctgagccagagcgtggtggagaccctgctgacccagctgcacagcgcccaggacgccgccagaatcctgatgtgccactgcctggccgccatcgccatgcagctgcccgtgctgggcgacggcatgctgggcgacctgatggagctgtacaaggtgatcggcagaagcgccaccgacaagcagcaggagctgctggtgagcctggccaccgtgatcttcgtggccagccagaaggccctgagcgtggagagcaaggccgtgatcaagcagcagctggagagcgtgagcaacggctggaccgtgtacagaatcgccagacaggccagcagaatgggcaaccacgacatggccaaggagctgtaccagagcctgctgacccaggtggccagcgagcacttctacttctggctgaacagcctgaaggagttcagccacgccgagcagtgcctgaccggcctgcaggaggagaactacagcagcgccctgagctgcatcgccgagagcctgaagttctaccacaagggcatcgccagcctgaccgccgccagcacccccctgaaccccctgagcttccagtgcgagttcgtgaagctgagaatcgacctgctgcaggccttcagccagctgatctgcacctgcaacagcctgaagaccagccccccccccgccatcgccaccaccatcgccatgaccctgggcaacgacctgcagagatgcggcagaatcagcaaccagatgaagcagagcatggaggagttcagaagcctggccagcagatacggcgacctgtaccaggccagcttcgacgccgacagcgccaccctgagaaacgtggagctgcagcagcagagctgcctgctgatcagccacgccatcgaggccctgatcctggaccccgagagcgccagcttccaggagtacggcagcaccggcaccgcccacgccgacagcgagtacgagagaagaatgatgagcgtgtacaaccacgtgctggaggaggtggagagcctgaacagaaagtacacccccgtgagctacatgcacaccgcctgcctgtgcaacgccatcatcgccctgctgaaggtgcccctgagcttccagagatacttcttccagaagctgcagagcaccagcatcaagctggccctgagccccagccccagaaaccccgccgagcccatcgccgtgcagaacaaccagcagctggccctgaaggtggagggcgtggtgcagcacggcagcaagcccggcctgttcagaaagatccagagcgtgtgcctgaacgtgagcagcaccctgcagagcaagagcggccaggactacaagatccccatcgacaacatgaccaacgagatggagcagagagtggagccccacaacgactacttcagcacccagttcctgctgaacttcgccatcctgggcacccacaacatcaccgtggagagcagcgtgaaggacgccaacggcatcgtgtggaagaccggccccagaaccaccatcttcgtgaagagcctggaggacccctacagccagcagatcagactgcagcagcagcaggcccagcagcccctgcagcagcagcagcagagaaacgcctacaccagattctag

SEQ ID NO: 186727 - protein, 261 aa, Artificial Sequence
  derived and/or modified sequence
MAATAREDGASGQERGQRGCEHYDRGCLLKAPCCDKLYTCRLCHDNNEDHQLDRFKVKEVQCINCEKIQHAQQTCEECSTLFGEYYCDICHLFDKDKKQYHCENCGICRIGPKEDFFHCLKCNLCLAMNLQGRHKCIENVSRQNCPICLEDIHTSRVVAHVLPCGHLLHRTCYEEMLKEGYRCPLCMHSALDMTRYWRQLDDEVAQTPMPSEYQNMTVDILCNDCNGRSTVQFHILGMKCKICESYNTAQAGGRRISLDQQ

SEQ ID NO: 186728 - protein, 200 aa, Artificial Sequence
  derived and/or modified sequence
MAATAREDGASGQERGQRGCEHYDRGCLLKAPCCDKLYTCRLCHDNNEDHQLDRFKVKEVQCINCEKIQHAQQTCEECSTLFGEYYCDICHLFDKDKKQYHCENCGICRIGPKEDFFHCLKCNLCLAMNLQGRHKCIENVSRQNCPICLEDIHTSRVVAHVLPCGHLLHRTCYEEMLKELQMSIMYALCFRYDQVLETAG

SEQ ID NO: 186729 - protein, 188 aa, Artificial Sequence
  derived and/or modified sequence
MAATAREDGASGQERGQRGCEHYDRGCLLKAPCCDKLYTCRLCHDNNEDHQLDRFKVKEVQCINCEKIQHAQQTCEECSTLFGEYYCDICHLFDKDKKQYHCENCGICRIGPKEDFFHCLKCNLCLAMNLQGRHKCIENVSRQNCPICLEDIHTSRVVAHVLPCGHLLHRTCYEEMLKEYDQVLETAG

SEQ ID NO: 186730 - DNA, 603 bp, Artificial Sequence
  derived and/or modified sequence
atggccgccaccgccagagaggacggcgccagcggccaggagagaggccagagaggctgcgagcactacgacagaggctgcctgctgaaggccccctgctgcgacaagctgtacacctgcagactgtgccacgacaacaacgaggaccaccagctggacagattcaaggtgaaggaggtgcagtgcatcaactgcgagaagatccagcacgcccagcagacctgcgaggagtgcagcaccctgttcggcgagtactactgcgacatctgccacctgttcgacaaggacaagaagcagtaccactgcgagaactgcggcatctgcagaatcggccccaaggaggacttcttccactgcctgaagtgcaacctgtgcctggccatgaacctgcagggcagacacaagtgcatcgagaacgtgagcagacagaactgccccatctgcctggaggacatccacaccagcagagtggtggcccacgtgctgccctgcggccacctgctgcacagaacctgctacgaggagatgctgaaggagctgcagatgagcatcatgtacgccctgtgcttcagatacgaccaggtgctggagaccgccggctag

SEQ ID NO: 186731 - DNA, 567 bp, Artificial Sequence
  derived and/or modified sequence
atggccgccaccgccagagaggacggcgccagcggccaggagagaggccagagaggctgcgagcactacgacagaggctgcctgctgaaggccccctgctgcgacaagctgtacacctgcagactgtgccacgacaacaacgaggaccaccagctggacagattcaaggtgaaggaggtgcagtgcatcaactgcgagaagatccagcacgcccagcagacctgcgaggagtgcagcaccctgttcggcgagtactactgcgacatctgccacctgttcgacaaggacaagaagcagtaccactgcgagaactgcggcatctgcagaatcggccccaaggaggacttcttccactgcctgaagtgcaacctgtgcctggccatgaacctgcagggcagacacaagtgcatcgagaacgtgagcagacagaactgccccatctgcctggaggacatccacaccagcagagtggtggcccacgtgctgccctgcggccacctgctgcacagaacctgctacgaggagatgctgaaggagtacgaccaggtgctggagaccgccggctag

SEQ ID NO: 186732 - DNA, 786 bp, Artificial Sequence
  derived and/or modified sequence
atggccgccactgcaagggaagacggcgcatctggccaggaacgagggcaacgcggctgcgagcactacgatagaggatgcctcttgaaggcaccgtgctgtgataagttgtacacttgccgcctgtgtcatgataacaacgaagatcatcagctggaccggtttaaggtgaaggaggtgcagtgtattaattgcgagaagattcagcatgcacaacagacctgtgaggaatgctctactctcttcggcgaatactattgcgacatttgtcatctatttgacaaagacaagaagcaatatcattgtgagaattgcgggatctgtcgcatcggacctaaggaagatttcttccactgcctgaaatgcaatctgtgtctcgctatgaatctccaaggacgccacaaatgcatagagaatgtcagccgccagaattgccctatttgcctcgaggacatccacacctcccgagtggttgctcatgtcttgccctgcggccatttacttcatcgaacttgttacgaggaaatgttaaaagaagggtaccgttgtcccttgtgcatgcactcggccctcgacatgacaaggtactggagacagctggatgacgaggtagctcaaactcctatgccctccgagtatcagaacatgaccgtggacatcctgtgtaatgattgtaacggccgaagcactgtgcaattccacattctaggaatgaagtgcaagatatgtgagagttataacacagcccaggcgggcggccggcgtattagcttagaccagcagtag

SEQ ID NO: 186733 - DNA, 603 bp, Artificial Sequence
  derived and/or modified sequence
atggccgccaccgcacgagaagacggtgccagtgggcaggaacgtggtcagcgcggctgtgaacattatgacaggggctgcctgttgaaagccccttgctgtgataagctgtatacttgcaggttatgccatgacaacaacgaggaccaccagctcgaccgattcaaagtgaaagaggtgcagtgcattaactgcgagaaaattcagcacgcacaacagacctgcgaagagtgctctactctgttcggcgagtattactgcgacatttgtcatctgtttgataaagataagaagcagtaccactgcgaaaactgcggaatttgcagaattggacctaaggaggatttcttccattgcctcaaatgcaacctctgcctggccatgaatctgcaaggccgtcacaagtgtatcgaaaacgtgtctcgtcaaaactgcccaatttgcctggaggacattcatacatctagggtggtcgcgcacgttctcccctgtgggcatctcctacacagaacgtgctacgaggaaatgttgaaggagctgcagatgagtatcatgtatgctctgtgctttaggtacgatcaggttctagagacagcaggctag

SEQ ID NO: 186734 - DNA, 567 bp, Artificial Sequence
  derived and/or modified sequence
atggccgcgactgctcgtgaggatggtgcatctgggcaggaaagagggcagcgcggctgcgaacattatgaccgcggttgtcttcttaaagctccatgctgtgataagctgtacacctgccggctctgccatgataataatgaggaccatcaactcgaccggtttaaagttaaggaggtccaatgtatcaactgcgaaaaaatccagcacgcccagcaaacctgtgaggagtgttctacactgttcggcgagtactattgcgacatatgccatttatttgataaggacaagaagcagtaccattgtgagaattgtggtatttgtaggatcggacctaaagaggattttttccattgcctgaagtgcaatctctgtctcgcaatgaatctgcaagggcggcataaatgcatagaaaacgtttcccgacagaactgccccatctgcctcgaagatattcacacctcccgagtagtggcccacgtgctaccctgtggtcacctgttgcaccggacgtgctatgaggaaatgttgaaggagtacgaccaggttctcgagactgcaggctag

SEQ ID NO: 186735 - DNA, 786 bp, Artificial Sequence
  derived and/or modified sequence
atggccgccacagccagagaagatggagccagcggccaggagcggggccagaggggctgtgagcactatgaccggggctgcctgctgaaggccccctgctgtgacaagctgtacacctgccgcctgtgccacgacaacaatgaagaccaccagctggaccgcttcaaggtgaaggaggtgcagtgcatcaactgtgagaagatccagcacgcccagcagacctgtgaagaatgttccaccctgtttggagagtactactgtgacatctgccacctgtttgacaaggacaagaagcagtaccactgtgagaactgtggcatctgccgcatcggccccaaggaggacttcttccactgcctgaagtgcaacctgtgcctggccatgaacctgcagggccgccacaagtgcattgaaaatgtgtcccggcagaactgccccatctgcctggaggacatccacaccagccgggtggtggcccacgtgctgccctgtggccacctgctgcacaggacctgctatgaggagatgctgaaggagggctaccgctgccccctgtgcatgcacagcgccctggacatgacccgctactggaggcagctggatgatgaggtggcccagacccccatgcccagcgagtaccagaacatgacagtggacatcctgtgcaatgactgcaatggccgcagcacagtgcagttccacatcctgggcatgaagtgcaagatctgtgagagctacaacacagcccaggccggcggccgccgcatcagcctggaccagcagtag

SEQ ID NO: 186736 - DNA, 603 bp, Artificial Sequence
  derived and/or modified sequence
atggccgccacagccagagaagatggagccagcggccaggagcggggccagaggggctgtgagcactatgaccggggctgcctgctgaaggccccctgctgtgacaagctgtacacctgccgcctgtgccacgacaacaatgaagaccaccagctggaccgcttcaaggtgaaggaggtgcagtgcatcaactgtgagaagatccagcacgcccagcagacctgtgaagaatgttccaccctgtttggagagtactactgtgacatctgccacctgtttgacaaggacaagaagcagtaccactgtgagaactgtggcatctgccgcatcggccccaaggaggacttcttccactgcctgaagtgcaacctgtgcctggccatgaacctgcagggccgccacaagtgcattgaaaatgtgtcccggcagaactgccccatctgcctggaggacatccacaccagccgggtggtggcccacgtgctgccctgtggccacctgctgcacaggacctgctatgaggagatgctgaaggagctgcagatgagcatcatgtatgccctgtgcttccgctatgaccaggtgctggagacagctggatag

SEQ ID NO: 186737 - DNA, 567 bp, Artificial Sequence
  derived and/or modified sequence
atggccgccacagccagagaagatggagccagcggccaggagcggggccagaggggctgtgagcactatgaccggggctgcctgctgaaggccccctgctgtgacaagctgtacacctgccgcctgtgccacgacaacaatgaagaccaccagctggaccgcttcaaggtgaaggaggtgcagtgcatcaactgtgagaagatccagcacgcccagcagacctgtgaagaatgttccaccctgtttggagagtactactgtgacatctgccacctgtttgacaaggacaagaagcagtaccactgtgagaactgtggcatctgccgcatcggccccaaggaggacttcttccactgcctgaagtgcaacctgtgcctggccatgaacctgcagggccgccacaagtgcattgaaaatgtgtcccggcagaactgccccatctgcctggaggacatccacaccagccgggtggtggcccacgtgctgccctgtggccacctgctgcacaggacctgctatgaggagatgctgaaggagtatgaccaggtgctggagacagctggatag

SEQ ID NO: 186738 - DNA, 786 bp, Artificial Sequence
  derived and/or modified sequence
atggccgccaccgcccgggaggacggcgccagcggccaggagcggggtcagcgagggtgcgagcattacgatcgaggatgcttactgaaagcaccatgttgcgacaagctctatacatgccgcctgtgccacgacaataatgaagaccatcaactggaccgcttcaaagttaaagaagtgcagtgtatcaactgcgagaaaatacagcacgcccagcaaacttgcgaggagtgttctacgctatttggcgagtactactgtgatatctgccacctgttcgacaaggacaaaaaacagtaccactgtgaaaattgcggcatctgcaggattggcccgaaggaggatttcttccactgtcttaaatgcaacctgtgtctggccatgaacttgcaggggagacataagtgcatcgagaacgttagccgccaaaattgtccaatctgccttgaagatatccatacctcacgagtagtggcccacgtgctgccttgtggacacctgctccatcgtacctgctacgaagaaatgctgaaggaaggatatagatgccctctatgcatgcactctgcgctggacatgacacggtactggaggcagttggacgacgaagtagcacagaccccaatgccctctgaataccagaacatgacggtggacatcctgtgcaacgactgcaacggcagaagcacagtgcaatttcacatcttgggaatgaaatgtaaaatttgtgagtcctataacacagctcaggccggcggccgccgaatcagtctggaccaacagtag

SEQ ID NO: 186739 - DNA, 603 bp, Artificial Sequence
  derived and/or modified sequence
atggccgccaccgcccgggaggacggcgccagcggccaggagcggggccagcggggttgcgaacactatgacaggggatgcctgctcaaagccccttgttgtgataaactgtacacatgcaggctctgccacgataataacgaggatcatcaacttgaccgattcaaggtgaaggaagttcaatgtatcaattgcgaaaagatacagcacgcacagcaaacctgtgaggagtgctcaactctgtttggggagtactattgcgatatctgtcacttgtttgataaagacaagaaacaataccattgtgaaaactgtgggatctgtcgaattgggcctaaggaggacttctttcactgcttgaaatgtaacctctgtcttgccatgaacctgcaaggcaggcataaatgtatcgagaacgtatccagacagaactgccccatctgcttagaagatattcatacctccagagtggtcgcgcacgttctcccctgcggccacctgctgcacagaacgtgttatgaagaaatgctcaaagagctacaaatgtccataatgtacgcgctttgcttccgatatgatcaggttcttgaaaccgccggatag

SEQ ID NO: 186740 - DNA, 567 bp, Artificial Sequence
  derived and/or modified sequence
atggccgccaccgcccgggaggacggcgccagcggccaggagcggggccagagggggtgtgagcattacgatagggggtgccttctcaaagcaccgtgctgtgacaagctctacacatgccgcttatgccacgacaacaacgaagaccaccagttggatcgattcaaagtgaaggaagtgcagtgtattaattgcgagaagatccagcatgcacaacagacatgtgaagaatgtagcaccttgttcggtgagtactactgtgatatctgccacctgtttgataaagacaagaagcagtaccactgtgagaattgtggaatctgtaggatcggaccaaaagaggacttctttcactgcctgaaatgtaatctgtgcctggccatgaacctacaagggcggcacaagtgtattgagaatgtcagcaggcagaactgccccatctgcttggaggatatccacacatcccgtgtggttgcacatgtgctcccttgtggacacctcctccaccggacatgctacgaagaaatgttaaaagagtacgatcaggtgctcgagacagctggatag

SEQ ID NO: 186741 - DNA, 786 bp, Artificial Sequence
  derived and/or modified sequence
atggccgcaacagccagagaggacggcgcttctgggcaagaaagagggcaaagggggtgtgaacattacgaccgcggatgccttctcaaagccccatgttgcgacaaattatacacatgtagactttgccacgacaacaatgaggaccatcagttagacagattcaaagtgaaggaggttcagtgcattaactgtgagaagatccagcatgcccaacagacatgtgaggagtgttctaccttgtttggagaatactactgtgatatatgccatctcttcgataaggataagaagcagtaccactgcgaaaattgcgggatttgccggatcgggcctaaggaagactttttccactgtctgaaatgtaatttatgcctcgcaatgaatctgcagggacgacacaaatgcattgagaacgtgagtagacaaaactgtccgatttgcctggaagatatccacacatcccgagtggtcgcccacgtactgccctgcggccaccttctccatcgtacatgttacgaggagatgctgaaggagggctaccgatgcccactgtgtatgcactctgcactcgatatgaccagatattggcggcaacttgatgacgaggtggcccaaactcctatgccctccgagtaccaaaatatgacggttgatattctgtgcaacgactgcaacggtagatccaccgtgcagtttcacatattaggcatgaagtgcaagatctgtgaaagctataatacagctcaggccggaggtaggagaatcagtttagaccagcagtag

SEQ ID NO: 186742 - DNA, 603 bp, Artificial Sequence
  derived and/or modified sequence
atggctgccactgctcgtgaggatggggcttccggccaggaacgtggtcagagaggttgtgaacactacgaccgcggatgcctgctcaaggcaccatgctgtgacaagctctatacctgtcgattgtgccatgataataatgaagaccaccagcttgatcggtttaaagtgaaggaggtacagtgtattaactgtgagaagatacagcatgcacagcagacctgtgaagagtgtagcacattattcggtgagtactattgcgacatctgtcacctgtttgacaaggataaaaagcagtaccactgcgagaattgcggaatatgtcggattggacctaaagaggacttcttccactgtctgaaatgcaacctgtgcctggctatgaatctccaaggacgacataagtgcattgaaaatgtgtcgcgacagaactgcccaatttgcctggaagatatccatacttcacgcgtggtagctcacgttctgccctgcggacatttgctgcatcgcacctgctatgaagagatgcttaaggaattgcagatgagtataatgtatgctttgtgttttagatatgaccaggttctggaaacggcaggttag

SEQ ID NO: 186743 - DNA, 567 bp, Artificial Sequence
  derived and/or modified sequence
atggccgctaccgctagggaggatggggcatcgggccaggagagaggtcagagaggttgtgagcactacgataggggctgtctgctaaaagcaccttgctgtgacaaactgtacacatgtaggctgtgccacgacaacaacgaggatcaccagctcgatcggtttaaggtcaaggaagtgcagtgtatcaattgcgaaaagatccagcacgcacagcagacatgcgaagagtgcagcacgctgttcggcgagtactattgtgacatatgccacctgtttgacaaggacaagaagcagtatcactgcgaaaactgtgggatttgcaggatcggcccaaaggaggatttctttcactgtctcaagtgtaatctctgcctcgccatgaatctgcagggacgtcacaagtgcattgaaaacgtctcaaggcagaattgccccatctgtctagaagatatccacacatcacgggtggtagcccatgtgctgccttgcggacacctgttacatcgcacgtgttatgaggagatgctgaaagaatacgaccaagttctcgagacggcaggatag

SEQ ID NO: 186744 - DNA, 4307 bp, Artificial Sequence
  derived and/or modified sequence
acgtgcttaggagccatattgtcgctagtggccgctggggctgggaggggtgtgctagagaggcgcagcttctctgggcgtggtttttatcctgggggaaggatcggtggaatgtgaggggaggtggaggagatggcggcgacggcccgggaagatggcgccagcggtcaagagcgaggtcagcggggctgcgagcactatgacagaggatgtctcctaaaggcaccttgctgtgacaagctttatacttgccgcttgtgtcatgataacaatgaagatcatcaactagatcgctttaaagtgaaggaagtgcagtgcataaactgtgaaaaaattcaacatgcccaacagacttgtgaagaatgtagcacattgtttggagaatattattgcgatatatgccatttgtttgacaaagataagaagcagtatcactgtgaaaactgtggaatttgtaggattggtccaaaggaagattttttccattgtttgaaatgtaacttatgcctagctatgaatcttcaaggaagacacaagtgtattgaaaatgtgtcccgacagaattgtccaatatgtttggaggacattcacacatcccgtgttgttgctcatgtcttgccatgtggacatcttttacatagaacgtgttatgaagaaatgttgaaagagctacagatgtccattatgtatgcactctgctttagatatgaccaggtattggagacagctggatgatgaagtagcacagactcctatgccatcagaatatcagaacatgactgtggatattctctgcaatgactgtaatggacgatccactgttcagtttcatatattaggcatgaaatgtaagatttgtgaatcctataatactgctcaagctggaggacgtagaatttcactggatcagcaatgacgagcctacacagtactggagaacttggcattttctgatatagaaaaaggctttccttggtatcgtgttatcatgtgtcgtcatctatgcattagagttgatgtgttttgtactagtgtcacagcataaaatcatattacaagtacgtaaggattcagggtctcttgatagacttatcatagctctatattgaatgaaagccactgtgcttgtgttttgattggaaattcctttagtgtcagttttttggaagccaatgatgtttgccactgatacattcatagaagtgtattatattttcatgaagctttgctttaagtgacactacgcgtgcagttcatttctagttcttgatagaactgcacttaattttcagtagtagtcttgactttttaagggctgtgttatattaagttctcccttactgttaaaacctaattaaatatgctttagaattttctaagacagtcctctggatcctctaaatgtgaattttgatgtaataactgctaataaaattatattgaaactgttttatagaaagttttttccaaagttttctatgtttggctcaattagggcagtatcatcagttctataatgtaaaagaaattttctttcttttgaggtattccataaaagtagttgggaaaattattatgtaaaataataagactcttccaaagccttaataaaaacatcaacattgaaaacagttttttttaggttgcccaaaattatttcttcaaagagtcattcattccttcatttagcaagtatttattgagcaactgctatgtggcagatatgtttctagatgctgtagagacaacagtgaacaataaagataaaagtccttgtcctcacagcagtacattctattgttcatcatatttgatcaatgtactcatttttctttatgcaaggagtggatgtcttattgtaaatgaatagaatatttcttccctaagcgtgtgaaaataggggatggatgagtgggaagggcatgggatattcctggcaagatctctgatttcataatacttttttgggctcatgtagtggaattaaatatacctcttacttcaggaacaaagttaacaaatatgtttgatgatccagccgactttgacactgttatctccgtaatagctttaccattaggctaggatgtaaaatgtacatttatcagttgataagtacctattgagcaccagttgtatttccaactttgagctatttgaatcttctttgaataaggaagttagccttttaactagaaagcctaagagttctggcacatttatttcttcttttgttgaaatttattcacctagataaaggcagcagtttgggactcagatctttattttatcccaccttcttgtcttctgtattccactcttcttatgttctttcccttcatctgtttccttggcctggccagagcagcagtgctgatcttcatttgggaaaggatgttcctgggtattaccaattagtatacagataagtaaagactagttttccagatctaatacttttttttgaagtggttttgctctgtcatttaggctagagtgtagtgaagtgatcgtagctcactgcagccttgacttcctgggctgaactgatccttccacctcagcctcctgagtagctgggactacaggtgtgtgccaccatgcccagctaatttttaattgttttgtagaaacaaagtccaggctggtcttgaactcctgggctcaagcatttctcctacctcggccttccaagggctaggattacaggcatgagccactgtgcttggtccagatgtattactttttatgtttggtattattctgccaaaccaatcatgttattgtttttaatcattgaatcattggatctttaaataggagtgagtatataataataaggctcttctgttttcaacatctgtgctgggtcatgcattagcattaattactacaatgattctgtggggtaagtgttgtcctcatagacaagaaagctgaggtttagaggttaaaatgacacattgggggtaaataacagacactatatgttggagttgggaatcagatccaagtttgactccaaacccacttttaccacattgcttttgatctaaacttctattttgctaaaatacccctcacagctagtcatccatatcattgaagcgctcatgatttgatagattaacctttcatttttttaggtgactctagttagaaagtcttatttcacaatctgattgtttctttaacttaggatccaaacatgtccaaaataatgcagagtacatatgcaatcactcgtttatgctgtctagtcatgcacttaaagcaattttcaaatgtactcaaagtctctaggcttcggtacccagggttgcttcaagtatttgttcatgacacgtcaactcgatgattaaaatccttcaacacttctcattcacaataagaataaaatctacatcccttaccattcagtatgcaaaacttaaaatacataactttacccttaaatattttttctttctctgacttcataagtataggttatacctctataagaaagaaggtaaaaaactctcaacaatcccttctttcagagagaactactgttaacattttaacagacaacttcattcttttcctattcttttttataatgcttacaggaatgttaaatacttagacagatcttaagtacactagaattatctgtccctgaaataagttaggttgccctgccgcagaatttgtatctatagtttatttggattatttttgaaaaaagtaaaataacaatacccttacgaattttttggtgcatagcatctcagcttcttttatcattaaagatgtatgtataaaaaaaaaatgagtgtatatcaagttgttcatttcttagtttctggggtcttcttaaccagtacatagaactctttatgaattaactttagcttatgttggaagtagtagtttgtttatagtgtcatggattttaaaatcaaactcagtttttatttcttcactaaaacctattttcatatgatatacatgttaaatttcccttttattttggtcatgcatcaaaataaatttactaagtactaaagagccaacattattttataagtgcctggcaataggtattcactagttgaatagtttaatttgaaatgaattaattttaaatgggagttgttcaaaactatgccactttttcttttgtcctttgtgttattaaaatttaattgataattgtgtatattatatatatggagtacaatgtgatgttttgatatatgtttacagtgtagaatgattaaatcaatgtaataaatttattgcctcataccattttttgtggt

SEQ ID NO: 186745 - DNA, 1304 bp, Artificial Sequence
  derived and/or modified sequence
gtggaatgtgaggggaggtggaggagatggcggcgacggcccgggaagatggcgccagcggtcaagagcgaggtcagcggggctgcgagcactatgacagaggatgtctcctaaaggcaccttgctgtgacaagctttatacttgccgcttgtgtcatgataacaatgaagatcatcaactagatcgctttaaagtgaaggaagtgcagtgcataaactgtgaaaaaattcaacatgcccaacagacttgtgaagaatgtagcacattgtttggagaatattattgcgatatatgccatttgtttgacaaagataagaagcagtatcactgtgaaaactgtggaatttgtaggattggtccaaaggaagattttttccattgtttgaaatgtaacttatgcctagctatgaatcttcaaggaagacacaagtgtattgaaaatgtgtcccgacagaattgtccaatatgtttggaggacattcacacatcccgtgttgttgctcatgtcttgccatgtggacatcttttacatagaacgtgttatgaagaaatgttgaaagaatatgaccaggtattggagacagctggatgatgaagtagcacagactcctatgccatcagaatatcagaacatgactgtggatattctctgcaatgactgtaatggacgatccactgttcagtttcatatattaggcatgaaatgtaagatttgtgaatcctataatactgctcaagctggaggacgtagaatttcactggatcagcaatgacgagcctacacagtactggagaacttggcattttctgatatagaaaaaggctttccttggtatcgtgttatcatgtgtcgtcatctatgcattagagttgatgtgttttgtactagtgtcacagcataaaatcatattacaagtacgtaaggattcagggtctcttgatagacttatcatagctctatattgaatgaaagccactgtgcttgtgttttgattggaaattcctttagtgtcagttttttggaagccaatgatgtttgccactgatacattcatagaagtgtattatattttcatgaagctttgctttaagtgacactacgcgtgcagttcatttctagttcttgatagaactgcacttaattttcagtagtagtcttgactttttaagggctgtgttatattaagttctcccttactgttaaaacctaattaaatatgctttagaattttctaagacagtcctctggatcctctaaatgtgaattttgatgtaataactgctaataaaattatattgaaac

SEQ ID NO: 186746 - DNA, 4686 bp, Artificial Sequence
  derived and/or modified sequence
gagagagggaggacccgtcacaggtaacgatgcgcccagtgagcgtcctttcctctggggccaaccagcgtctccgcgccgctgccgccaacctcgcgccgaactacgccctgagatttgggcgggtagcgattgggggaaaacaggcaacctaagagttattaccgttagcagcgaagactgcgactaacgtcaacgacggagactgcgtctgccttcgcttccgcctcgtagccccgggaaccggaaatccgtctgccccgggtcacgtgcttaggagccatattgtcgctagtggccgctggggctgggaggggtgtgctagagaggcgcagcttctctgggcgtggtttttatcctgggggaaggatcggtggaatgtgaggggaggtggaggagatggcggcgacggcccgggaagatggcgccagcggtcaagagcgaggtcagcggggctgcgagcactatgacagaggatgtctcctaaaggcaccttgctgtgacaagctttatacttgccgcttgtgtcatgataacaatgaagatcatcaactagatcgctttaaagtgaaggaagtgcagtgcataaactgtgaaaaaattcaacatgcccaacagacttgtgaagaatgtagcacattgtttggagaatattattgcgatatatgccatttgtttgacaaagataagaagcagtatcactgtgaaaactgtggaatttgtaggattggtccaaaggaagattttttccattgtttgaaatgtaacttatgcctagctatgaatcttcaaggaagacacaagtgtattgaaaatgtgtcccgacagaattgtccaatatgtttggaggacattcacacatcccgtgttgttgctcatgtcttgccatgtggacatcttttacatagaacgtgttatgaagaaatgttgaaagaaggctacagatgtccattatgtatgcactctgctttagatatgaccaggtattggagacagctggatgatgaagtagcacagactcctatgccatcagaatatcagaacatgactgtggatattctctgcaatgactgtaatggacgatccactgttcagtttcatatattaggcatgaaatgtaagatttgtgaatcctataatactgctcaagctggaggacgtagaatttcactggatcagcaatgacgagcctacacagtactggagaacttggcattttctgatatagaaaaaggctttccttggtatcgtgttatcatgtgtcgtcatctatgcattagagttgatgtgttttgtactagtgtcacagcataaaatcatattacaagtacgtaaggattcagggtctcttgatagacttatcatagctctatattgaatgaaagccactgtgcttgtgttttgattggaaattcctttagtgtcagttttttggaagccaatgatgtttgccactgatacattcatagaagtgtattatattttcatgaagctttgctttaagtgacactacgcgtgcagttcatttctagttcttgatagaactgcacttaattttcagtagtagtcttgactttttaagggctgtgttatattaagttctcccttactgttaaaacctaattaaatatgctttagaattttctaagacagtcctctggatcctctaaatgtgaattttgatgtaataactgctaataaaattatattgaaactgttttatagaaagttttttccaaagttttctatgtttggctcaattagggcagtatcatcagttctataatgtaaaagaaattttctttcttttgaggtattccataaaagtagttgggaaaattattatgtaaaataataagactcttccaaagccttaataaaaacatcaacattgaaaacagttttttttaggttgcccaaaattatttcttcaaagagtcattcattccttcatttagcaagtatttattgagcaactgctatgtggcagatatgtttctagatgctgtagagacaacagtgaacaataaagataaaagtccttgtcctcacagcagtacattctattgttcatcatatttgatcaatgtactcatttttctttatgcaaggagtggatgtcttattgtaaatgaatagaatatttcttccctaagcgtgtgaaaataggggatggatgagtgggaagggcatgggatattcctggcaagatctctgatttcataatacttttttgggctcatgtagtggaattaaatatacctcttacttcaggaacaaagttaacaaatatgtttgatgatccagccgactttgacactgttatctccgtaatagctttaccattaggctaggatgtaaaatgtacatttatcagttgataagtacctattgagcaccagttgtatttccaactttgagctatttgaatcttctttgaataaggaagttagccttttaactagaaagcctaagagttctggcacatttatttcttcttttgttgaaatttattcacctagataaaggcagcagtttgggactcagatctttattttatcccaccttcttgtcttctgtattccactcttcttatgttctttcccttcatctgtttccttggcctggccagagcagcagtgctgatcttcatttgggaaaggatgttcctgggtattaccaattagtatacagataagtaaagactagttttccagatctaatacttttttttgaagtggttttgctctgtcatttaggctagagtgtagtgaagtgatcgtagctcactgcagccttgacttcctgggctgaactgatccttccacctcagcctcctgagtagctgggactacaggtgtgtgccaccatgcccagctaatttttaattgttttgtagaaacaaagtccaggctggtcttgaactcctgggctcaagcatttctcctacctcggccttccaagggctaggattacaggcatgagccactgtgcttggtccagatgtattactttttatgtttggtattattctgccaaaccaatcatgttattgtttttaatcattgaatcattggatctttaaataggagtgagtatataataataaggctcttctgttttcaacatctgtgctgggtcatgcattagcattaattactacaatgattctgtggggtaagtgttgtcctcatagacaagaaagctgaggtttagaggttaaaatgacacattgggggtaaataacagacactatatgttggagttgggaatcagatccaagtttgactccaaacccacttttaccacattgcttttgatctaaacttctattttgctaaaatacccctcacagctagtcatccatatcattgaagcgctcatgatttgatagattaacctttcatttttttaggtgactctagttagaaagtcttatttcacaatctgattgtttctttaacttaggatccaaacatgtccaaaataatgcagagtacatatgcaatcactcgtttatgctgtctagtcatgcacttaaagcaattttcaaatgtactcaaagtctctaggcttcggtacccagggttgcttcaagtatttgttcatgacacgtcaactcgatgattaaaatccttcaacacttctcattcacaataagaataaaatctacatcccttaccattcagtatgcaaaacttaaaatacataactttacccttaaatattttttctttctctgacttcataagtataggttatacctctataagaaagaaggtaaaaaactctcaacaatcccttctttcagagagaactactgttaacattttaacagacaacttcattcttttcctattcttttttataatgcttacaggaatgttaaatacttagacagatcttaagtacactagaattatctgtccctgaaataagttaggttgccctgccgcagaatttgtatctatagtttatttggattatttttgaaaaaagtaaaataacaatacccttacgaattttttggtgcatagcatctcagcttcttttatcattaaagatgtatgtataaaaaaaaaatgagtgtatatcaagttgttcatttcttagtttctggggtcttcttaaccagtacatagaactctttatgaattaactttagcttatgttggaagtagtagtttgtttatagtgtcatggattttaaaatcaaactcagtttttatttcttcactaaaacctattttcatatgatatacatgttaaatttcccttttattttggtcatgcatcaaaataaatttactaagtactaaagagccaacattattttataagtgcctggcaataggtattcactagttgaatagtttaatttgaaatgaattaattttaaatgggagttgttcaaaactatgccactttttcttttgtcctttgtgttattaaaatttaattgataattgtgtatattatatatatggagtacaatgtgatgttttgatatatgtttacagtgtagaatgattaaatcaatgtaataaatttattgcctcataccattttttgtggtaaaaaaaccacttaaaatctactcttaatatttttgaaatgtacaatgcattatttattatactcaccattctgtgtaatagatcagtaaagtttattcctcttgtctaa

SEQ ID NO: 186747 - DNA, 786 bp, Artificial Sequence
  derived and/or modified sequence
atggccgccaccgccagagaggacggcgccagcggccaggagagaggccagagaggctgcgagcactacgacagaggctgcctgctgaaggccccctgctgcgacaagctgtacacctgcagactgtgccacgacaacaacgaggaccaccagctggacagattcaaggtgaaggaggtgcagtgcatcaactgcgagaagatccagcacgcccagcagacctgcgaggagtgcagcaccctgttcggcgagtactactgcgacatctgccacctgttcgacaaggacaagaagcagtaccactgcgagaactgcggcatctgcagaatcggccccaaggaggacttcttccactgcctgaagtgcaacctgtgcctggccatgaacctgcagggcagacacaagtgcatcgagaacgtgagcagacagaactgccccatctgcctggaggacatccacaccagcagagtggtggcccacgtgctgccctgcggccacctgctgcacagaacctgctacgaggagatgctgaaggagggctacagatgccccctgtgcatgcacagcgccctggacatgaccagatactggagacagctggacgacgaggtggcccagacccccatgcccagcgagtaccagaacatgaccgtggacatcctgtgcaacgactgcaacggcagaagcaccgtgcagttccacatcctgggcatgaagtgcaagatctgcgagagctacaacaccgcccaggccggcggcagaagaatcagcctggaccagcagtag

SEQ ID NO: 186748 - protein, 161 aa, Artificial Sequence
  derived and/or modified sequence
MPKNAIPVSKSTGFSNPASQSTSQRPKLKRVMKEKTKPQGGEGKGAQSTPIQHSFLTDVSDVQEMERGLLSLLNDFHSGKLQAFGNECSIEQMEHVRGMQEKLARLNLELYGELEELPEDKRKTASDSNLDRLLSDLEELNSSIQKLHLADAQDVPNTSAS

SEQ ID NO: 186749 - protein, 274 aa, Artificial Sequence
  derived and/or modified sequence
MPRAEPRATLGEQEKAGLPLGAWRLYLLRHFRKQTELRRSGSRDVTGALLVAAAVASEAVGSLRVAEGGPNTLLLQVLRSWPWCNKELKTMEERKVKRRSPKSFSAHCTQVVNAKKNAIPVSKSTGFSNPASQSTSQRPKLKRVMKEKTKPQGGEGKGAQSTPIQHSFLTDVSDVQEMERGLLSLLNDFHSGKLQAFGNECSIEQMEHVRGMQEKLARLNLELYGELEELPEDKRKTASDSNLDRLLSDLEELNSSIQKLHLADAQDVPNTSAS

SEQ ID NO: 186750 - DNA, 486 bp, Artificial Sequence
  derived and/or modified sequence
atgcccaagaacgccatccccgtgagcaagagcaccggcttcagcaaccccgccagccagagcaccagccagagacccaagctgaagagagtgatgaaggagaagaccaagccccagggcggcgagggcaagggcgcccagagcacccccatccagcacagcttcctgaccgacgtgagcgacgtgcaggagatggagagaggcctgctgagcctgctgaacgacttccacagcggcaagctgcaggccttcggcaacgagtgcagcatcgagcagatggagcacgtgagaggcatgcaggagaagctggccagactgaacctggagctgtacggcgagctggaggagctgcccgaggacaagagaaagaccgccagcgacagcaacctggacagactgctgagcgacctggaggagctgaacagcagcatccagaagctgcacctggccgacgcccaggacgtgcccaacaccagcgccagctag

SEQ ID NO: 186751 - DNA, 825 bp, Artificial Sequence
  derived and/or modified sequence
atgcccagagccgagcccagagccaccctgggcgagcaggagaaggccggcctgcccctgggcgcctggagactgtacctgctgagacacttcagaaagcagaccgagctgagaagaagcggcagcagagacgtgaccggcgccctgctggtggccgccgccgtggccagcgaggccgtgggcagcctgagagtggccgagggcggccccaacaccctgctgctgcaggtgctgagaagctggccctggtgcaacaaggagctgaagaccatggaggagagaaaggtgaagagaagaagccccaagagcttcagcgcccactgcacccaggtggtgaacgccaagaagaacgccatccccgtgagcaagagcaccggcttcagcaaccccgccagccagagcaccagccagagacccaagctgaagagagtgatgaaggagaagaccaagccccagggcggcgagggcaagggcgcccagagcacccccatccagcacagcttcctgaccgacgtgagcgacgtgcaggagatggagagaggcctgctgagcctgctgaacgacttccacagcggcaagctgcaggccttcggcaacgagtgcagcatcgagcagatggagcacgtgagaggcatgcaggagaagctggccagactgaacctggagctgtacggcgagctggaggagctgcccgaggacaagagaaagaccgccagcgacagcaacctggacagactgctgagcgacctggaggagctgaacagcagcatccagaagctgcacctggccgacgcccaggacgtgcccaacaccagcgccagctag

SEQ ID NO: 186752 - DNA, 1226 bp, Artificial Sequence
  derived and/or modified sequence
cggaggagcgggtcccgggatgtgaccggggctctgcttgtggctgcggcggtggcttctgaggctgtcgggtctttgcgggttgcggaagggggccccaatacccttcttcttcaggtcttaagaagctggccgtggtgcaataaggaacttaaaacaatggaagagcggaaagtgaagaggaggagtcctaagtcttttagtgcccactgtactcaggttgtcaatgccaaaaaatgccattccagtgagtaaaagcacagggttttcaaatcctgcatcacagtcaacttcacagcgaccaaagttaaaaagagtgatgaaagaaaagaccaaacctcagggtggagagggcaaaggcgctcagtcaactccgatccagcactccttcctcactgatgtctcagatgttcaggagatggagagagggctgctcagtcttttgaatgatttccactctggaaaacttcaagcatttggaaatgaatgttccattgaacagatggaacatgttcggggaatgcaggagaaattagctcgcttgaatttggagctctatggggagttagaggaacttcctgaggataagagaaaaacagccagtgactccaatctggataggcttctgtcagatttagaagaattgaattcttccatacaaaaactccatttggcagatgcacaagatgttccaaatacttctgctagctaaaatgaaatgtagtttgctttcttgtgatttgaagagaagcagcagtctttacttttccagccaaatccagtagcagaatcatcttccacaacaaggaattaaagtaattaaagtgcaagttcaatgatcgttttcacttactgcttttagtaaatgtgactcgctgtaattcaccataactggaggcctaggccttgttgaaggcttcatcaggaaatgtgacgcagagattgtgctgctgtgcttcatattgttgccttatgggattatacttgaaatgcattgtgctgatgttcttgacagggcggagggatttctctttcctgagctcaccaaacttattccagtgttgatcgcaagctgttgatgcacaggcgtcttgtggcaagcccagcttcagtttatgttagacaatcagtacacatgctggtgtgttttccaatggccagtgataagaaattaaataagtatttgtgagatttgctattttttaataaagtaattgttttaaatt

SEQ ID NO: 186753 - DNA, 1496 bp, Artificial Sequence
  derived and/or modified sequence
ggcggagtagcttccggaaagggtactgcatttcccgtttctacctccactgcacccgcttattgcgtcttgctcctgggtcacagagcctaaaacgacacacccaacacgcccgccggagttacagctaaaggaaggacaggggaagcaatgaaatgccgagggcggagccaagagcgacactgggggagcaggaaaaggcggggcttccgcttggggcatggaggctgtacctcttacgtcacttccgtaaacaaacggagctgcggaggagcgggtcccgggatgtgaccggggctctgcttgtggctgcggcggtggcttctgaggctgtcgggtctttgcgggttgcggaagggggccccaatacccttcttcttcaggtcttaagaagctggccgtggtgcaataaggaacttaaaacaatggaagagcggaaagtgaagaggaggagtcctaagtcttttagtgcccactgtactcaggttgtcaatgccaaaaaaaatgccattccagtgagtaaaagcacagggttttcaaatcctgcatcacagtcaacttcacagcgaccaaagttaaaaagagtgatgaaagaaaagaccaaacctcagggtggagagggcaaaggcgctcagtcaactccgatccagcactccttcctcactgatgtctcagatgttcaggagatggagagagggctgctcagtcttttgaatgatttccactctggaaaacttcaagcatttggaaatgaatgttccattgaacagatggaacatgttcggggaatgcaggagaaattagctcgcttgaatttggagctctatggggagttagaggaacttcctgaggataagagaaaaacagccagtgactccaatctggataggcttctgtcagatttagaagaattgaattcttccatacaaaaactccatttggcagatgcacaagatgttccaaatacttctgctagctaaaatgaaatgtagtttgctttcttgtgatttgaagagaagcagcagtctttacttttccagccaaatccagtagcagaatcatcttccacaacaaggaattaaagtaattaaagtgcaagttcaatgatcgttttcacttactgcttttagtaaatgtgactcgctgtaattcaccataactggaggcctaggccttgttgaaggcttcatcaggaaatgtgacgcagagattgtgctgctgtgcttcatattgttgccttatgggattatacttgaaatgcattgtgctgatgttcttgacagggcggagggatttctctttcctgagctcaccaaacttattccagtgttgatcgcaagctgttgatgcacaggcgtcttgtggcaagcccagcttcagtttatgttagacaatcagtacacatgctggtgtgttttccaatggccagtgataagaaattaaataagtatttgtgagatttgctattttttaataaagtaattgttttaaattaa

SEQ ID NO: 186754 - DNA, 486 bp, Artificial Sequence
  derived and/or modified sequence
atgccaaagaatgctatcccagtctcaaaatcaactggattctccaaccccgctagtcagagcacgtcccagcggcccaaattaaagagggttatgaaggagaagactaaacctcagggcggcgaagggaaaggcgcccaatctaccccaatccaacactccttcctcactgatgtgtcagatgtgcaagagatggagagaggactgctaagtctgttaaatgatttccactctggtaagctgcaggctttcggcaacgagtgttcgatagagcagatggagcatgtccgcggaatgcaagagaagctcgcccgcctgaatctggaactgtatggggagcttgaagaattgccagaagataagagaaaaactgcaagcgatagcaacctggataggctgctgtcggatctggaagaactaaactcttcgatccaaaagctgcatctggctgacgcccaggacgtgcctaatacctcagccagttag

SEQ ID NO: 186755 - DNA, 825 bp, Artificial Sequence
  derived and/or modified sequence
atgcctagagctgaacccagagccacattaggtgaacaggaaaaggccgggttacctctcggggcctggagactgtacctgctcaggcacttccggaagcagaccgaactccgaagaagcggcagccgcgatgttactggagcgttgctggtagctgcagccgtcgccagcgaagcagtaggcagtcttagagtagcagagggagggcccaacacactgctgctgcaggtgttacggagttggccgtggtgcaataaagaactaaagacgatggaggaaagaaaagtgaagcgaaggtctcctaagtccttcagcgcacactgcactcaggttgttaatgctaagaagaacgccatacctgtgagtaagagcactggtttttccaatccggcgtcccagtccacatcccaacgccctaagctcaaacgtgtaatgaaggagaaaacaaaaccgcagggaggagaaggcaagggagcgcagtctacccccatccaacactcctttttgacagatgtgtccgatgttcaggagatggagaggggattgctgtcactgctgaatgactttcacagtggcaagctgcaggcctttgggaacgagtgcagtatcgaacagatggagcatgttcggggaatgcaagagaaactggccagattaaacctggaactgtacggtgaactcgaggagctgcctgaggacaagaggaaaacggccagcgatagtaaccttgacagactgctttcagatctggaggaattgaatagttccattcagaaacttcatcttgctgatgctcaagacgtaccaaatacatccgcttcatag

SEQ ID NO: 186756 - DNA, 486 bp, Artificial Sequence
  derived and/or modified sequence
atgcccaagaatgccatccctgtgtccaagagcacaggcttcagcaacccagccagccagagcaccagccagaggcccaagctgaagagggtgatgaaggagaagaccaagccccagggcggggagggcaagggggcccagagcacccccatccagcacagcttcctgacagatgtgtctgatgtgcaggagatggagcggggcctgctgagcctgctgaatgacttccacagcggcaagctgcaggcctttggaaatgaatgttccattgagcagatggagcacgtgcggggcatgcaggagaagctggcccggctgaacctggagctgtatggagagctggaggagctgcctgaggacaagaggaagacagccagtgacagcaacctggaccggctgctgagtgacctggaggagctgaacagcagcatccagaagctgcacctggctgatgcccaggatgtgcccaacaccagcgccagctag

SEQ ID NO: 186757 - DNA, 825 bp, Artificial Sequence
  derived and/or modified sequence
atgcccagggctgagccccgggccaccctgggggagcaggagaaggccggcctgcccctgggcgcctggaggctgtacctgctgcggcacttcaggaagcagacagagctgcggcgcagcggcagcagagatgtgactggagccctgctggtggccgctgctgtggccagcgaggccgtgggcagcctgcgggtggccgagggcggccccaacaccctgctgctgcaggtgctgcgctcctggccctggtgcaacaaggagctgaagaccatggaggagaggaaggtgaagaggaggagccccaagagcttcagcgcccactgcacccaggtggtgaatgccaagaagaatgccatccctgtgtccaagagcacaggcttcagcaacccagccagccagagcaccagccagaggcccaagctgaagagggtgatgaaggagaagaccaagccccagggcggggagggcaaaggagcccagagcacccccatccagcacagcttcctgacagatgtgtctgatgtgcaggagatggagcggggcctgctgagcctgctgaatgacttccacagcggcaagctgcaggcctttggaaatgaatgttccattgagcagatggagcacgtgcggggcatgcaggagaagctggcccggctgaacctggagctgtatggagagctggaggagctgcctgaggacaagaggaagacagccagtgacagcaacctggaccggctgctgagtgacctggaggagctgaacagcagcatccagaagctgcacctggctgatgcccaggatgtgcccaacaccagcgccagctag

SEQ ID NO: 186758 - DNA, 486 bp, Artificial Sequence
  derived and/or modified sequence
atgcccaagaacgccatccccgtgagcaagagcaccggcttcagcaatcccgcctcccagtctacctctcagcggccgaaactgaaacgcgtcatgaaggagaagacaaagcctcagggaggcgagggcaaaggggcccagagcacccccatccaacattcctttttgacagatgtcagcgatgtccaggaaatggagaggggattgctttctctgttgaacgactttcactctggtaaactccaggcctttgggaatgaatgttctatcgagcaaatggagcacgtgagaggcatgcaggagaaactggccagacttaatctcgaactgtacggagaactggaggagctgcccgaggacaaaaggaagacagcgtcggacagtaacctcgatcggctcctctctgaccttgaggaactgaacagcagtattcagaagctgcacctggccgacgcccaggacgtgccaaacactagcgcaagctag

SEQ ID NO: 186759 - DNA, 825 bp, Artificial Sequence
  derived and/or modified sequence
atgccccgggccgagccccgggccaccctgggcgagcaggagaaggccgggctccctcttggagcatggcgcctgtatctgcttcggcatttccgcaagcagacggagctgaggagatccggaagtagagatgtgaccggcgccctgttagttgctgccgccgttgctagcgaggctgtgggaagcttgcgggttgcagagggtgggcctaacactttgcttcttcaggtgctgcgttcctggccctggtgcaacaaggagctgaagactatggaggaacgaaaagttaaacgccggtcccctaagtcattctcagcacattgtacacaggtggtaaacgccaagaagaacgccattcccgtgtcaaagtcgacaggattcagtaatcccgcgtcccagtcaacatcccaaaggcctaagctgaaacgcgtgatgaaggaaaagacaaaaccccagggaggcgaggggaagggcgctcaatctaccccaatccaacacagctttcttaccgacgtgtctgatgtccaggaaatggagagagggcttctttcactcctcaacgattttcacagtgggaagctgcaggcatttggcaacgagtgctcgattgagcaaatggagcacgtccggggcatgcaggagaagctggcccgtctaaatcttgagctctatggagaactggaggagcttcctgaggacaagcgaaaaaccgcttccgattccaatctggatcgactcctgagcgatctggaggagctgaactccagcattcagaagctccatctggcagatgcgcaggacgttccaaacacatctgcctcatag

SEQ ID NO: 186760 - DNA, 486 bp, Artificial Sequence
  derived and/or modified sequence
atgcccaagaacgcaatccctgtgtccaaatccacggggttctctaatccagcatcacaatccaccagccaacgaccaaaacttaagcgcgtcatgaaagagaaaacaaagccccaggggggagaggggaagggcgcacagtcaactcctatccagcattccttcttaacagacgtgagtgacgtacaggagatggagcgaggcctgcttagtctactgaatgactttcacagcgggaagctgcaagcctttggcaatgagtgttctatcgaacaaatggaacacgtgagaggaatgcaggaaaaactcgccaggctgaatttggagttgtatggcgagttggaggagctcccagaagacaaacggaaaacagcttcagatagtaacctggaccggctgctatcagatcttgaggaactgaactcctccatccagaagctgcatctggccgatgcacaggatgtgcccaacacgagcgcctcttag

SEQ ID NO: 186761 - DNA, 825 bp, Artificial Sequence
  derived and/or modified sequence
atgccccgagccgaacctcgcgcaacattgggggaacaggagaaggctgggctcccccttggagcctggaggctgtacttgcttagacactttcgcaagcagacggagctgcgacggtccggtagtcgggatgtcaccggcgctcttttagtggccgctgctgtagcctcggaagctgtcggatccctgcgagttgcggaggggggaccaaacaccctcctgttacaggtgctgagaagctggccgtggtgcaacaaggagctaaaaacaatggaggagcggaaggtgaagcgccgttcccccaaatccttctccgctcactgcacacaggttgtgaacgccaagaagaatgcaattccagtttccaaatcaactggcttctccaaccctgcctctcagagtacaagccagaggcctaaattgaagcgtgtgatgaaggaaaaaacaaagccacaggggggagaggggaagggagctcaaagcaccccgattcaacactcctttttgactgacgtatcggacgttcaggaaatggagagaggactactgagcctgctcaacgatttccactccggtaagctgcaggctttcggaaacgagtgtagcatcgaacagatggaacatgtgcgagggatgcaggagaaactcgcccgactaaatctagagttgtacggggagctggaggaacttcccgaagacaaacggaagaccgcatcagattctaacctcgacaggctgttgtcagatttagaggagctgaattcaagcattcagaaactacacctggccgatgcccaggatgtgccaaatacttccgcttcttag

SEQ ID NO: 186762 - DNA, 486 bp, Artificial Sequence
  derived and/or modified sequence
atgcccaagaatgctatcccagtcagcaagtccacaggcttctcgaatcccgcaagtcagagtacatctcagcggcccaaattaaaaagggtgatgaaggaaaagacaaaacctcagggaggagaaggcaaaggggctcaaagtactccaattcagcatagctttctgaccgatgtttccgacgtacaggagatggagaggggacttctgtctttgttaaacgactttcacagtggcaagttacaagcttttggcaacgagtgtagtatagagcaaatggaacatgtgcgcggcatgcaggaaaagttagcgcgactgaacctggagctgtacggagaactggaagagctgccggaagacaagcgaaagaccgcatccgatagcaacttagacagactattgagcgacttagaagagctgaatagcagcattcagaagctgcacttggctgatgcgcaagacgtaccaaacacaagcgcctcgtag

SEQ ID NO: 186763 - DNA, 486 bp, Artificial Sequence
  derived and/or modified sequence
atgcccaagaatgctatcccagtcagcaagtccacaggcttctcgaatcccgcaagtcagagtacatctcagcggcccaaattaaaaagggtgatgaaggaaaagacaaaacctcagggaggagaaggcaaaggggctcaaagtactccaattcagcatagctttctgaccgatgtttccgacgtacaggagatggagaggggacttctgtctttgttaaacgactttcacagtggcaagttacaagcttttggcaacgagtgtagtatagagcaaatggaacatgtgcgcggcatgcaggagaagttggctaggctgaacctcgaactgtatggcgaactcgaagaacttcctgaagacaagagaaagacagcttccgattctaatctggaccgcctattgtcagatcttgaggagcttaactcatcgattcaaaagctgcacctggctgacgcccaggatgtgcccaatacttccgctagttag

SEQ ID NO: 186764 - protein, 978 aa, Artificial Sequence
  derived and/or modified sequence
MGTRLPLVLRQLRRPPQPPGPPRRLRVPCRASSGGGGGGGGGREGLLGQRRPQDGQARSSCSPGGRTPAARDSIVREVIQNSKEVLSLLQEKNPAFKPVLAIIQAGDDNLMQEINQNLAEEAGLNITHICLPPDSSEAEIIDEILKINEDTRVHGLALQISENLFSNKVLNALKPEKDVDGVTDINLGKLVRGDAHECFVSPVAKAVIELLEKSGVNLDGKKILVVGAHGSLEAALQCLFQRKGSMTMSIQWKTRQLQSKLHEADIVVLGSPKPEEIPLTWIQPGTTVLNCSHDFLSGKVGCGSPRIHFGGLIEEDDVILLAAALRIQNMVSSGRRWLREQQHRRWRLHCLKLQPLSPVPSDIEISRGQTPKAVDVLAKEIGLLADEIEIYGKSKAKVRLSVLERLKDQADGKYVLVAGITPTPLGEGKSTVTIGLVQALTAHLNVNSFACLRQPSQGPTFGVKGGAAGGGYAQVIPMEEFNLHLTGDIHAITAANNLLAAAIDTRILHENTQTDKALYNRLVPLVNGVREFSEIQLARLKKLGINKTDPSTLTEEEVSKFARLDIDPSTITWQRVLDTNDRFLRKITIGQGNTEKGHYRQAQFDIAVASEIMAVLALTDSLADMKARLGRMVVASDKSGQPVTADDLGVTGALTVLMKDAIKPNLMQTLEGTPVFVHAGPFANIAHGNSSVLADKIALKLVGEEGFVVTEAGFGADIGMEKFFNIKCRASGLVPNVVVLVATVRALKMHGGGPSVTAGVPLKKEYTEENIQLVADGCCNLQKQIQITQLFGVPVVVALNVFKTDTRAEIDLVCELAKRAGAFDAVPCYHWSVGGKGSVDLARAVREAASKRSRFQFLYDVQVPIVDKIRTIAQAVYGAKDIELSPEAQAKIDRYTQQGFGNLPICMAKTHLSLSHQPDKKGVPRDFILPISDVRASIGAGFIYPLVGTMSTMPGLPTRPCFYDIDLDTETEQVKGLF

SEQ ID NO: 186765 - protein, 96 aa, Artificial Sequence
  derived and/or modified sequence
NIQLVADGCCNLQKQIQITQLFGVPVVVALNVFKTDTRAEIDLVCELAKRAGAFDAVPCYHWSVGGKGSVDLARAVREAASKRSRFQFLYDVQPFS

SEQ ID NO: 186766 - DNA, 2937 bp, Artificial Sequence
  derived and/or modified sequence
atgggcaccagactgcccctggtgctgagacagctgagaagacccccccagccccccggcccccccagaagactgagagtgccctgcagagccagcagcggcggcggcggcggcggcggcggcggcagagagggcctgctgggccagagaagaccccaggacggccaggccagaagcagctgcagccccggcggcagaacccccgccgccagagacagcatcgtgagagaggtgatccagaacagcaaggaggtgctgagcctgctgcaggagaagaaccccgccttcaagcccgtgctggccatcatccaggccggcgacgacaacctgatgcaggagatcaaccagaacctggccgaggaggccggcctgaacatcacccacatctgcctgccccccgacagcagcgaggccgagatcatcgacgagatcctgaagatcaacgaggacaccagagtgcacggcctggccctgcagatcagcgagaacctgttcagcaacaaggtgctgaacgccctgaagcccgagaaggacgtggacggcgtgaccgacatcaacctgggcaagctggtgagaggcgacgcccacgagtgcttcgtgagccccgtggccaaggccgtgatcgagctgctggagaagagcggcgtgaacctggacggcaagaagatcctggtggtgggcgcccacggcagcctggaggccgccctgcagtgcctgttccagagaaagggcagcatgaccatgagcatccagtggaagaccagacagctgcagagcaagctgcacgaggccgacatcgtggtgctgggcagccccaagcccgaggagatccccctgacctggatccagcccggcaccaccgtgctgaactgcagccacgacttcctgagcggcaaggtgggctgcggcagccccagaatccacttcggcggcctgatcgaggaggacgacgtgatcctgctggccgccgccctgagaatccagaacatggtgagcagcggcagaagatggctgagagagcagcagcacagaagatggagactgcactgcctgaagctgcagcccctgagccccgtgcccagcgacatcgagatcagcagaggccagacccccaaggccgtggacgtgctggccaaggagatcggcctgctggccgacgagatcgagatctacggcaagagcaaggccaaggtgagactgagcgtgctggagagactgaaggaccaggccgacggcaagtacgtgctggtggccggcatcacccccacccccctgggcgagggcaagagcaccgtgaccatcggcctggtgcaggccctgaccgcccacctgaacgtgaacagcttcgcctgcctgagacagcccagccagggccccaccttcggcgtgaagggcggcgccgccggcggcggctacgcccaggtgatccccatggaggagttcaacctgcacctgaccggcgacatccacgccatcaccgccgccaacaacctgctggccgccgccatcgacaccagaatcctgcacgagaacacccagaccgacaaggccctgtacaacagactggtgcccctggtgaacggcgtgagagagttcagcgagatccagctggccagactgaagaagctgggcatcaacaagaccgaccccagcaccctgaccgaggaggaggtgagcaagttcgccagactggacatcgaccccagcaccatcacctggcagagagtgctggacaccaacgacagattcctgagaaagatcaccatcggccagggcaacaccgagaagggccactacagacaggcccagttcgacatcgccgtggccagcgagatcatggccgtgctggccctgaccgacagcctggccgacatgaaggccagactgggcagaatggtggtggccagcgacaagagcggccagcccgtgaccgccgacgacctgggcgtgaccggcgccctgaccgtgctgatgaaggacgccatcaagcccaacctgatgcagaccctggagggcacccccgtgttcgtgcacgccggccccttcgccaacatcgcccacggcaacagcagcgtgctggccgacaagatcgccctgaagctggtgggcgaggagggcttcgtggtgaccgaggccggcttcggcgccgacatcggcatggagaagttcttcaacatcaagtgcagagccagcggcctggtgcccaacgtggtggtgctggtggccaccgtgagagccctgaagatgcacggcggcggccccagcgtgaccgccggcgtgcccctgaagaaggagtacaccgaggagaacatccagctggtggccgacggctgctgcaacctgcagaagcagatccagatcacccagctgttcggcgtgcccgtggtggtggccctgaacgtgttcaagaccgacaccagagccgagatcgacctggtgtgcgagctggccaagagagccggcgccttcgacgccgtgccctgctaccactggagcgtgggcggcaagggcagcgtggacctggccagagccgtgagagaggccgccagcaagagaagcagattccagttcctgtacgacgtgcaggtgcccatcgtggacaagatcagaaccatcgcccaggccgtgtacggcgccaaggacatcgagctgagccccgaggcccaggccaagatcgacagatacacccagcagggcttcggcaacctgcccatctgcatggccaagacccacctgagcctgagccaccagcccgacaagaagggcgtgcccagagacttcatcctgcccatcagcgacgtgagagccagcatcggcgccggcttcatctaccccctggtgggcaccatgagcaccatgcccggcctgcccaccagaccctgcttctacgacatcgacctggacaccgagaccgagcaggtgaagggcctgttctag

SEQ ID NO: 186767 - DNA, 2937 bp, Artificial Sequence
  derived and/or modified sequence
atggggacaagattgcccctagttcttcggcaactgaggaggccaccacagccccctggacccccacggagactacgggtcccctgccgagcctctagcgggggaggcgggggaggcggggggggacgcgaaggattgctggggcaaaggcgaccacaggacggacaggcgagaagcagctgctccccgggaggaaggactccagcagccagggacagcatagtccgcgaggtgattcaaaattctaaagaggtcttgtccttactccaagaaaagaatcccgcctttaaacccgtgctcgctatcatccaggcgggagatgataatttaatgcaagaaattaaccagaatctggcagaagaggccggcctgaacattacccacatttgcctgcctcctgatagctctgaggccgagatcatcgatgagatactgaagatcaatgaggacacgagagtacacggtctggctctgcagatttccgagaacctcttttctaacaaggttctcaacgccctgaagccggaaaaagacgttgatggggtcacagatattaacttggggaaactggtgagaggggacgctcacgagtgctttgtgtctcctgttgctaaggctgtcatagaactcctggagaagtcgggagtgaatttggatggcaagaagatcctggtagtgggcgcccatgggagcctagaggcagccctgcaatgcctgttccaaaggaaagggagcatgactatgtccattcagtggaaaacaaggcagctccagtctaaactccatgaagccgacatcgtggtgctcggttccccaaaaccagaggagattcccctcacctggattcaaccaggcacaactgtccttaattgttcccacgattttctgtccgggaaagtgggctgcgggtcgcctcggatccacttcgggggactgattgaagaagacgatgtaatactcctggcggcggccctgcggattcaaaatatggtatctagcggacgtaggtggttgcgcgagcagcagcatcgtcgatggagattgcactgtctcaaactccagccgctgtctcccgtgcccagcgacatcgaaatctctcggggacagacaccgaaggccgtggatgtgcttgccaaggagattggcttactggcagacgaaatcgagatttacggaaagagcaaggccaaggtgcgcctctccgtgttagagaggctaaaggatcaggcggacggaaagtacgtcctcgtggcgggaattacccctacaccactcggtgaggggaagtccacagttacaatcggacttgtgcaggcccttactgctcacctgaacgtaaatagcttcgcctgtttacgtcagccttcccaggggccgaccttcggagtcaagggcggggccgccggaggtggatatgcacaggttattccaatggaagagttcaatctgcacttgacaggggacatacatgctattaccgcagcaaataacctcttggctgctgctatcgatacgcggatactccacgaaaacactcaaacagacaaagcgctctataatagactagttccacttgtgaacggagtgagagaattttccgaaatccaactggccagattaaagaaactgggaatcaataagactgacccttctaccctgacagaggaagaggtgagcaagttcgcacgcctggatatagatccttcaaccataacatggcagagagtgcttgacacgaacgatcgctttcttcggaaaatcacaataggccaaggcaacaccgaaaaggggcattacaggcaggcacaattcgacattgctgtagctagcgagattatggctgtgttagcactgactgattcactggccgatatgaaggcccgcttgggccgtatggtggtggcctcggacaagagtgggcagcccgtgactgccgacgatctgggcgtgactggcgccctgaccgttctgatgaaggatgcgatcaagccaaatctgatgcaaactttggaaggtacccccgtgttcgtgcacgccgggccgtttgccaacatcgctcatggcaattcatctgtgctggctgacaagatagctctcaaattggtgggggaagaaggctttgtggtgacggaggctggttttggcgccgacatcggcatggagaagttttttaatatcaaatgccgggcctccggcctcgtacccaacgtcgttgttctcgtggcaactgttcgggccttaaaaatgcacgggggtggtcctagtgtgactgccggtgtccccctcaaaaaagagtatacagaagaaaacatccagctggtggctgacggatgttgcaacctgcaaaaacaaatccagattactcagctgtttggggtcccagtggtggtagctctgaatgtcttcaaaacagatactcgggcagagattgacctggtctgcgagttggcaaaacgtgccggcgcttttgacgcagtgccatgctatcactggagcgttggcggaaagggctcagttgatctggctcgtgccgtgcgggaggcagcaagcaagcgaagcagattccagttcctctacgatgtgcaagttccaattgtcgataaaattcgaaccattgcgcaggcagtgtatggagctaaggatatcgagctaagccctgaggctcaggctaaaattgatcggtatacccagcaaggttttggaaacttgccgatttgtatggccaagactcatctcagcctatcccaccaacccgataagaaaggggtaccacgggacttcatactgccgatttcagacgtgagggcgagtataggtgctggatttatttatcctctagtcggaactatgtctacgatgcctgggcttcctactcgtccttgtttctacgatatagacctcgatacagagacagaacaggtaaaaggcctgttctag

SEQ ID NO: 186768 - DNA, 3604 bp, Artificial Sequence
  derived and/or modified sequence
tgagtcccactccgcaccccaccctctgtctggtacagcttaccaaaccaaagtgcccaaagccgtgacatcccggccggcggctcgcaggcccccgccctccgcacgtcacggccgccgggtgcagtgccccctaggggcccctgggacgaggaggaagcgccaggtccttcccgccgccgccgccgccgccgccgcctgctcccctggcacgcgccccgccgccctcggcagccgcagctccgtgtcccctgagaaccagccgtcccgcgccatgggcacgcgtctgccgctcgtcctgcgccagctccgccgcccgccccagcccccgggccctccgcgccgcctccgtgtgccctgtcgcgctagcagcggcggcggcggaggcggcggcggtggccgggagggcctgcttggacagcggcggccgcaggatggccaggcccggagcagctgcagccccggcggccgaacgcccgcggcgcgggactccatcgtcagagaagtcattcagaattcaaaagaagttctaagtttattgcaagaaaaaaaccctgccttcaagccggttcttgcaattatccaggcaggtgacgacaacttgatgcaggaaatcaaccagaatttggctgaggaggctggtctgaacatcactcacatttgcctccctccagatagcagtgaagccgagattatagatgaaatcttaaagatcaatgaagataccagagtacatggccttgcccttcagatctctgagaacttgtttagcaacaaagtcctcaatgccttgaaaccagaaaaagatgtggatggagtaacagacataaacctggggaagctggtgcgaggggatgcccatgaatgttttgtttcacctgttgccaaagctgtaattgaacttcttgaaaaatcaggtgtcaacctagatggaaagaagattttggtagtgggggcccatgggtctttggaagctgctctacaatgcctgttccagagaaaagggtccatgacaatgagcatccagtggaaaacacgccagcttcaaagcaagcttcacgaggctgacattgtggtcctaggctcacctaagccagaagagattccccttacttggatacaaccaggaactactgttctcaactgctcccatgacttcctgtcagggaaggttgggtgtggctctccaagaatacattttggtggactcattgaggaagatgatgtgattctccttgctgcagctctgcgaattcagaacatggtcagtagtggaaggagatggcttcgtgaacagcagcacaggcggtggagacttcactgcttgaaacttcagcctctctcccctgtgccaagtgacattgagatttcaagaggacaaactccaaaagctgtggatgtccttgccaaggagattggattgcttgcagatgaaattgaaatctatggcaaaagcaaagccaaagtacgtttgtccgtgctagaaaggttaaaggatcaagcagatggaaaatacgtcttagttgctgggatcacacccacccctcttggagaagggaagagcacagtcaccatcgggcttgtgcaggctctgaccgcacacctgaatgtcaactcctttgcctgcttgaggcagccttcccaaggaccgacgtttggagtgaaaggaggagccgcgggtggtggatatgcccaggtcatccccatggaggagttcaaccttcacttgactggagacatccacgccatcaccgctgccaataacttgctggctgccgccatcgacacgaggattcttcatgaaaacacgcaaacagataaggctctgtataatcggctggttcctttagtgaatggtgtcagagaattttcagaaattcagcttgctcggctaaaaaaactgggaataaataagactgatccgagcacactgacagaagaggaagtgagtaaatttgcccgtctcgacatcgacccatctaccatcacgtggcagagagtattggatacaaatgaccgatttctacgaaaaataaccatcgggcagggaaacacagagaagggccattaccggcaggcgcagtttgacatcgcagtggccagcgagatcatggcggtgctggccctgacggacagcctcgcagacatgaaggcacggctgggaaggatggtggtggccagtgacaaaagcgggcagcctgtgacagcagatgatttgggggtgacaggtgctttgacagttttgatgaaagatgcaataaaaccaaacctgatgcagaccctggaagggacacctgtgttcgtgcatgcgggcccttttgctaacattgctcacggcaactcttcagtgttggctgataaaattgccctgaaactggttggtgaagaaggatttgtagtgaccgaagctggctttggtgctgacatcggaatggagaaattcttcaacatcaagtgccgagcttccggcttggtgcccaacgtggttgtgttagtggcaacggtgcgagctctgaagatgcatggaggcgggccaagtgtaacggctggtgttcctcttaagaaagaatatacagaggagaacatccagctggtggcagacggctgctgtaacctccagaagcaaattcagatcactcagctctttggggttcccgttgtggtggctctgaatgtcttcaagaccgacacccgcgctgagattgacttggtgtgtgagcttgcaaagcgggctggtgcctttgatgcagtcccctgctatcactggtccgttggtggaaaaggatcggtggacttggctcgggctgtgagagaggctgcgagtaaaagaagccgattccagttcctgtatgatgttcaggttccaattgtggacaagataaggaccattgctcaggctgtctatggagccaaagatattgaactctctcctgaggcacaagccaaaatagatcgttacactcaacagggttttggaaatttgcccatctgcatggcaaagacccacctttctctatctcaccaacctgacaaaaaaggtgtgccaagggacttcatcttacctatcagtgacgtccgggccagcataggcgctgggttcatttaccctttggtcggaacgatgagcaccatgccaggactgcccacccggccctgcttttatgacatagatcttgataccgaaacagaacaagttaaaggcttgttctaagtggacaaggctctcacaggacccgatgcagactcctgaaacagactactctttgcctttttgctgcagttggagaagaaactgaatttgaaaaatgtctgttatgcaatgctggagacatggtgaaataggccaaagatttcttcttcgttcaagatgaattctgttcacagtggagtatggtgttcggcaaaaggacctccaccaagactgaaagaaactaatttatttctgtttctgtggagtttccattatttctactgcttacactttagaatgtttattttatggggactaagggattaggagtgtgaactaaaaggtaacattttccactctcaagttttctactttgtctttgaactgaaaataaacatggatctagaaaaccaa

SEQ ID NO: 186769 - DNA, 2937 bp, Artificial Sequence
  derived and/or modified sequence
atgggcacccggctgcccctggtgctgcggcagctgcggcggcccccccagcccccaggccccccccggcggctgcgggtgccctgccgggccagcagcggcggcggcggcggcggcggcggcggccgggagggcctgctgggccagaggcggccccaggacggccaggcccggagcagctgcagccctgggggccgcaccccagctgcccgggacagcatcgtgcgggaggtgatccagaacagcaaggaggtgctgagcctgctgcaggagaagaacccagccttcaagcctgtgctggccatcatccaggccggagatgacaacctgatgcaggagatcaaccagaacctggccgaggaggccggcctgaacatcacccacatctgcctgcccccagacagcagcgaggccgagatcattgatgagatcctgaagatcaatgaagacaccagggtgcacggcctggccctgcagatcagcgagaacctcttcagcaacaaggtgctgaatgccctgaagccagagaaggatgtggatggagtgacagacatcaacctgggcaagctggtgagaggagatgcccatgaatgttttgtgtcccctgtggccaaggccgtcatcgagctgctggagaagagcggcgtgaacctggatggcaagaagatcctggtggtgggcgcccacggcagcctggaggccgccctgcagtgcctcttccagaggaagggctccatgaccatgagcatccagtggaagacccggcagctgcagagcaagctgcacgaggccgacatcgtggtgctgggcagccccaagccagaggagatccccctgacctggatccagcccggcaccaccgtgctgaactgcagccatgacttcctgagcggcaaggtgggctgcggcagcccccgcatccactttggaggcctgattgaagaagatgatgtgatcctgctggccgccgccctgcgcatccagaacatggtgtcctctggaagacgctggctgcgggagcagcagcaccggcgctggaggctgcactgcctgaagctgcagcccctgagccctgtgcccagcgacatcgagatcagccggggccagacccccaaggctgtggatgtgctggccaaggagatcggcctgctggctgatgaaattgagatctacggcaagagcaaggccaaggtgcggctgtctgtgctggagcggctgaaggaccaggctgatggcaagtatgtgctggtggccggcatcacccccacccccctgggggagggcaagagcacagtgaccatcggcctggtgcaggccctgacagcccacctgaatgtgaacagctttgcctgcctgcggcagcccagccagggccccacctttggagtgaagggcggggccgccggcggcggctacgcccaggtgatccccatggaggagttcaacctgcacctgaccggggacatccacgccatcacagctgccaacaacctgctggccgccgccatcgacacccgcatcctgcacgagaacacccagacagacaaggccctgtacaaccggctggtgcccctggtgaatggagtgcgggagttcagcgagatccagctggcccggctgaagaagctgggcatcaacaagacagaccccagcaccctgacagaggaggaggtgtccaagtttgcccggctggacatcgaccccagcaccatcacctggcagagggtgctggacaccaatgaccgcttcctgaggaagatcaccatcggccagggcaacacagagaagggccactaccggcaggcccagtttgatattgctgtggccagcgagatcatggctgtgctggccctgacagacagcctggccgacatgaaggcccggctgggccgcatggtggtggccagtgacaagagcggccagcctgtgacagcagatgacctgggcgtgactggagccctgactgtgctgatgaaggatgccatcaagcccaacctgatgcagaccctggagggcacccctgtgtttgtgcatgctggcccctttgccaacatcgcccacggcaacagctctgtgctggccgacaagatcgccctgaagctggtgggggaggagggctttgtggtgacagaggccggctttggagctgacatcggcatggagaagttcttcaacatcaagtgccgggccagcggcctggtgcccaacgtggtggtgctggtggccaccgtgcgggccctgaagatgcacggcggcggccccagcgtgacagctggggtgcccctgaagaaggagtacacagaggagaacatccagctggtggctgatggctgctgcaacctgcagaagcagatccagatcacccagctgtttggagtgcctgtggtggtggccctgaatgtgttcaagacagacaccagggctgagattgacctggtgtgtgagctggccaagagagctggggcctttgatgctgtgccctgctaccactggagcgtgggcggcaagggctctgtggacctggcccgggctgtgcgggaggccgccagcaagaggagccgcttccagttcctgtatgatgtgcaggtgcccatcgtggacaagatccgcaccatcgcccaggccgtgtatggagccaaggacatcgagctgagccctgaggcccaggccaagattgaccgctacacccagcagggcttcggcaacctgcccatctgcatggccaagacccacctgagcctgagccaccagcctgacaagaagggcgtgccccgggacttcatcctgcccatcagtgatgtgcgggccagcatcggggccggcttcatctaccccctggtgggcaccatgagcaccatgcctggcctgcccacccggccctgcttctatgacatcgacctggacacagaaacagagcaggtgaagggcctcttctag

SEQ ID NO: 186770 - DNA, 2937 bp, Artificial Sequence
  derived and/or modified sequence
atgggcacccggctgcccctggtgctgcggcagctgcggcggcccccgcagccccccggccctcctcgcagactgcgtgtgccatgtagagcatcgagcggcggtggcggaggtgggggtggcggccgtgaaggacttcttggacagcgccgaccacaggacggacaggcccgcagttcttgctctccgggcgggcgtacacccgccgcaagggactccattgtgagggaagtaattcagaattctaaggaagtcctctctctgcttcaagagaaaaacccagcttttaaacctgtgctagcaattattcaggccggcgacgacaatctgatgcaggaaatcaaccagaatctcgccgaagaagccggactcaacatcacccacatttgcctgcctcctgacagctccgaagctgagataattgacgaaatactaaaaatcaacgaggatacccgtgtgcacggcctcgccctgcagataagcgagaatctctttagtaacaaagttctaaacgccctaaaaccggagaaggatgtagacggggtcacggatataaatttgggaaaactcgtgaggggggacgcacacgaatgctttgtctcaccagtggccaaggctgtcatcgagttactggagaagagcggggtgaatctggacggcaaaaagatcctggtggtgggtgctcacggctcgctcgaggcagctttgcagtgcctgttccaaaggaagggatccatgactatgtctatccagtggaaaacacgccaactgcagagtaaacttcatgaagccgacatcgttgtattggggtcccctaagccggaggagatccccctgacttggatacagcccggaacaaccgtgctaaattgctctcatgattttttgtccgggaaagtggggtgcgggagtcccaggattcactttggcggtctgattgaggaggacgacgttattctgttggccgccgccctcagaatccagaacatggtcagctcgggaagacggtggttgcgtgagcagcaacaccgaaggtggaggctacactgcctcaagcttcagccgctgtcccctgttccctctgatatcgaaatatcaagaggccagacacccaaggctgtggacgtccttgcgaaagagatagggctgctagcggatgaaattgagatctacggaaagagtaaggccaaggttcggctcagcgttttagaaaggttgaaagaccaggctgatggtaaatacgtgctcgtagccggtattacgccaacaccgctaggggaggggaagagtaccgtgactattggtctggtgcaagctcttaccgctcacctgaacgtcaactcctttgcctgtttgcgacaaccttcccaaggtcctacattcggagtgaagggtggagcagcggggggaggatatgcccaggtgatacctatggaggagtttaacttacacctgacaggcgatattcacgctattacggcagcaaataacttgctggccgccgcaatcgataccaggatcctgcacgaaaatacccagaccgacaaagccttgtacaaccgtttggttcctctagtgaacggcgtgagagagttctcagagattcagctggcccggctcaagaaactaggaattaacaagaccgatccctctaccctgactgaagaggaagtctccaaattcgcacgactggatattgatccttccaccatcacctggcagagggtgctggacacaaatgaccgatttctgaggaaaatcactataggccagggtaatactgagaaaggccattacaggcaagcccagtttgatatcgctgtggccagcgagattatggctgtgcttgccctaaccgattctcttgccgatatgaaagcccgattgggcagaatggtcgtagcctcagataaaagcggacaaccagtcactgccgatgatctaggagtaacaggtgctctcacagtgctgatgaaggacgccatcaagcccaatctgatgcaaaccttggaagggaccccggttttcgtgcacgcaggcccctttgccaacatcgcacacgggaacagcagcgtactggctgacaagattgcccttaagttggtgggagaagagggattcgttgtcaccgaagccggtttcggagccgacatcgggatggagaagttcttcaacataaaatgtagggcaagcggtttggtgcctaatgttgtggttctggtggcaaccgtgagggctttaaaaatgcacggcggagggcccagtgtcactgctggggtgcctctcaagaaagaatacacggaggagaacattcagctggtagccgatggctgctgtaatctgcagaagcagatccagatcacccaactgtttggggtgccggtggtggttgcactgaacgtgtttaaaacagacactagggcagaaatcgatctggtctgtgagttagctaagagggctggggccttcgatgcagttccgtgttaccactggtccgtgggagggaagggaagtgtggacctggctcgtgcagtgagagaggctgcgtctaagcggagcagatttcagttcctctacgatgtgcaggtccccattgttgacaagatccgcactatagcccaagccgtttatggtgccaaagacattgagctttcccccgaagcacaagctaaaatcgaccggtacacccagcaaggatttggaaacttgcccatctgcatggctaaaacacacctgtctctctcccaccaaccagataagaaaggcgttcccagagatttcatacttcctatcagtgatgtgcgggccagcatcggggcagggttcatatacccgctcgttggtactatgagcactatgcctgggctgcctacccgtccttgcttttatgatatagatcttgacactgagactgaacaggtcaagggcctcttttag

SEQ ID NO: 186771 - DNA, 2937 bp, Artificial Sequence
  derived and/or modified sequence
atgggcacaaggctcccgctcgtgcttcgccaattgcgcaggccaccccagcccccaggtccaccacggaggttaagagtaccctgtcgggctagtagcggcggaggcggtgggggagggggtggcagagaggggctgctagggcagcggagacctcaagacggccaagcacgctccagctgcagtccaggagggaggacgccggcagcgagggatagcatagtacgcgaagtgatacagaattcaaaggaggtcttgtcacttcttcaggaaaaaaatccagcttttaagcctgttctggctatcatacaagccggagatgacaacctgatgcaggagattaaccagaatctcgcagaggaggctggactgaacatcacccatatctgcctcccccctgactcatccgaagccgaaattatagatgagattctcaagattaacgaggacacccgcgtacacggtcttgcactccagatcagtgagaacctcttcagcaacaaggtactcaatgctcttaaacccgagaaggatgtggacggggtcaccgacattaacttaggtaaactcgtgcgcggagatgcccacgagtgcttcgtatcgcccgtggccaaggccgtgatcgagcttctagaaaagagcggagttaatttagacggaaagaaaatcttagtcgtgggtgcccatgggagcctagaggctgccctgcagtgcctgttccagcgcaagggatccatgaccatgagcatccagtggaaaacacgccagctgcagtcaaagctgcacgaggccgacatcgtggtcctgggatcacccaagcccgaggagatccctctaacgtggatacaacctggtactacagtcctcaactgttcacatgatttcctctccgggaaggttggatgtggcagcccacgaattcattttggaggactaatcgaagaggacgacgtgattttgctggccgcagctctccgaatacagaatatggtgtcctcaggccgaaggtggctgcgcgagcagcaacaccggaggtggcggctgcactgtcttaaactgcaaccattgagtccggttcccagtgatattgagatctcaagggggcagacccctaaagcggtggatgtgttggctaaggagattggcctccttgcagacgagatcgaaatctacgggaagtccaaggccaaggttcgactatctgttctcgaaagattgaaagaccaagcagacgggaaatacgtcctggttgcaggcataacacccacgccactgggtgagggcaagtccacggtgaccatcggactcgtgcaagccctgacagcacatcttaacgtcaatagttttgcatgcctgaggcagccctcccagggccctactttcggtgtgaagggcggagccgcagggggagggtatgcccaagtcatccccatggaggagttcaacctccatctcacaggcgacatacacgcgattacagctgccaataatctattagccgcagcaatagacactaggattctccatgagaacacccagaccgataaggccctgtataaccggttggttccgctcgttaatggggtgcgtgaattcagcgagattcagctggcccgattaaagaagctgggaattaacaagactgatccaagtacgctgaccgaagaggaagtttcaaaattcgcacgtttggatattgaccctagcacaatcacttggcagagggtgctagacactaacgacaggtttctgagaaagatcaccattggacaaggaaacacggaaaaaggccactatcgtcaggcccaatttgacatcgcggtggcatctgagattatggcagtcttagctcttactgatagtctcgccgatatgaaagcccgacttggccgaatggtcgtggcaagtgataagtcagggcagcccgttaccgccgatgacctcggagtgacgggggcattgaccgtcctgatgaaagacgcaatcaaacctaatttgatgcagacactcgaagggaccccagttttcgttcacgccggaccttttgctaatattgcccacgggaatagcagcgtgctagccgacaagattgcactgaaactcgttggcgaagagggcttcgtagtcactgaagccggtttcggagccgatatagggatggaaaaattcttcaatatcaagtgcagagcctctgggctggtgcccaatgtggtcgtgctggtggcaacagtacgcgctctgaagatgcacggtggcggaccatctgtaactgcaggcgttcctcttaaaaaagaatacaccgaggaaaacatccagcttgtcgccgatggctgctgcaacctacagaagcagatacagattacccagctgtttggggtacccgtggtggtcgccctaaacgtgttcaaaacagacacccgggctgagatcgacctggtttgtgagctcgccaaacgagccggtgcatttgacgccgtcccatgttaccattggagtgttggcggaaagggttccgtcgacctggcccgtgctgtgagggaggccgcatctaagcgcagcagatttcagttcctgtacgatgtgcaggtgcctattgtagataaaattagaaccatagctcaggcagtgtatggtgcgaaggacatagaactgtctcctgaggcccaggcaaagattgacaggtacacccaacagggtttcggtaatctgccgatatgcatggcaaaaactcatcttagtttaagccatcagccggacaagaaaggcgtcccaagagatttcatcctgcctatctctgatgtgagggcaagcattggcgcaggattcatctatcctctggtcggaacgatgagcacaatgcccggtcttcccactagaccctgtttttacgacatcgacctggacaccgaaactgagcaggtgaagggactgttttag

SEQ ID NO: 186772 - protein, 750 aa, Artificial Sequence
  derived and/or modified sequence
MAKPRLLVLYFALIVVPAWVSSIVLTGTSEPPDAQTVAPAEDETLQNEADNQENVLSQLLGDYDKVKAMSEGSDCQCKCVVRPLGRDACQRINAGASRKEDFYTVETITSGSSCKCACVAPPSALNPCEGDFRLQKLREADSQDLKLSTIIDMLEGAFYGLDLLKLHSVTTKLVGRVDKLEEEVSKNLTKENEQIKEDMEEIRTEMNKRGKENCSENILDSMPDIRSALQRDAAAAYAHPEYEERFLQEETVSQQINSIELLQTRPLALPEVVKSQRPLQRQVHLRGRPASQPTVIRGITYYKAKVSEEENDIEEQQDEFFSGDNGVDLLIEDQLLRHNGLMTSVTRRPAATRQGHSTAVTSDLNARTAPWSSALPQPSTSDPSIANHASVGPTLQTTSVSPDPTRESVLQPSPQVPATTVAHTATQQPAAPAPPAVSPREALMEAMHTVPVPPTTVRTDSLGKDAPAGWGTTPASPTLSPEEEDDIRNVIGRCKDTLSTITGPTTQNTYGRNEGAWMKDPLAKDERIYVTNYYYGNTLVEFRNLENFKQGRWSNSYKLPYSWIGTGHVVYNGAFYYNRAFTRNIIKYDLKQRYVAAWAMLHDVAYEEATPWRWQGHSDVDFAVDENGLWLIYPALDDEGFSQEVIVLSKLNAADLSTQKETTWRTGLRRNFYGNCFVICGVLYAVDSYNQRNANISYAFDTHTNTQIVPRLLFENEYSYTTQIDYNPKDRLLYAWDNGHQVTYHVIFAY

SEQ ID NO: 186773 - DNA, 2253 bp, Artificial Sequence
  derived and/or modified sequence
atggcgaagcctaggctgctcgtgctttatttcgctctcatagtggtgccggcttgggtgtcaagcatagtcctgaccggcacctctgagccaccagacgcccaaacagtagcaccagctgaagatgagacgctgcaaaacgaagctgacaaccaagagaacgtgttgtcccaactactcggagattacgacaaggtgaaagctatgtcggagggttccgactgccaatgcaagtgtgttgtgaggcccctgggcagagatgcgtgccaacgaatcaacgctggagcatctcgcaaggaggatttttataccgtggaaactataaccagcggcagttcttgcaaatgtgcatgtgtggccccaccaagcgcccttaatccctgtgaaggtgatttcaggctgcagaagctgagagaggctgacagccaggaccttaagttgagcaccatcattgatatgctggagggcgcattctatggcctggacttgctcaagttgcactctgttacaaccaagttagtcgggagggtcgacaaattagaagaggaagtcagcaaaaacctcaccaaggagaatgagcaaatcaaggaggatatggaggagatccgcactgaaatgaataagcggggaaaggaaaattgctctgagaatatactcgattctatgccagatatccgctcagctttgcagcgggatgctgcagccgcttacgcacatcctgagtatgaggagcgcttcctgcaggaagaaacggtgagccagcaaatcaattctattgagctgctccagacaagacctctggccctaccagaggtcgtgaagtctcagcgaccacttcagcggcaggtgcacctgcggggtagaccagcctctcagccgacagttatccggggaatcacctactacaaggccaaggtgtctgaggaggaaaacgacatcgaggagcagcaggacgagttcttcagtggcgataatggagtagatcttctcatcgaagatcaattgcttaggcataacggtctcatgacatctgttacgcgccgtcccgcagccacgaggcaaggccatagtaccgcggtcacctctgacctaaacgctcgcacagctccatggtcctcagcactgccccagccttcgacctctgacccctccattgccaatcacgctagcgttggtcccactttgcaaaccaccagtgtgagcccagatcccacccgtgaatccgtcttacagccatctccacaggttccagccactacagtggcccatacagctacccaacagcctgctgcccctgccccaccagccgtgagcccaagggaggccctaatggaagcaatgcacacagtgccagtccccccaaccaccgtgagaaccgattcacttggaaaagatgctcctgcgggatggggcacaacccctgcaagtccaaccttgagtcctgaggaagaagacgacatcaggaacgtgattggcaggtgcaaagatacactctccacaattacaggccctacaacgcagaacacttacggacgtaatgagggcgcatggatgaaagatcctctggctaaagacgagcggatctacgtgaccaactattactacggaaatacactcgttgaatttagaaacttagaaaatttcaagcaaggcagatggagtaactcttataagctgccttatagctggatcggcacaggtcatgtggtttataatggagcattctattacaatagagcctttactcgcaatatcatcaagtatgatctcaagcagcggtatgttgcagcatgggccatgctccacgacgtggcatacgaggaagccacaccttggcggtggcagggtcactctgatgttgatttcgccgtggacgagaacggcctgtggctcatatacccggcactcgacgacgagggcttctctcaggaggtcatcgtactgtccaaattaaacgcggctgacctgagcacacaaaaggaaactacttggagaacaggcctgcgtcgcaacttttatggaaattgtttcgtcatctgcggggtcctttacgctgtggatagctacaaccagcgtaacgctaatatctcctatgcttttgatacacataccaatactcagattgttcctaggctgcttttcgagaatgagtactcctacactactcaaatcgactataacccaaaagaccgacttctgtatgcatgggacaatggacatcaggttacctaccacgtgatcttcgcatattag

SEQ ID NO: 186774 - DNA, 2253 bp, Artificial Sequence
  derived and/or modified sequence
atggccaagccccgcctcctggtcctgtatttcgcgcttattgttgtacctgcctgggtgtcttctatcgtgctaaccggaacaagtgaacctcctgacgctcaaaccgtggcgcctgcagaagacgaaacgctgcagaatgaagcagacaaccaggagaatgtactgtcccaactgcttggagattatgataaggtgaaggctatgagtgaaggatctgactgtcagtgcaaatgcgttgtgcgcccactgggcagagatgcatgccagagaatcaatgccggggcgagccgaaaggaagatttctatacggtcgagaccattacctccggcagttcctgtaagtgtgcctgtgtagcacctccatccgctttaaatccctgcgagggtgatttccggctgcagaagttgagggaggccgactctcaagatctcaagctatcaacaattattgacatgctggagggtgctttctacggtctagacctgctgaagctccacagcgtcactaccaaattagtgggaagagtcgataagctggaggaagaggtgtcaaaaaacctgacaaaggaaaacgagcagattaaagaagatatggaggagatccgcactgaaatgaacaagaggggtaaggaaaactgctccgaaaacatcctggacagcatgccagatatccggagcgcattgcagagagacgccgccgctgcttacgcgcaccccgaatacgaggaacgctttttgcaggaagaaaccgtgtctcagcaaatcaacagtatcgaactgctgcaaaccaggccactggctttacctgaggtggtcaagagtcagcgcccgctgcagagacaggttcacctacgcggccgcccagcctctcaaccgaccgtaattagaggaataacctattacaaagctaaagtatcagaggaggagaatgacattgaggagcaacaggatgagttcttctcaggtgacaacggggtggacctgctcattgaggatcagctgctccgccataacgggctgatgacatctgtgacacgccgacccgccgcaacaagacagggtcattcaacggcggtgactagcgacctgaacgcacggacggccccttggagtagcgctctgccccagccctcgacatctgacccatccatcgctaatcacgctagcgtgggacccactctgcaaactacgtcagtatcccccgaccctactagagaaagcgtgctgcagccttcgccccaggtgcccgctaccaccgtcgcccacactgcaacccagcagcctgccgcaccggctccgccagcagtgtccccacgtgaggccctgatggaagccatgcacaccgtgcccgtcccacccacaacagtgcggactgactcactgggcaaagatgcgcccgctggatggggaactacacctgcctcacctaccctgtctcctgaggaggaggacgatattcgcaatgttatcggtcgatgtaaagatacattaagcactatcaccggacccaccacacagaacacttacggccggaacgaaggggcgtggatgaaagacccgctggccaaggacgaaaggatatacgttactaattactattacggcaacactcttgtagagttccggaatttagagaactttaagcagggccgctggtctaattcctacaaacttccttattcttggataggcacggggcatgtcgtttacaacggcgctttttattataacagagcttttacaaggaacataattaagtacgatctgaagcagaggtacgtggcagcctgggcaatgcttcacgatgtggcctacgaggaagctaccccatggcgctggcagggccatagtgacgtggactttgctgtggacgaaaacggattgtggctgatttatcccgccctggacgatgagggattttcccaggaggtgattgttctgtctaaacttaatgccgcagatctttctacgcaaaaggaaacaacgtggcggacaggtctgcgacgcaacttctacggaaattgtttcgtcatatgtggcgtcctttatgcagtagatagttacaatcagcggaacgctaacatttcttacgcttttgatactcatacaaacacacagattgttccccgtctgttattcgaaaacgagtattcttataccacacaaattgattataaccctaaggaccggttactgtacgcttgggataacggacaccaggtgacataccacgtgatcttcgcatactag

SEQ ID NO: 186775 - DNA, 2253 bp, Artificial Sequence
  derived and/or modified sequence
atggcaaagccccgcctgttggtattatatttcgcactaatcgtggtacccgcttgggtgtcaagcatcgttctcaccggaacctctgaaccccccgatgcacagaccgtagcccctgccgaagatgaaacgctccaaaacgaggcagataaccaagaaaatgtgttaagccagctcctcggtgattatgacaaggttaaggccatgagcgaaggtagtgattgccaatgtaaatgcgtggtacgaccactaggtcgcgacgcttgtcagaggatcaatgccggtgcgagccggaaggaagacttttacacagtggaaaccatcacctcaggctcgagttgcaaatgtgcgtgtgtggcaccgccatccgccctgaacccgtgtgagggcgactttcgtctgcaaaagctgagggaagccgatagccaggatcttaaactgagcacgattattgatatgctagaaggggctttctacggactagacttgttaaaattgcactcagtgacaaccaagttggtaggcagagtcgataagctggaagaggaagtgtccaaaaacctgacgaaagaaaatgaacagattaaagaagatatggaggagatcagaactgaaatgaataaaagaggcaaggaaaattgcagcgagaacatcctggattcaatgccagatattcgtagcgcactccagcgagacgccgccgcagcctatgcacatcctgaatacgaagaaagatttttgcaagaggagacagtgtcacaacaaattaactctatagagctactccagacacgccctcttgcgctgccggaagttgtgaagtcccagaggccattgcagaggcaggtgcacctgagaggcagacccgctagccagcccacagttataagaggtattacatactacaaagccaaagtgtcagaggaagagaacgatattgaagaacaacaggacgaattctttagcggagacaacggagttgatcttctgattgaagatcagttgctcaggcataacgggctgatgacctccgtgacgcgacgacctgccgcaactcgtcaaggacattccacagctgtcacttccgatctgaacgctagaactgcgccttggtcttccgccctgccacagccatccactagcgacccttcaattgcaaatcacgcttctgtgggcccaaccctgcaaactacctcagtctcgccagatccaacccgcgagagcgttcttcagccatccccccaagtgccagccaccactgtggcccacaccgcgacccaacaacccgctgcaccagctccccccgccgtgtcgcctcgggaggccctgatggaagccatgcataccgtccctgtaccgcccacaactgttcgaaccgattccctgggcaaggacgctcctgcaggctggggcactacccctgcaagccctaccttgagccctgaagaggaagacgatattcgcaatgtgattggaagatgtaaggacaccctatctacgattaccgggccgaccacacaaaatacatatggccggaatgaaggagcctggatgaaagaccccctggctaaggatgagcgaatatacgtcactaactactattatgggaacacactcgtcgaattccgaaatctggaaaattttaagcagggaagatggagcaattcttataaattaccgtacagctggattgggacaggccatgtggtatataacggcgcattctactacaatcgcgcgtttacacgcaacatcatcaagtacgatctgaaacaacgctatgtagcagcttgggccatgctccatgatgtcgcctacgaggaggctacaccatggcggtggcagggccattctgatgtcgattttgcggtagacgaaaacgggctgtggctgatctacccagccctggacgatgagggtttttctcaagaggtgatcgtgctgtctaaattgaacgctgcagacctgtcaacccagaaggagacaacttggcgcactggacttaggcgaaatttttacggcaattgctttgttatctgcggagtgctttatgcagtggattcatacaatcaacgaaatgccaatatcagttatgcttttgatacacacacaaacacccagatcgtcccacgattattattcgagaacgaatatagctataccacccagatcgactataatccgaaagatagactactctatgcttgggataacggccaccaggttacctaccatgtcatttttgcatattag

SEQ ID NO: 186776 - DNA, 3160 bp, Artificial Sequence
  derived and/or modified sequence
gcccgcgccgccaccgcctcttccctccccgtgtccggtccccgtgcgtcccgaggctccccgccgcccgtcccggcgcgcaccgcgggcgtctgtccgaacgccttccagccacctgagccctcctgcgggcgactcgctcagctagcccgtgcccgcctccaccttctccgtcatcccctcttccttgcgtccggctctccactggggctgcacagtcgagggctgctcgcgtcgggaaggagatgcccagagtctctggggcgcaccctcccgtcccgctcagccgcacccagctttagaaggtgctctcagcagccactttcgggctctagcgaggacaccctctcgcagaagtccttgccgagaccccccgccccagccattctctgaaggggctgaggacactcttatcgcgcccctcatggccaagcctcggctgctagttctctacttcgctctgattgtggttccggcctgggtgtccagcattgtcctcacagggacaagcgagcccccagatgcgcagacagtggcgcctgcggaggacgagactctgcaaaacgaggcggacaaccaggagaacgttttatctcagttgctgggggactatgacaaggtcaaggctatgtctgagggctcggactgtcagtgcaagtgtgtggtgagacccctgggccgggatgcctgccagaggatcaatgcgggggcctccaggaaggaagacttctataccgtggaaaccatcacctcaggctcgtcgtgcaagtgtgcctgtgtagcacccccatcggccctcaatccctgcgagggagacttcaggctccagaagctgcgggaggcagacagccaggacttgaagctctccacaatcatagacatgttggaaggagcgttctatggcctggatctcctgaagctacattcagtcaccaccaaactggtggggcgagtggataaactggaggaggaagtgtctaaaaacctcaccaaggaaaatgaacaaatcaaagaggacatggaagaaattcgaaccgagatgaataagcgaggcaaagaaaattgctctgaaaacatcctagatagcatgccagacatccgctcagccctgcagagggatgcagcagcagcctacgcccacccagagtatgaagagcggtttctgcaggaagaaaccgtgtcccagcagatcaactccatcgaacttctgcagacgcgacccctggctctgcctgaggtggtgaagtcacagcggcccctgcagaggcaggtccacctgagaggccggccggcctcccagcccactgtcatccggggcatcacctactataaagccaaggtctctgaagaagagaatgacattgaagagcagcaagatgagtttttcagcggtgacaatggagtggatttgctgattgaagatcagctcctgagacacaacggcctgatgaccagtgtcacccggaggcctgcagccacccgtcagggacacagcactgctgtgacaagcgacctgaacgctcggaccgcaccctggtcctcagcactgccacagccctcgacctcagatcccagcatcgccaaccatgcctcagtgggaccaacactccaaacaacctcggtgtctccagatcccacaagggagtcagtcctgcagccttctcctcaggtaccagccaccactgtggcccacacagccacccagcaaccagcagccccagctcctccggcagtgtctcccagggaggcattgatggaagctatgcacacagtcccagtgcctcccaccacagtcagaacagactcgctggggaaagatgctcctgctgggtggggaacaacccctgccagccccacgctgagccccgaagaagaagatgacatccggaatgtcataggaaggtgcaaggacactctctccacaatcacggggccgaccacccagaacacatatgggcggaatgaaggggcctggatgaaggaccccctggccaaggatgagcggatttacgtaaccaactattactacggcaacaccctggtagagttccggaacctggagaacttcaaacaaggtcgctggagcaattcctacaagctcccgtacagctggatcggcacaggccacgtggtatacaatggcgccttctactacaatcgcgccttcacccgcaacatcatcaagtacgacctgaagcagcgctacgtggctgcctgggccatgctgcatgacgtggcctacgaggaggccaccccctggcgatggcagggccactcagacgtggactttgctgtggacgagaatggcctatggctcatctacccggccctggacgatgagggcttcagccaggaggtcattgtcctgagcaagctcaatgccgcggacctgagcacacagaaggagaccacatggcgcacggggctccggaggaatttctacggcaactgcttcgtcatctgtggggtgctgtatgccgtggatagctacaaccagcggaatgccaacatctcctacgctttcgacacccacaccaacacacagatcgtccccaggctgctgttcgagaatgagtattcctatacgacccagatagactacaaccccaaggaccgcctgctctatgcctgggacaatggccaccaggtcacttaccatgtcatctttgcctactgacacccttgtccccacaagcagaagcacagaggggtcactagcaccttgtgtgtatgtgtgtgcgcgcacgtgtgtgtaggtgggtatgtgttgtttaaaaatatatattattttgtataatattgcaaatgtaaaatgacaatttgggtctatttttttatatggattgtagatcaatccatacgtgtatgtgctggtctcatcctccccagtttatatttttgtgcaaatgaacttctccttttgaccagtaaccaccttccttcaagccttcagcccctccagctccaagtctcagatctcgaccattgaaaaggtttcttcatctgggtcttgcaggaggcaggcaacaccaggagcagaaatgaaagaggcaagaaagaagtgctatgtggcgagaaaaaaagttttaatgtattggagaagttttaaaaaacccagaaaaacgctttttttttttaataaagaagaaatttaaaatca

SEQ ID NO: 186777 - DNA, 2253 bp, Artificial Sequence
  derived and/or modified sequence
atggccaagcccagactgctggtgctgtacttcgccctgatcgtggtgcccgcctgggtgagcagcatcgtgctgaccggcaccagcgagccccccgacgcccagaccgtggcccccgccgaggacgagaccctgcagaacgaggccgacaaccaggagaacgtgctgagccagctgctgggcgactacgacaaggtgaaggccatgagcgagggcagcgactgccagtgcaagtgcgtggtgagacccctgggcagagacgcctgccagagaatcaacgccggcgccagcagaaaggaggacttctacaccgtggagaccatcaccagcggcagcagctgcaagtgcgcctgcgtggccccccccagcgccctgaacccctgcgagggcgacttcagactgcagaagctgagagaggccgacagccaggacctgaagctgagcaccatcatcgacatgctggagggcgccttctacggcctggacctgctgaagctgcacagcgtgaccaccaagctggtgggcagagtggacaagctggaggaggaggtgagcaagaacctgaccaaggagaacgagcagatcaaggaggacatggaggagatcagaaccgagatgaacaagagaggcaaggagaactgcagcgagaacatcctggacagcatgcccgacatcagaagcgccctgcagagagacgccgccgccgcctacgcccaccccgagtacgaggagagattcctgcaggaggagaccgtgagccagcagatcaacagcatcgagctgctgcagaccagacccctggccctgcccgaggtggtgaagagccagagacccctgcagagacaggtgcacctgagaggcagacccgccagccagcccaccgtgatcagaggcatcacctactacaaggccaaggtgagcgaggaggagaacgacatcgaggagcagcaggacgagttcttcagcggcgacaacggcgtggacctgctgatcgaggaccagctgctgagacacaacggcctgatgaccagcgtgaccagaagacccgccgccaccagacagggccacagcaccgccgtgaccagcgacctgaacgccagaaccgccccctggagcagcgccctgccccagcccagcaccagcgaccccagcatcgccaaccacgccagcgtgggccccaccctgcagaccaccagcgtgagccccgaccccaccagagagagcgtgctgcagcccagcccccaggtgcccgccaccaccgtggcccacaccgccacccagcagcccgccgcccccgccccccccgccgtgagccccagagaggccctgatggaggccatgcacaccgtgcccgtgccccccaccaccgtgagaaccgacagcctgggcaaggacgcccccgccggctggggcaccacccccgccagccccaccctgagccccgaggaggaggacgacatcagaaacgtgatcggcagatgcaaggacaccctgagcaccatcaccggccccaccacccagaacacctacggcagaaacgagggcgcctggatgaaggaccccctggccaaggacgagagaatctacgtgaccaactactactacggcaacaccctggtggagttcagaaacctggagaacttcaagcagggcagatggagcaacagctacaagctgccctacagctggatcggcaccggccacgtggtgtacaacggcgccttctactacaacagagccttcaccagaaacatcatcaagtacgacctgaagcagagatacgtggccgcctgggccatgctgcacgacgtggcctacgaggaggccaccccctggagatggcagggccacagcgacgtggacttcgccgtggacgagaacggcctgtggctgatctaccccgccctggacgacgagggcttcagccaggaggtgatcgtgctgagcaagctgaacgccgccgacctgagcacccagaaggagaccacctggagaaccggcctgagaagaaacttctacggcaactgcttcgtgatctgcggcgtgctgtacgccgtggacagctacaaccagagaaacgccaacatcagctacgccttcgacacccacaccaacacccagatcgtgcccagactgctgttcgagaacgagtacagctacaccacccagatcgactacaaccccaaggacagactgctgtacgcctgggacaacggccaccaggtgacctaccacgtgatcttcgcctactag

SEQ ID NO: 186778 - DNA, 2253 bp, Artificial Sequence
  derived and/or modified sequence
atggcgaagccacgactcctggtgctctattttgctttgatagtggttcctgcctgggttagttccattgtgcttactggaactagcgaacctcctgatgcacagacagtggctccagccgaggacgaaactctacagaatgaggccgataatcaagaaaacgtactgagccaactcttgggagattatgacaaagtcaaggcgatgtcggagggcagcgactgtcaatgtaagtgtgtggttagaccattaggacgggacgcttgtcagagaataaatgctggagcatcacggaaagaagatttttatacagtggagaccatcacaagtggcagctcctgtaaatgtgcttgcgtggccccccccagtgcactgaacccctgtgaaggtgattttcgattacaaaagctacgtgaagcagatagccaggacttgaaactctcgacaataatagacatgcttgagggagccttctatggccttgacctcctgaagcttcactccgtcactacaaagctggttggccgggtcgataaattggaggaggaagtgtctaagaacctgacaaaggaaaacgagcagatcaaggaggacatggaagagattcggacagaaatgaacaaaagaggtaaggaaaactgctcagaaaatatccttgattcaatgcctgacataaggtccgccctccagcgcgacgccgcagctgcctatgcccatccagagtacgaggaacgattcttgcaggaggagaccgtgtcccaacagattaattctatagagctccttcagacacgaccattggcattacctgaggtggttaaatcacaaagaccactgcaaaggcaggttcatctcagggggaggcccgctagccaacctacagtgatccgcggtatcacctattacaaggcaaaggtatccgaagaggaaaatgatatcgaagaacaacaagatgaattcttttcaggcgacaatggtgtggatcttctgatcgaggatcagctgcttcggcacaatggccttatgacatctgtgacgcgtcgaccagcagcaacgcggcagggccattcaacggccgttacttccgacctcaacgccagaaccgccccttggagcagcgcactgccacaaccttcaaccagcgatcccagtatcgcgaatcatgcatccgtgggcccgacgctgcagacaacgtctgtgtctcccgaccctacccgcgaatcagtactgcagccttcaccacaggtcccggcgacaactgtagcccatacggcgacccaacaaccagctgcacccgccccccccgccgtttccccaagggaggctctgatggaagcaatgcataccgtgcccgtaccccccaccacggtaagaaccgatagccttggtaaagacgcccctgccgggtggggaacaactcccgcctccccaactctgtcccccgaggaagaggatgacatcaggaatgtgattggccgctgcaaagacacactgagtaccatcaccggacccaccacacagaatacatacggtcgcaacgaaggcgcctggatgaaggaccccctcgccaaggatgagagaatttatgtaacaaattattattacgggaacacactcgtggagtttcggaatctggaaaactttaagcagggtcgatggtccaatagctacaagttgccgtactcatggattggcacgggccatgtggtgtataatggagctttttattataatcgggcgtttacaaggaacattatcaaatatgacctgaaacagagatacgtcgctgcctgggcaatgttgcatgatgtggcttacgaagaggccacaccctggcgatggcaaggccatagcgacgtcgactttgctgtggatgaaaatggcctttggcttatttatcccgcccttgacgacgagggtttttcccaggaggtgatcgtcctatcaaaactgaacgctgcagacttgtccacccagaaggagacgacgtggaggaccgggcttcggaggaacttctatggcaattgttttgtgatttgtggagtgttgtatgcggtcgacagctataaccagagaaacgctaatatcagctacgccttcgacacacataccaatactcagatcgtacctcggctgctgtttgaaaatgaatactcttatacgactcaaattgactacaaccccaaggatcgcctgctgtacgcttgggataatggccatcaggtcacataccatgtcatctttgcatactag

SEQ ID NO: 186779 - DNA, 2253 bp, Artificial Sequence
  derived and/or modified sequence
atggccaagccccggctgctggtgctgtactttgccctgattgtggtgcctgcctgggtgagcagcatcgtgctgaccggcaccagcgagcccccagatgcccagacagtggccccagcagaagatgagaccctgcagaatgaagctgacaaccaggagaatgtgctgagccagctgctgggggactatgacaaggtgaaggccatgtctgagggcagtgactgccagtgcaagtgtgtggtgcggcccctgggcagagatgcctgccagaggatcaatgctggggccagcaggaaggaggacttctacacagtggagaccatcaccagcggcagcagctgcaagtgtgcctgtgtggcccctccttctgccctgaacccctgtgagggggacttccggctgcagaagctgcgggaggccgacagccaggacctgaagctgagcaccatcatcgacatgctggagggcgccttctacggcctggacctgctgaagctgcacagcgtgaccaccaagctggtgggccgggtggacaagctggaggaggaggtgtccaagaacctgaccaaggaaaatgagcagatcaaggaggacatggaggagatcagaacagagatgaacaagaggggcaaggagaactgcagcgagaacatcctggacagcatgccagacatccgcagcgccctgcagagagatgctgctgctgcctatgcccacccagaatatgaggagcgcttcctgcaggaggagaccgtgtcccagcagatcaacagcattgagctgctgcagacccggcccctggccctgcctgaggtggtgaagagccagaggcccctgcagaggcaggtgcacctgcggggccgcccagccagccagcccaccgtcatccggggcatcacctactacaaggccaaggtgtctgaggaggagaatgacatcgaggagcagcaggatgagttcttcagcggggacaatggagtggacctgctgattgaggaccagctgctgcggcacaacggcctgatgacctctgtgaccaggaggcctgctgccacccggcagggccacagcacagctgtgaccagtgacctgaatgccaggacagccccctggagcagcgccctgccccagcccagcaccagtgaccccagcatcgccaaccacgcctctgtgggccccaccctgcagaccacctctgtgtccccagaccccacccgggagagcgtgctgcagcccagcccccaggtgcctgccaccaccgtggcccacacagccacccagcagcctgctgccccagcccccccagctgtgagcccccgggaggccctgatggaggccatgcacacagtgcctgtgccccccaccaccgtgaggacagacagcctgggcaaggatgccccagctggctggggcaccaccccagccagccccaccctgagccctgaggaggaggatgacatcagaaatgtgattggccgctgcaaggacaccctgagcaccatcaccggccccaccacccagaacacctacggcagaaatgaaggagcctggatgaaggaccccctggccaaggatgagcgcatctacgtgaccaactactactacggcaacaccctggtggagttcaggaacctggagaacttcaagcagggccgctggagcaacagctacaagctgccctacagctggattggcaccggccacgtggtgtacaacggggccttctactacaacagagccttcaccaggaacatcatcaagtatgacctgaagcagcgctacgtggccgcctgggccatgctgcatgatgtggcctatgaggaggccaccccctggcgctggcagggccacagtgatgtggactttgctgtggatgaaaatggcctgtggctgatctacccagccctggatgatgagggcttcagccaggaggtgattgtgctgagcaagctgaatgctgctgacctgagcacccagaaggagaccacctggaggacaggcctgcggaggaacttctacggcaactgctttgtgatctgtggggtgctgtatgctgtggacagctacaaccagagaaatgccaacatctcctatgcctttgacacccacaccaacacccagatcgtgccccggctgctgtttgaaaatgagtacagctacaccacccagattgactacaaccccaaggaccggctgctgtatgcctgggacaatggccaccaggtgacctaccacgtgatctttgcctactag

SEQ ID NO: 186780 - DNA, 2253 bp, Artificial Sequence
  derived and/or modified sequence
atggccaagccccggctgctggtgctgtacttcgccctgatcgtggtgcccgcgtgggtgtcttccattgtgctaactggtacctcagagccccccgatgcacaaaccgtcgcgcctgcggaggacgagacacttcaaaacgaagcagataaccaggaaaatgtgctttcccagctgctgggggattatgacaaggtgaaagcaatgagtgaagggtctgactgccagtgcaaatgtgttgttcgccccttaggaagagatgcctgtcagcgtatcaacgccggagctagtaggaaggaagatttttacaccgtggagaccatcaccagtgggtcgtcatgtaagtgtgcatgcgttgctcctcctagcgctcttaacccctgtgaaggagacttcagattacaaaagctgagggaggctgactcccaagatctgaagctttctaccatcatcgacatgctggagggtgctttctacggactcgaccttctaaagttgcactctgttactacaaaattggtcggtagagtggacaagctggaggaagaagtgtctaaaaatctgaccaaagaaaatgaacagataaaagaggacatggaggagatacgaaccgagatgaataagcgcggcaaagagaattgctccgagaatattctggattccatgcctgatattagatccgccttacagcgagatgcagctgccgcttatgcccatccagagtacgaggagcgatttctacaggaagaaactgtttctcagcagataaacagcatcgagctgctccaaacacggccactcgctcttccggaggtggtcaaaagccagagaccactacagaggcaagttcacctgcggggaaggccagcttcccagccaactgtcattagggggattacctactacaaggcgaaggtgtcagaggaggagaatgacatcgaggagcagcaggacgaatttttctctggcgacaacggggtggacctgcttatcgaggatcagctcttgcgtcacaatggactgatgacctcagttacaagacgtccagctgctactagacagggccactctactgccgtgacctccgatcttaacgctagaacagcgccctggtcaagcgccctgccccagccctctacatccgacccatctattgccaaccatgcctctgtgggacccacactgcagacaacaagcgtgtcaccagacccaactcgagagagcgtgttgcagccatccccccaggtgcctgcaacgacagtagctcataccgcgactcagcaacctgccgcccccgctccacctgccgtctcacctagagaggctctgatggaggcaatgcacaccgttccagtgccaccaacaaccgtaaggacagatagtttgggcaaagacgcgcccgccgggtgggggaccacacccgcatctcccaccttaagtccagaagaagaggatgatatcaggaacgttataggtcggtgcaaagatacgctgtcaaccatcactggtccaactacacagaacacttatggtcggaatgaaggcgcttggatgaaagaccccctcgccaaggatgagcgaatctacgttactaactattattatggcaacaccctggtcgaatttcggaatctcgagaactttaagcaaggccgctggtctaattcctacaagttgccgtactcttggataggaacaggccatgtggtgtataatggggcgttttattataatagagccttcaccagaaacatcatcaagtatgatttaaaacaaagatacgtagccgcgtgggctatgttgcatgacgttgcttatgaggaggccacaccgtggagatggcaaggccacagcgatgtggatttcgccgtcgacgaaaacggactttggttaatctatcccgctttggatgacgagggcttctcccaagaagtaatcgtgctctcaaagctgaacgccgcagatcttagtactcagaaagagacgacatggcggactggcttgcgccggaacttctacggaaattgcttcgtcatctgtggagttctgtacgcagtggactcatacaatcagagaaatgcaaatataagctacgccttcgacactcataccaatacacaaattgtcccccggctcctcttcgaaaacgaatactcatacaccacacagatcgactataaccccaaggacagactgctgtacgcctgggataacggccatcaggtgacataccacgtaatcttcgcttattag

SEQ ID NO: 186781 - RNA, 2253 nt, Artificial Sequence
  derived and/or modified sequence
auggccaagccccgccuccugguccuguauuucgcgcuuauuguuguaccugccugggugucuucuaucgugcuaaccggaacaagugaaccuccugacgcucaaaccguggcgccugcagaagacgaaacgcugcagaaugaagcagacaaccaggagaauguacugucccaacugcuuggagauuaugauaaggugaaggcuaugagugaaggaucugacugucagugcaaaugcguugugcgcccacugggcagagaugcaugccagagaaucaaugccggggcgagccgaaaggaagauuucuauacggucgagaccauuaccuccggcaguuccuguaagugugccuguguagcaccuccauccgcuuuaaaucccugcgagggugauuuccggcugcagaaguugagggaggccgacucucaagaucucaagcuaucaacaauuauugacaugcuggagggugcuuucuacggucuagaccugcugaagcuccacagcgucacuaccaaauuagugggaagagucgauaagcuggaggaagaggugucaaaaaaccugacaaaggaaaacgagcagauuaaagaagauauggaggagauccgcacugaaaugaacaagagggguaaggaaaacugcuccgaaaacauccuggacagcaugccagauauccggagcgcauugcagagagacgccgccgcugcuuacgcgcaccccgaauacgaggaacgcuuuuugcaggaagaaaccgugucucagcaaaucaacaguaucgaacugcugcaaaccaggccacuggcuuuaccugagguggucaagagucagcgcccgcugcagagacagguucaccuacgcggccgcccagccucucaaccgaccguaauuagaggaauaaccuauuacaaagcuaaaguaucagaggaggagaaugacauugaggagcaacaggaugaguucuucucaggugacaacgggguggaccugcucauugaggaucagcugcuccgccauaacgggcugaugacaucugugacacgccgacccgccgcaacaagacagggucauucaacggcggugacuagcgaccugaacgcacggacggccccuuggaguagcgcucugccccagcccucgacaucugacccauccaucgcuaaucacgcuagcgugggacccacucugcaaacuacgucaguaucccccgacccuacuagagaaagcgugcugcagccuucgccccaggugcccgcuaccaccgucgcccacacugcaacccagcagccugccgcaccggcuccgccagcaguguccccacgugaggcccugauggaagccaugcacaccgugcccgucccacccacaacagugcggacugacucacugggcaaagaugcgcccgcuggauggggaacuacaccugccucaccuacccugucuccugaggaggaggacgauauucgcaauguuaucggucgauguaaagauacauuaagcacuaucaccggacccaccacacagaacacuuacggccggaacgaaggggcguggaugaaagacccgcuggccaaggacgaaaggauauacguuacuaauuacuauuacggcaacacucuuguagaguuccggaauuuagagaacuuuaagcagggccgcuggucuaauuccuacaaacuuccuuauucuuggauaggcacggggcaugucguuuacaacggcgcuuuuuauuauaacagagcuuuuacaaggaacauaauuaaguacgaucugaagcagagguacguggcagccugggcaaugcuucacgauguggccuacgaggaagcuaccccauggcgcuggcagggccauagugacguggacuuugcuguggacgaaaacggauuguggcugauuuaucccgcccuggacgaugagggauuuucccaggaggugauuguucugucuaaacuuaaugccgcagaucuuucuacgcaaaaggaaacaacguggcggacaggucugcgacgcaacuucuacggaaauuguuucgucauauguggcguccuuuaugcaguagauaguuacaaucagcggaacgcuaacauuucuuacgcuuuugauacucauacaaacacacagauuguuccccgucuguuauucgaaaacgaguauucuuauaccacacaaauugauuauaacccuaaggaccgguuacuguacgcuugggauaacggacaccaggugacauaccacgugaucuucgcauacuag

SEQ ID NO: 186782 - RNA, 2253 nt, Artificial Sequence
  derived and/or modified sequence
auggcaaagccccgccuguugguauuauauuucgcacuaaucgugguacccgcuugggugucaagcaucguucucaccggaaccucugaaccccccgaugcacagaccguagccccugccgaagaugaaacgcuccaaaacgaggcagauaaccaagaaaauguguuaagccagcuccucggugauuaugacaagguuaaggccaugagcgaagguagugauugccaauguaaaugcgugguacgaccacuaggucgcgacgcuugucagaggaucaaugccggugcgagccggaaggaagacuuuuacacaguggaaaccaucaccucaggcucgaguugcaaaugugcguguguggcaccgccauccgcccugaacccgugugagggcgacuuucgucugcaaaagcugagggaagccgauagccaggaucuuaaacugagcacgauuauugauaugcuagaaggggcuuucuacggacuagacuuguuaaaauugcacucagugacaaccaaguugguaggcagagucgauaagcuggaagaggaaguguccaaaaaccugacgaaagaaaaugaacagauuaaagaagauauggaggagaucagaacugaaaugaauaaaagaggcaaggaaaauugcagcgagaacauccuggauucaaugccagauauucguagcgcacuccagcgagacgccgccgcagccuaugcacauccugaauacgaagaaagauuuuugcaagaggagacagugucacaacaaauuaacucuauagagcuacuccagacacgcccucuugcgcugccggaaguugugaagucccagaggccauugcagaggcaggugcaccugagaggcagacccgcuagccagcccacaguuauaagagguauuacauacuacaaagccaaagugucagaggaagagaacgauauugaagaacaacaggacgaauucuuuagcggagacaacggaguugaucuucugauugaagaucaguugcucaggcauaacgggcugaugaccuccgugacgcgacgaccugccgcaacucgucaaggacauuccacagcugucacuuccgaucugaacgcuagaacugcgccuuggucuuccgcccugccacagccauccacuagcgacccuucaauugcaaaucacgcuucugugggcccaacccugcaaacuaccucagucucgccagauccaacccgcgagagcguucuucagccauccccccaagugccagccaccacuguggcccacaccgcgacccaacaacccgcugcaccagcuccccccgccgugucgccucgggaggcccugauggaagccaugcauaccgucccuguaccgcccacaacuguucgaaccgauucccugggcaaggacgcuccugcaggcuggggcacuaccccugcaagcccuaccuugagcccugaagaggaagacgauauucgcaaugugauuggaagauguaaggacacccuaucuacgauuaccgggccgaccacacaaaauacauauggccggaaugaaggagccuggaugaaagacccccuggcuaaggaugagcgaauauacgucacuaacuacuauuaugggaacacacucgucgaauuccgaaaucuggaaaauuuuaagcagggaagauggagcaauucuuauaaauuaccguacagcuggauugggacaggccaugugguauauaacggcgcauucuacuacaaucgcgcguuuacacgcaacaucaucaaguacgaucugaaacaacgcuauguagcagcuugggccaugcuccaugaugucgccuacgaggaggcuacaccauggcgguggcagggccauucugaugucgauuuugcgguagacgaaaacgggcuguggcugaucuacccagcccuggacgaugaggguuuuucucaagaggugaucgugcugucuaaauugaacgcugcagaccugucaacccagaaggagacaacuuggcgcacuggacuuaggcgaaauuuuuacggcaauugcuuuguuaucugcggagugcuuuaugcaguggauucauacaaucaacgaaaugccaauaucaguuaugcuuuugauacacacacaaacacccagaucgucccacgauuauuauucgagaacgaauauagcuauaccacccagaucgacuauaauccgaaagauagacuacucuaugcuugggauaacggccaccagguuaccuaccaugucauuuuugcauauuag

SEQ ID NO: 186783 - protein, 300 aa, Artificial Sequence
  derived and/or modified sequence
MLPLLAALLAAACPLPPVRGGAADAPGLLGVPSNASVNASSADEPIAPRLLASAAPGPPERPGPEEAAAAAAPCNISVQRQMLSSLLVRWGRPRGFQCDLLLFSTNAHGRAFFAAAFHRVGPPLLIEHLGLAAGGAQQDLRLCVGCGWVRGRRTGRLRPAAAPSAAAATAGAPTALPAYPAAEPPGPLWLQGEPLHFCCLDFSLEELQGEPGWRLNRKPIESTLVACFMTLVIVVWSVAALIWPVPIIAGFLPNGMEQRRTTASTTAATPAAVPAGTTAAAAAAAAAAAAAAVTSGVATK

SEQ ID NO: 186784 - DNA, 903 bp, Artificial Sequence
  derived and/or modified sequence
atgctgcccctgctggccgccctgctggccgccgcctgccccctgccccccgtgagaggcggcgccgccgacgcccccggcctgctgggcgtgcccagcaacgccagcgtgaacgccagcagcgccgacgagcccatcgcccccagactgctggccagcgccgcccccggcccccccgagagacccggccccgaggaggccgccgccgccgccgccccctgcaacatcagcgtgcagagacagatgctgagcagcctgctggtgagatggggcagacccagaggcttccagtgcgacctgctgctgttcagcaccaacgcccacggcagagccttcttcgccgccgccttccacagagtgggcccccccctgctgatcgagcacctgggcctggccgccggcggcgcccagcaggacctgagactgtgcgtgggctgcggctgggtgagaggcagaagaaccggcagactgagacccgccgccgcccccagcgccgccgccgccaccgccggcgcccccaccgccctgcccgcctaccccgccgccgagccccccggccccctgtggctgcagggcgagcccctgcacttctgctgcctggacttcagcctggaggagctgcagggcgagcccggctggagactgaacagaaagcccatcgagagcaccctggtggcctgcttcatgaccctggtgatcgtggtgtggagcgtggccgccctgatctggcccgtgcccatcatcgccggcttcctgcccaacggcatggagcagagaagaaccaccgccagcaccaccgccgccacccccgccgccgtgcccgccggcaccaccgccgccgccgccgccgccgccgccgccgccgccgccgccgccgtgaccagcggcgtggccaccaagtag

SEQ ID NO: 186785 - DNA, 903 bp, Artificial Sequence
  derived and/or modified sequence
atgctccccctgttggcagctctccttgctgccgcctgtcctcttcccccagtaaggggcggtgccgctgacgcccctggcttgctgggcgtgccttctaacgcctcagtcaatgcctcatcagccgatgaaccaattgcacctcgcctgctagcgtccgcagctcccggcccccctgagcgtccagggcctgaagaggctgctgccgccgccgccccatgcaatatatctgtacaacgccagatgctcagctcactcctggtgaggtggggcagacctcggggctttcagtgtgacttgcttctgttctctaccaacgctcacggaagggcgttctttgctgcagctttccatcgggttggcccccctctgttgatcgagcacctggggttagcagcagggggcgcccagcaggatctcaggctgtgtgtggggtgcggatgggtgcgtgggcgaaggaccggccgccttcgccccgcagctgcaccatccgccgcagccgctaccgctggggctccgaccgcccttcctgcttaccctgctgccgagccccccgggccactctggcttcagggcgagccactccacttctgttgtctggacttttcactggaagagctgcaaggggaaccaggttggcgactgaaccgcaagcccatcgagagtactttagtggcttgcttcatgaccctcgtcattgtcgtttggtcagttgctgccctaatttggcctgtccctatcatcgccgggtttttacccaatggcatggagcagaggaggacaactgccagcactacagctgctacccccgccgctgttcctgccggtacaaccgcagctgccgctgcggccgccgctgcagccgcggcagctgccgttacctctggagttgccaccaagtag

SEQ ID NO: 186786 - DNA, 903 bp, Artificial Sequence
  derived and/or modified sequence
atgctgcccctgctggccgccctgctggccgccgcctgccccctgccccctgtgcggggcggcgctgctgatgcccctggcctgctgggcgtgcccagcaatgcctctgtgaatgccagcagcgcagatgagcccatcgccccccggctgctggccagcgctgcccctggccccccagagcggcccggccctgaggaggccgctgctgctgctgccccctgcaacatctctgtgcagaggcagatgctgagcagcctgctggtgcgctggggccggccccggggcttccagtgtgacctgctgctcttcagcaccaatgcccacggccgggccttctttgctgctgccttccaccgggtgggcccccccctgctgattgagcacctgggcctggccgccggcggggcccagcaggacctgcggctgtgtgtgggctgcggctgggtgcggggccgcaggacaggccgcctgcggcctgctgctgcccccagcgctgctgctgccacagctggggcccccacagccctgcctgcctacccagctgctgagcccccaggccccctgtggctgcagggcgagcccctgcacttctgctgcctggacttcagcctggaggagctgcagggcgagcccggctggaggctgaacaggaagcccatcgagagcaccctggtggcctgcttcatgaccctggtgattgtggtgtggagcgtggccgccctgatctggcctgtgcccatcatcgccggcttcctgcccaacggcatggagcagaggaggaccacagccagcaccacagctgccaccccagctgctgtgcctgctggcaccacagctgctgctgctgctgctgctgctgctgctgctgctgctgctgtgaccagcggcgtggccaccaagtag

SEQ ID NO: 186787 - DNA, 903 bp, Artificial Sequence
  derived and/or modified sequence
atgctgcccctgctggccgccctgctggccgccgcctgccccctgccaccagtgcgaggcggagccgctgacgcccctggcctgcttggtgtgccgtctaatgccagtgtcaatgctagttctgctgatgaacctatagcccctcggttgctagctagcgctgcccctgggccaccagagagaccgggacctgaggaggctgcagctgccgcagcaccttgcaatattagcgttcagcgtcagatgctttcctctctacttgtaagatgggggcgcccgcgtgggtttcaatgcgatttactcctgttttcaaccaatgcccacggtagagctttttttgctgctgctttccatagggtgggccctcccttgctcatcgaacacctcggcctggccgccggtggtgctcagcaagacctgagactctgtgtgggctgtgggtgggttcgaggacggcgtaccggacgcttgcgtccggctgcggccccttccgcagcagctgcaacagccggcgccccaaccgcactgcctgcttacccagcagcagagcccccagggcctctgtggctccagggggagccactgcacttttgttgcttggatttctccttggaggagttacagggcgagccaggatggagattaaacaggaagcccatagagtccaccctggtcgcctgctttatgacactggtgatcgtcgtgtggagtgtggccgcactgatttggcccgttcctataatcgcgggcttccttcccaatgggatggaacaacggagaaccactgcgagcaccactgctgctacaccggccgccgtcccagccggaactaccgcggccgccgctgcagctgccgcagcagccgctgctgccgccgtcacttcgggagtggccacaaaatag

SEQ ID NO: 186788 - DNA, 903 bp, Artificial Sequence
  derived and/or modified sequence
atgctgcctttacttgccgcactcctggcagccgcatgccctttaccgcctgtgcggggaggcgcagctgatgcaccgggtctccttggagtccctagtaatgcaagtgtgaacgcctcttctgccgatgaacctatcgcacctcgactgctcgcttcagctgcacctggacccccagagaggccaggccctgaggaagcggctgccgcagcggctccttgcaatatatcagttcagcggcagatgctgagctctctgctggtacgctgggggaggccacgcggtttccaatgtgatctcctgctattttctacaaatgcccacggtagagcgttcttcgctgccgcattccaccgggtgggaccgccactgctcatcgaacatctgggcctggctgctggcggagcccagcaggatctcagactgtgcgtcgggtgtgggtgggtgagaggacgtcggacagggagactgagaccggcagccgctccttctgccgcagcagcaacggcaggcgctccaaccgctttgcccgcttatccggcagccgaaccacctgggcctctctggttacaaggggagcccttgcatttctgctgcttagattttagcctggaagagcttcaaggcgagcccggatggcgattaaaccggaagcctatagagtctaccctggttgcgtgttttatgacactggtcatagtagtctggtcggttgctgctctgatttggcccgtcccaatcatcgctggctttctgcctaacggaatggagcagcgcagaacaaccgctagcacaactgcggctacaccagctgctgtaccagcaggaactaccgctgcagctgccgcagctgcagccgctgctgctgctgcggcagtgacaagtggcgtggcaaccaagtag

SEQ ID NO: 186789 - DNA, 453 bp, Artificial Sequence
  derived and/or modified sequence
atggagaacaatccaagccacaacccagtgtcccccagcccattcccaacccggatctctgcaccactgaacatgagccagtcgcacttccgagagaattggttgatgctgaagaaatctctggagggaaagctctgcccatcctcatgcgggagtctcaagtgtagggcttcccggtctccatccgtgggcacaggtcccagccttcccatcgaatgcttcctgtacatgaaaacctggtctagccttcaaatgaccgttgcctctgaagaggataagaggagagagaaaacacagaacgcaggactgcctctcttcttcgcttccacagtggggactgtcaccctgccctcttttcatcacctgcagttgcacactcatacacatactctggtcccacagtcactttttgggacctgtctcacagctcacctcgaaactagatggtcttag

SEQ ID NO: 186790 - DNA, 1813 bp, Artificial Sequence
  derived and/or modified sequence
cggcagcccaagggccccggcgccgggggcggcggggaaccccaaacgcaaccgggtctggagggatccccgcgccgagccagccgccgtcaccgcctccgcgccgcccctgcgggcttggcaggcgcccggcgcgcccgcactgcgcccggccgccggctcccgcggtcccaccgtgagctcgccggcccgtcgcccgctcgccatgcaaccgccgccggcctcgcgcgcgtaggcgcccgccgcaggccatgctgcccctgctcgccgcgctcctggccgccgcctgcccgctgccgcccgtccgcggcggggccgcggacgcgcccggcctcctcggggtgccctccaatgcttcagtcaacgcgtcctccgcggacgagcccatcgccccgcggctgctggcctcggcggcccccgggccccccgagcgcccgggcccggaggaggcggcggcggcggcggcgccgtgcaacatcagcgtgcagcggcagatgctgagctcgctgctcgtgcgctggggccgcccgcggggcttccagtgcgacctactgctcttctccaccaacgcgcacggccgcgctttcttcgccgccgccttccaccgcgtcgggccgccgctgctcatcgagcacctggggctggcggcgggcggcgcgcagcaggacctgcgcctctgcgtgggctgcggctgggtgcgcggtcgccgcaccggccgcctccggcccgccgccgcccccagcgccgccgccgccaccgccggggcgcccaccgcgctgccagcctaccccgcggccgagccgcccgggccgctgtggctgcagggcgagccgctgcatttctgctgcctagacttcagcctggaggagctgcagggcgagccgggctggcggctgaaccgtaagcccattgagtccacgctggtggcctgcttcatgaccctggtcatcgtggtgtggagcgtggccgccctcatctggccggtgcccatcatcgccggcttcctgcccaacggcatggaacagcgccggaccaccgccagcaccaccgcagccacccccgccgcagtgcccgcagggaccaccgcagccgccgccgccgccgccgctgccgccgccgccgcggccgtcacttcgggggtggcgaccaagtgacccgctccgctcctccctgtgtccgtcctgtgtccgcgcgcgcgggtgcctttcccgccggagactcggccggtgtgcttcgtgctgtagttatcgttagttcctcttcccgagatggggccgccgagagaccccagcgcctttgaaaagcaaggtttgtgctgcgcttccagttccgaaaagcagatgtttaagcccttggactgagggtgggatcgcagctccgaagacggagaggagggaaatggggccctttcccctctattgcatccccctgcccgactccttccccgcacccacgtgccctagattcatggcagaaaatgaccaaatcctgtgtatttgttttatatatttaataactgttttaaatgaaagttttagtaaaaaaaatacaaaacaaaaagattaaattgctattgctgtagtaagagaagctctttgtatctgaacatagttgtatttgaaatttgtggttttttaatttatttaaaattggggggagggcatgggaaggatttaacaccgatatattgttaccgctgaaaatgaactttatgaaccttttccaagttgatctatccagtgacgtggcctggtgggcgtttcttcttgtacttatgtggttttttggcttttaatacagacattttcctcca

SEQ ID NO: 186791 - protein, 1602 aa, Artificial Sequence
  derived and/or modified sequence
MVDASGRAAAEGWRKMEAPPDGAADLVPLDRYDAARAKIAANLQWICAKAYGRDNIPEDLRDPFYVDQYEQEHIKPPVIKLLLSSELYCRVCSLILKGDQVAALQGHQSVIQALSRKGIYVMESDDTPVTESDLSRAPIKMSAHMAMVDALMMAYTVEMISIEKVVASVKRFSTFSASKELPYDLEDAMVFWINKVNLKMREITEKEVKLKQQLLESPAHQKVRYRREHLSARQSPYFPLLEDLMRDGSDGAALLAVIHYYCPEQMKLDDICLKEVTSMADSLYNIRLLREFSNEYLNKCFYLTLEDMLYAPLVLKPNVMVFIAELFWWFENVKPDFVQPRDVQELKDAKTVLHQKSSRPPVPISNATKRSFLGSPAAGTLAELQPPVQLPAEGCHRHYLHPEEPEYLGKGTAAFSPSHPLLPLRQKQQKSIQGEDIPDQRHRSNSLTRVDGQPRGAAIAWPEKKTRPASQPTPFALHHAASCEVDPSSGDSISLARSISKDSLASNIVNLTPQNQPHPTATKSHGKSLLSNVSIEDEEEELVAIVRADVVPQQADPEFPRASPRALGLTANARSPQGQLDTSESKPDSFFLEPLMPAVLKPAKEKQVITKEDERGEGRPRSIVSRRPSEGPQPLVRRKMTGSRDLNRTFTPIPCSEFPMGIDPTETGPLSVETAGEVCGGPLALGGFDPFPQGPSTDGFFLHVGRADEDTEGRLYVSCSKSPNSHDSEPWTLLRQDSDSDVVDIEEAEHDFMGEAHPVVFSRYIGEEESAKLQEDMKVKEHEDKDDASGRSSPCLSTASQMSSVSMASGSVKMTSFAERKLQRLNSCETKSSTSSSQKTTPDASESCPAPLTTWRQKREQSPSQHGKDPASLLASELVQLHMQLEEKRRAIEAQKKKMEALSARQRLKLGKAAFLHVVKKGKAEAAPPLRPEHFAKEYSQHNGEDCGDAVSKTEDFLVKEEQREELLHEPQDVDKESLAFAQQHKAKDPVALHELERNKVISAALLEDTVGEVVDVNECDLSIEKLNETISTLQQAILKISQQQEQLLMKSPTVPVPGSKNNSQDHKVKAPVHFVEPLSPTGVAGHRKAPRLGQGRNSRSGRPAELKVPKDRPQGSSRSKTPTPSVETLPHLRPFPASSHPRTPTDPGLDSALEPSGDPHGKCLFDSYRLHDESNQRTLTLSSSKDANILSEQMSLKEVLDASVKEVGSSSSDVSGKESVPVEEPLRSRASLIEVDLSDLKAPDEDGELVSLDGSADLVSEGDQKPGVGFFFKDEQKAEDELAKKRAAFLLKQQRKAEEARVRKQQLEAEVELKRDEARRKAEEDRVRKEEEKARRELIKQEYLRRKQQQILEEQGLGKPKSKPKKPRPKSVHREESCSDSGTKCSSTPDNLSRTQSGSSLSLASAATTEPESVHSGGTPSQRVESMEALPILSRNPSRSTDRDWETASAASSLASVAEYTGPKLFKEPSSKSNKPIIHNAISHCCLAGKVNEPHKNSILEELEKCDANHYIILFRDAGCQFRALYCYYPDTEEIYKLTGTGPKNITKKMIDKLYKYSSDRKQFNLIPAKTMSVSVDALTIHNHLWQPKRPAVPKKAQTRK

SEQ ID NO: 186792 - DNA, 3975 bp, Artificial Sequence
  derived and/or modified sequence
atggccgatagcctgtacaacatccggctactgagggagttttcaaacgaatatttgaataaatgcttctacctgacactcgaagatatgctatatgcacccttggtgctgaaacctaacgtgatggtgttcattgccgaactcttctggtggtttgagaacgtgaagccagattttgtgcaacctagagatgtccaagaactgaaggacgccaagaccgtgcttcatcagaaatcaagcagaccaccagttcccatctcaaacgctaccaaacgcagtttcctcggcagtcctgccgcaggcaccctggccgagcttcagcctcccgttcagctgccagcagaggggtgtcacagacattacctgcatccagaggagccagagtatttgggcaaaggcactgctgccttctcgccaagccatccgttgttgcctttacgccagaagcaacagaaaagcatccagggcgaagacatacctgatcagaggcaccgcagcaattctttgacaagagtggatgggcagcctcgtggcgcggccattgcctggcccgaaaaaaaaacaagaccggcctctcagcctacaccctttgcgctccaccacgccgcctcttgtgaggtggacccttcctccggggactcaatatcactggccaggagtatctccaaagacagcctggcatcaaacatagtgaatctcacacctcagaatcagccacatccaaccgcgacgaaaagtcatggcaagagcctcctgtccaacgtgagcatagaggatgaggaggaggagctggtggcgatcgtcagagccgacgtggttcctcagcaggccgatcccgagtttcctcgtgcctctcctcgtgctctcggccttaccgctaatgccaggtcacctcagggccaactggacacctcggagtctaaacctgattccttctttctcgaaccccttatgcctgcggtactgaagcctgccaaggaaaaacaggtcataacaaaagaggacgagcgcggggaaggcagacctcggagcatcgtctcgaggcggccctccgagggaccacagcctctggtgaggaggaaaatgactggctctagagacctaaaccgaacatttactcccatcccctgcagcgaatttcctatgggtatcgatccaacagaaaccggaccgctgtcagttgagactgccggcgaggtttgtggcgggcctctcgcgctgggtgggtttgatccctttcctcagggccccagcactgatgggttcttcttacatgtggggcgtgcagacgaggataccgagggacggctatacgtcagctgcagcaagtctcctaacagtcacgactccgagccttggaccttacttagacaggattcagactctgatgtggtcgacatagaagaagccgaacacgatttcatgggggaggcccacccagtggtcttcagcagatacattggagaggaagagagcgcaaaattacaggaggacatgaaggtaaaagagcatgaggacaaagacgacgcctctggccgctcatctccttgtctgtccaccgctagtcagatgagctccgtgagtatggccagtggcagtgtgaagatgaccagctttgccgagcgtaagctgcagcgcttgaacagctgtgagactaagagctctacatcctcctcccagaaaactacaccagacgcctccgagagctgtccggctcctcttacgacctggcgtcagaaaagagaacagtccccctctcagcatggcaaggaccctgcatctctgctggcctccgagctggtccagctgcacatgcagctggaggaaaaacggcgggccatagaggctcaaaaaaaaaagatggaggccttgtcggccagacagcgtctgaagttgggaaaggccgccttcctgcacgtggtgaaaaaggggaaagcggaagctgccccgccactgaggcccgaacattttgcaaaggagtatagccagcataatggcgaagattgtggggacgctgtctcaaagactgaggattttctcgtgaaggaagagcaacgggaggagctgctccatgagccgcaggacgtggacaaggaatccttggccttcgcccagcagcacaaagcaaaggatcccgttgctttacatgagcttgagaggaataaggtcatctctgcagctctcctcgaggacacagtgggggaggtggttgatgtgaatgaatgtgacctgagtattgagaagctcaacgaaaccatctctacacttcagcaagctatcttgaaaatttctcagcagcaggaacaactgctgatgaagtccccaactgtcccagtgcctgggagcaagaataactcacaggaccacaaggtgaaggcaccagtccactttgtcgaacccttgagcccaaccggcgttgctggacacaggaaagctcctcgtctggggcagggccgaaattcgcgatctggcaggcctgccgagctgaaagtacccaaggaccggcctcagggttcctcccggtctaaaacccccacaccatcagtggagacattgccgcacttgcggccgttccccgcctcaagtcaccccagaacacctacggacccgggcttggactccgccctggaacctagcggcgacccccacggcaagtgcctgtttgacagctatcgactacacgacgagagtaatcaacgaaccctgactctgagttcctctaaagacgcaaacatattgtctgagcagatgtcccttaaggaggtgcttgacgcctccgtgaaagaagtcggatcatcaagttctgatgtgagcggaaaagagtcagtgccagtggaagagcccctgagatctcgagcttccttgatcgaggtcgacctgtcagatcttaaggctccagatgaggacggcgaactagtgtcactcgacggttccgctgacctggtttcagaaggagaccagaagccaggcgtcggctttttctttaaagacgagcaaaaggccgaggatgagcttgctaagaaacgggctgcctttctgctgaagcagcagcgcaaggccgaagaagcccgagttagaaaacagcagctagaggcggaagtcgagttaaaacgggacgaagcacgacgaaaggcagaagaagatcgcgttcgcaaggaagaggagaaggctcgtagagagctaattaagcaggaatatctgcggcgcaagcagcagcaaatcttagaggagcagggtttgggcaagccgaagtctaagccaaaaaaaccgcggccaaaaagtgtgcatcgggaggagagttgttccgattcagggaccaaatgctcctcgactcccgacaatctcagccggacccagtccggctcctcactctccttagcctctgctgctactaccgaaccagagtccgtgcactccggcggtacgcctagtcagcgcgtggaatccatggaggcgttgccgattctgagccgcaatccgtccagaagcacagatagagattgggagaccgcctccgctgccagcagcctggctagtgtcgccgaatataccggccccaagctctttaaagagcccagctcaaagtccaataagccgatcattcataacgctatcagtcattgttgcctcgctggtaaggtgaatgagccccacaagaacagcattctcgaagagctggagaagtgtgacgccaaccactatattatcctgtttcgcgatgctggctgccagtttcgcgccctttactgttattatcccgacaccgaggagatctataaactgactggaactgggcccaaaaacattaccaagaagatgatcgacaaattatacaagtatagttccgatcgaaagcaattcaatctaatccccgccaagactatgagtgtgtcagttgacgctttgaccatccataaccacctatggcagcccaagcggccagcggtccctaaaaaggcccagaccaggaaatag

SEQ ID NO: 186793 - DNA, 4809 bp, Artificial Sequence
  derived and/or modified sequence
atggtcgacgcatctggcagggcggccgctgaagggtggagaaaaatggaagccccccccgacggggctgctgatttagtgcccctggaccggtatgatgcagcccgagcaaagatcgccgcaaacctgcagtggatatgcgccaaagcctacggccgggataatatccccgaagatctccgcgatccgttctatgttgaccaatacgagcaggaacacatcaagccaccggttatcaagcttctcttgtcatccgagttatactgcagggtttgctccttgatcttaaaaggggaccaagtcgcggctctccaagggcatcagtccgtgatccaagctctcagtcgcaaggggatttacgtgatggaaagtgatgacacgcctgtaacagagagcgacctcagcagggcccccatcaagatgtccgcccatatggctatggttgatgcattgatgatggcttataccgttgaaatgatctccatcgagaaggtagtggcctccgtaaagagattctcgaccttcagcgcttcaaaggaattaccgtatgatctggaagacgctatggttttctggatcaacaaagttaatttgaagatgagggaaattacagaaaaggaggtcaagctgaagcaacaactgttggagtcccccgctcaccagaaagtacgttacaggcgggagcacctgtctgcaaggcaaagcccgtatttcccactgttggaggacttgatgagagatggctccgatggcgctgccctgctggcggtgattcactattactgtcccgaacagatgaaactcgacgacatatgcctcaaagaagtgacctccatggcagacagtctgtacaatatacgcctgctccgcgaattctctaacgagtaccttaacaagtgtttctacctcaccctggaagacatgctctatgctcctctggtgctgaagcctaatgttatggtgtttattgctgagctcttctggtggtttgaaaatgtaaaacctgacttcgtgcagcctagagacgttcaggagctcaaggacgcgaagacagtgctgcatcagaagtcatccaggcctcccgtgccaatctccaatgcaacgaagcgctcattcttgggcagcccggccgccggtacattagccgaattacagcctcctgtgcaactaccggccgaaggttgccatagacactacctgcaccccgaggagccggagtatctgggcaagggaaccgccgcattttcaccctctcacccattattgcctctgcgtcagaagcagcagaagtccattcagggagaggatataccagatcagaggcatcggtctaactccctgaccagagtggatggtcagccaaggggggccgctatcgcttggccagagaagaaaactagacccgcatctcagcctacacccttcgccctgcatcacgctgcgagctgcgaggtggatccaagtagcggtgattccatctctctggcaaggtcaatcagcaaagattctctggcttcaaatattgttaacttgacgcctcagaatcagcctcatcctaccgcgacaaagtcccatgggaaatccctcttgagcaatgtgagcatcgaagacgaagaggaggagcttgtcgccatcgtgagggccgatgtagtccctcagcaggcagatcccgagtttccaagagcttcacccagggctctggggttgacagcgaacgccagaagcccacagggacagctggataccagcgagagcaaacctgattcttttttcctcgaacccttgatgcctgcggtcctgaagcccgccaaagaaaagcaggttattaccaaggaagacgagaggggtgaaggacgccctagatcaattgtgtcccgccggccatcggaaggcccacagccacttgttagacggaagatgacagggtctcgtgatctgaaccgcactttcacccccatcccgtgcagtgagttccccatggggatagatccaactgagactggcccccttagcgtggaaactgccggcgaagtgtgcggcggacctctggccctgggtgggttcgatccatttcctcagggcccatcgaccgacggattctttctacacgtgggtagagccgatgaggatacagagggaagattatacgtcagctgttccaagtctcccaacagtcatgacagcgaaccctggaccctgctccgccaagattcggactcagacgttgtagacatcgaggaagccgagcacgacttcatgggcgaggcacatcccgtggtgttctcacgctacatcggcgaggaagaatctgccaagctccaggaggacatgaaagtaaaggaacatgaggataaggatgacgctagcggacggtccagcccttgcctatcgacagcgagtcagatgtctagcgtttccatggcctctggatcagttaagatgacctcattcgccgagaggaagttacagcggctgaattcctgcgaaacaaagagctccacgtcatcctcccaaaaaacaacccctgacgcatctgagagttgccccgcccctcttactacttggagacagaagcgggagcagtcaccgagccaacatgggaaagacccagccagtttactggcgagcgagttggtgcagttgcacatgcagctcgaggagaagaggagggctatcgaagctcagaagaaaaaaatggaggccctgtctgcccgccagcgcctgaagctaggtaaggccgcctttctccacgtggtcaagaaggggaaggccgaggccgcgcctcccttgcgcccagagcattttgcgaaagaatatagtcagcacaatggggaagattgtggcgacgccgtaagcaagaccgaagactttttggtcaaggaggaacagcgggaagagctgttgcacgaaccacaggacgtggataaagagagtttggcgtttgcccaacagcacaaggccaaagacccagtcgccctccacgaactggaaaggaacaaggtgatctcagctgcattgcttgaggataccgttggcgaggtggtggatgttaatgagtgcgacctatccatcgagaagcttaacgaaaccatcagtaccttgcagcaggctatccttaagatatcccagcagcaagaacagcttttgatgaaatcacccacggtccctgtgcccggatccaagaacaacagtcaagaccacaaggtgaaagcccctgtgcacttcgtcgagccattatctcccacaggggtagctggtcacagaaaagccccaaggctaggacaaggtaggaatagccgttctggccgacctgctgaactcaaggtgccgaaagacagaccacaaggtagttcgaggagtaaaacacctacccctagcgtagagacccttccccacctgagaccttttccggcatcctctcacccccgcacccctactgaccccgggttagatagcgcacttgaaccttctggcgacccgcacggaaagtgcctgtttgactcgtacagactgcatgacgaaagcaatcagagaacgctcacactttcatcctcaaaggatgccaatatcctgagtgagcaaatgagccttaaagaagtcctcgatgccagtgtcaaagaggtgggtagcagctcttctgacgttagcggaaaagaatccgtgcccgtagaagagccgttgcggtctcgagcctcactgatcgaggtggatctgtcagaccttaaggcccccgatgaagacggagaactggtgtccctagacggaagcgccgacctggtctccgaaggggaccagaaacccggcgtaggattcttcttcaaggatgagcagaaagcagaggatgaattggctaaaaagcgcgcagcctttttgttgaagcagcagagaaaggctgaagaggcccgggtaaggaaacagcagctggaggcagaggtggaactgaaacgagatgaggcgaggcgcaaggcagaagaggatagagttcgcaaagaggaagagaaggcgcggcgggaactgataaaacaggagtatctcagaaggaagcagcaacagatccttgaggagcagggactaggcaaaccaaagagtaaaccaaaaaagccccggcccaagtctgtgcaccgagaggagtcatgctctgactcaggcactaagtgcagctcaactcccgacaatctgtcccgtacgcaatccggctcttccctgtccctggcttccgctgctaccactgagcccgagtcagtccatagtggcggcactccttcccaacgggtggagtccatggaggctctccccattctgtcgcggaacccttctaggtccactgatcgcgattgggaaaccgcatccgcagctagctctttggcatccgtggctgaatatacagggcccaagctgtttaaggagccctccagcaagtcaaacaaacctatcatacacaatgcaatctctcattgttgcctggcagggaaagttaatgagcctcacaagaactcaattcttgaggagctggagaagtgcgacgccaatcattacattatcctcttccgagacgcaggctgtcaattcagggccctatactgttactaccccgatacagaagagatctacaaactgaccgggaccgggcctaaaaacatcaccaaaaaaatgattgacaagctgtacaagtactcttcggataggaaacaattcaacctgatccctgcgaagacaatgtccgtctctgtcgacgccctgaccattcataatcacctctggcagcccaaacgccccgcagtgcccaaaaaagcacagactcggaagtag

SEQ ID NO: 186794 - DNA, 3975 bp, Artificial Sequence
  derived and/or modified sequence
atggctgacagcctgtacaacatccggctgctgcgggagttcagcaatgagtacctgaacaagtgcttctacctgaccctggaggacatgctgtatgcccccctggtgctgaagcccaacgtgatggtgttcatcgccgagctgttctggtggtttgaaaatgtgaagccagactttgtgcagcccagagatgtgcaggagctgaaggatgccaagacagtgctgcaccagaagagcagccggccccctgtgcccatcagcaatgccaccaagaggagcttcctgggcagccctgctgctggcaccctggccgagctgcagccccctgtgcagctgcctgctgagggctgccaccgccactacctgcaccctgaggagcctgagtacctgggcaagggcacagctgccttcagccccagccaccccctgctgcccctgcggcagaagcagcagaagagcatccagggcgaggacatcccagaccagaggcacaggagcaacagcctgaccagggtggatggccagcccagaggagctgccatcgcctggccagagaagaagaccaggcctgccagccagcccaccccatttgccctgcaccacgccgccagctgtgaggtggaccccagcagcggggacagcatcagcctggcccggagcatcagcaaggacagcctggccagcaacatcgtgaacctgaccccccagaaccagccccaccccacagccaccaagagccacggcaagagcctgctgagcaatgtgtccattgaagatgaggaggaggagctggtggccatcgtgcgggcagatgtggtgccccagcaggccgaccctgagttcccccgggccagcccccgggccctgggcctgacagccaatgcccggagcccccagggccagctggacaccagcgagagcaagccagacagcttcttcctggagcccctgatgcctgctgtgctgaagccagccaaggagaagcaggtgatcaccaaggaggatgagcggggggagggccggcccaggagcatcgtgtcccggcggcccagcgagggcccccagcccctggtgcggaggaagatgacaggcagccgggacctgaacagaaccttcacccccatcccctgcagcgagttccccatgggcatcgaccccacagaaacaggccccctgtctgtggagacagctggggaggtgtgtggcggccccctggccctgggcggctttgaccccttcccccagggccccagcacagatggcttcttcctgcacgtgggccgggcagatgaggacacagagggccgcctgtatgtgtcctgcagcaagagccccaacagccatgacagcgagccctggaccctgctgcggcaggacagcgacagtgatgtggtggacatcgaggaggccgagcatgacttcatgggagaggcccaccctgtggtgttcagccgctacatcggggaggaggagagcgccaagctgcaggaggacatgaaggtgaaggagcacgaggacaaggatgatgccagcggccgcagcagcccctgcctgagcacagccagccagatgagctctgtgtccatggccagcggctctgtgaagatgaccagctttgctgagaggaagctgcagaggctgaacagctgtgagaccaagagcagcaccagcagcagccagaagaccaccccagatgccagcgagagctgcccagcccccctgaccacctggaggcagaagcgggagcagagccccagccagcacggcaaggaccctgccagcctgctggccagcgagctggtgcagctgcacatgcagctggaggagaagagaagagccatcgaggcccagaagaagaagatggaggccctgagcgcccggcagaggctgaagctgggcaaggccgccttcctgcacgtggtgaagaagggcaaggccgaggccgccccacccctgcggcctgagcactttgccaaggagtacagccagcacaatggagaggactgtggagatgctgtgtccaagacagaggacttcctggtgaaggaggagcagcgggaggagctgctgcacgagccccaggatgtggacaaggagagcctggcctttgcccagcagcacaaggccaaggaccctgtggccctgcacgagctggagaggaacaaggtgatctctgctgccctgctggaggacacagtgggggaggtggtggatgtgaatgaatgtgacctgagcattgagaagctgaatgagaccatcagcaccctgcagcaggccatcctgaagatcagccagcagcaggagcagctgctgatgaagagccccaccgtgcctgtgcccggcagcaagaacaacagccaggaccacaaggtgaaggcccctgtgcactttgtggagcccctgagccccaccggggtggccggccacaggaaggccccccggctgggccagggcaggaacagccgcagcggccggcctgctgagctgaaggtgcccaaggaccggccccagggcagcagccgcagcaagacccccacccccagcgtggagaccctgccccacctgcggcccttccctgccagcagccaccccaggacccccacagaccccggcctggacagcgccctggagcccagcggggacccccacggcaagtgcctgtttgacagctaccgcctgcatgatgagagcaaccagaggaccctgaccctgagcagcagcaaggatgccaacatcctgtctgagcagatgagcctgaaggaggtgctggatgcctctgtgaaggaggtgggcagcagcagcagtgatgtgtctgggaaggagagcgtgcctgtggaggagcccctgcggagccgggccagcctcatcgaggtggacctgagtgacctgaaggccccagatgaagatggagagctggtgtccctggatggcagcgctgacctggtgtctgagggggaccagaagccaggagtgggcttcttcttcaaggatgagcagaaggccgaggatgagctggccaagaagagagctgccttcctgctgaagcagcagaggaaggccgaggaggcccgggtgaggaagcagcagctggaggccgaggtggagctgaagagagatgaggcccggaggaaggccgaggaggacagagtgaggaaggaggaggagaaggcccggcgggagctgatcaagcaggagtacctgcggaggaagcagcagcagatcctggaggagcagggcctgggcaagcccaagagcaagcccaagaagccccggcccaagtctgtgcaccgggaggagagctgcagcgacagcggcaccaagtgcagcagcaccccagacaacctgagcaggacccagagcggcagcagcctgagcctggccagcgctgccaccacagagcctgagagcgtgcacagcggcggcacccccagccagagggtggagagcatggaggccctgcccatcctgagcaggaaccccagccgcagcacagaccgggactgggagacagccagcgctgccagcagcctggcctctgtggccgagtacacaggccccaagctgttcaaggagcccagcagcaagagcaacaagcccatcatccacaatgccatcagccactgctgcctggccggcaaggtgaatgagccccacaagaacagcatcctggaggagctggagaagtgtgatgccaaccactacatcatcctcttcagagatgctggctgccagttccgggccctgtactgctactacccagacacagaggagatctacaagctgaccggcaccggccccaagaacatcaccaagaagatgattgacaagctgtacaagtacagcagtgacaggaagcagttcaacctgatcccagccaagaccatgtctgtgtctgtggatgccctgaccatccacaaccacctgtggcagcccaagaggcctgctgtgcccaagaaggcccagaccaggaagtag

SEQ ID NO: 186795 - DNA, 4809 bp, Artificial Sequence
  derived and/or modified sequence
atggtggatgccagcggccgggctgctgctgagggctggaggaagatggaggcccccccagatggagctgctgacctggtgcccctggacagatatgatgctgcccgggccaagattgctgccaacctgcagtggatctgtgccaaggcctacggccgggacaacatccctgaggacctgcgggaccccttctacgtggaccagtatgagcaggagcacatcaagccccctgtgatcaagctgctgctgagcagcgagctgtactgccgggtgtgcagcctcatcctgaagggggaccaggtggccgccctgcagggccaccagagcgtcatccaggccctgagcaggaagggcatctacgtgatggagagtgatgacacccctgtgacagaaagtgacctgagccgggcccccatcaagatgtctgcccacatggccatggtggatgccctgatgatggcctacacagtggagatgatcagcattgagaaggtggtggcctctgtgaagcgcttcagcaccttcagcgccagcaaggagctgccctatgacctggaggatgccatggtgttctggatcaacaaggtgaacctgaagatgagggagatcacagagaaggaggtgaagctgaagcagcagctgctggagagccctgcccaccagaaggtgcgctaccgccgggagcacctgagcgcccggcagagcccctacttccccctgctggaggacctgatgagagatggcagtgatggagctgccctgctggccgtcatccactactactgcccagagcagatgaagctggatgacatctgcctgaaggaggtgacctccatggctgacagcctgtacaacatccggctgctgcgggagttcagcaatgagtacctgaacaagtgcttctacctgaccctggaggacatgctgtatgcccccctggtgctgaagcccaacgtgatggtgttcatcgccgagctgttctggtggtttgaaaatgtgaagccagactttgtgcagcccagagatgtgcaggagctgaaggatgccaagacagtgctgcaccagaagagcagccggccccctgtgcccatcagcaatgccaccaagaggagcttcctgggcagccctgctgctggcaccctggccgagctgcagccccctgtgcagctgcctgctgagggctgccaccgccactacctgcaccctgaggagcctgagtacctgggcaagggcacagctgccttcagccccagccaccccctgctgcccctgcggcagaagcagcagaagagcatccagggcgaggacatcccagaccagaggcacaggagcaacagcctgaccagggtggatggccagcccagaggagctgccatcgcctggccagagaagaagaccaggcctgccagccagcccaccccatttgccctgcaccacgccgccagctgtgaggtggaccccagcagcggggacagcatcagcctggcccggagcatcagcaaggacagcctggccagcaacatcgtgaacctgaccccccagaaccagccccaccccacagccaccaagagccacggcaagagcctgctgagcaatgtgtccattgaagatgaggaggaggagctggtggccatcgtgcgggcagatgtggtgccccagcaggccgaccctgagttcccccgggccagcccccgggccctgggcctgacagccaatgcccggagcccccagggccagctggacaccagcgagagcaagccagacagcttcttcctggagcccctgatgcctgctgtgctgaagccagccaaggagaagcaggtgatcaccaaggaggatgagcggggggagggccggcccaggagcatcgtgtcccggcggcccagcgagggcccccagcccctggtgcggaggaagatgacaggcagccgggacctgaacagaaccttcacccccatcccctgcagcgagttccccatgggcatcgaccccacagaaacaggccccctgtctgtggagacagctggggaggtgtgtggcggccccctggccctgggcggctttgaccccttcccccagggccccagcacagatggcttcttcctgcacgtgggccgggcagatgaggacacagagggccgcctgtatgtgtcctgcagcaagagccccaacagccatgacagcgagccctggaccctgctgcggcaggacagcgacagtgatgtggtggacatcgaggaggccgagcatgacttcatgggagaggcccaccctgtggtgttcagccgctacatcggggaggaggagagcgccaagctgcaggaggacatgaaggtgaaggagcacgaggacaaggatgatgccagcggccgcagcagcccctgcctgagcacagccagccagatgagctctgtgtccatggccagcggctctgtgaagatgaccagctttgctgagaggaagctgcagaggctgaacagctgtgagaccaagagcagcaccagcagcagccagaagaccaccccagatgccagcgagagctgcccagcccccctgaccacctggaggcagaagcgggagcagagccccagccagcacggcaaggaccctgccagcctgctggccagcgagctggtgcagctgcacatgcagctggaggagaagagaagagccatcgaggcccagaagaagaagatggaggccctgagcgcccggcagaggctgaagctgggcaaggccgccttcctgcacgtggtgaagaagggcaaggccgaggccgccccacccctgcggcctgagcactttgccaaggagtacagccagcacaatggagaggactgtggagatgctgtgtccaagacagaggacttcctggtgaaggaggagcagcgggaggagctgctgcacgagccccaggatgtggacaaggagagcctggcctttgcccagcagcacaaggccaaggaccctgtggccctgcacgagctggagaggaacaaggtgatctctgctgccctgctggaggacacagtgggggaggtggtggatgtgaatgaatgtgacctgagcattgagaagctgaatgagaccatcagcaccctgcagcaggccatcctgaagatcagccagcagcaggagcagctgctgatgaagagccccaccgtgcctgtgcccggcagcaagaacaacagccaggaccacaaggtgaaggcccctgtgcactttgtggagcccctgagccccaccggggtggccggccacaggaaggccccccggctgggccagggcaggaacagccgcagcggccggcctgctgagctgaaggtgcccaaggaccggccccagggcagcagccgcagcaagacccccacccccagcgtggagaccctgccccacctgcggcccttccctgccagcagccaccccaggacccccacagaccccggcctggacagcgccctggagcccagcggggacccccacggcaagtgcctgtttgacagctaccgcctgcatgatgagagcaaccagaggaccctgaccctgagcagcagcaaggatgccaacatcctgtctgagcagatgagcctgaaggaggtgctggatgcctctgtgaaggaggtgggcagcagcagcagtgatgtgtctgggaaggagagcgtgcctgtggaggagcccctgcggagccgggccagcctcatcgaggtggacctgagtgacctgaaggccccagatgaagatggagagctggtgtccctggatggcagcgctgacctggtgtctgagggggaccagaagccaggagtgggcttcttcttcaaggatgagcagaaggccgaggatgagctggccaagaagagagctgccttcctgctgaagcagcagaggaaggccgaggaggcccgggtgaggaagcagcagctggaggccgaggtggagctgaagagagatgaggcccggaggaaggccgaggaggacagagtgaggaaggaggaggagaaggcccggcgggagctgatcaagcaggagtacctgcggaggaagcagcagcagatcctggaggagcagggcctgggcaagcccaagagcaagcccaagaagccccggcccaagtctgtgcaccgggaggagagctgcagcgacagcggcaccaagtgcagcagcaccccagacaacctgagcaggacccagagcggcagcagcctgagcctggccagcgctgccaccacagagcctgagagcgtgcacagcggcggcacccccagccagagggtggagagcatggaggccctgcccatcctgagcaggaaccccagccgcagcacagaccgggactgggagacagccagcgctgccagcagcctggcctctgtggccgagtacacaggccccaagctgttcaaggagcccagcagcaagagcaacaagcccatcatccacaatgccatcagccactgctgcctggccggcaaggtgaatgagccccacaagaacagcatcctggaggagctggagaagtgtgatgccaaccactacatcatcctcttcagagatgctggctgccagttccgggccctgtactgctactacccagacacagaggagatctacaagctgaccggcaccggccccaagaacatcaccaagaagatgattgacaagctgtacaagtacagcagtgacaggaagcagttcaacctgatcccagccaagaccatgtctgtgtctgtggatgccctgaccatccacaaccacctgtggcagcccaagaggcctgctgtgcccaagaaggcccagaccaggaagtag

SEQ ID NO: 186796 - DNA, 3975 bp, Artificial Sequence
  derived and/or modified sequence
atggccgacagcctgtacaacatccggctgctgcgggagttcagcaatgagtacttgaacaagtgtttttacttgaccctcgaagacatgctttatgctcccctggtacttaaacccaacgtgatggtgtttattgctgaactgttttggtggttcgagaatgtgaaaccagattttgtgcaaccaagggacgtgcaggaactcaaagatgccaaaacagtcttacatcaaaagagctctcgaccaccggttcccatcagtaatgccacaaagcggtcatttctaggcagtccagctgccggaactttagctgaactgcaaccccccgtgcagcttcccgctgagggctgtcaccggcactacctgcatcccgaggagcctgagtatctgggcaagggtaccgccgctttttctccttcccacccactgctcccattgcggcaaaagcagcagaagagcatccagggcgaagatattccagatcaacggcacaggtctaactctctgaccagagtcgacggacagccgcgtggcgcagccatagcttggccagaaaaaaagactaggccagcttcgcagcccaccccattcgcgctgcaccacgcagcttcatgtgaagtggacccttcctccggagacagcatcagtctcgcaaggtcaatctctaaggactccctggcgtcaaacatcgtgaatctcacaccacagaatcagccgcacccaaccgccacgaagagtcacggaaaaagcttgctttccaacgtctccatagaagacgaggaggaagagttagtggctattgttcgggccgatgtagtacctcagcaagcagaccccgagtttccccgtgccagccctagggccttggggctgaccgccaacgcccgttcccctcaaggacagctcgatacatctgagtcaaagccagactctttctttttggagcctctgatgccagcagtcttgaagcccgccaaggagaaacaggttataactaaggaagacgagcgcggtgagggcaggcccaggtccattgtcagcaggaggcctagcgaagggcctcagccgttggtccggagaaagatgacaggtagtagagacctgaaccgaacctttaccccaataccgtgttctgaattccctatgggcatcgaccccactgagaccggaccactcagcgtggagaccgccggtgaggtctgcggagggccccttgcgttgggcggattcgatcctttcccacaggggccttctaccgacggcttttttctgcacgtgggccgagccgatgaggataccgaggggcgactctacgtgtcttgttctaagtctcccaattcccacgatagcgaaccttggactttgctgaggcaggactctgatagtgacgtggtggacatcgaggaggcagaacatgatttcatgggggaggctcatccagtcgtgttcagtagatatattggagaggaggagagtgccaagctgcaggaagacatgaaggtcaaggaacatgaagataaggacgatgctagcggccggagcagcccatgcctgtcaaccgcctcacaaatgagcagcgtgtccatggctagtggttccgtcaaaatgacttccttcgccgaacgaaaactgcagcggctgaatagttgtgagactaaaagctcaactagttccagccagaagaccacgcccgacgcaagtgagtcgtgtccggctccactgactacctggaggcagaagcgagagcaatccccatctcaacatggtaaagatccagcatccctgttagcttctgaactggtccagctgcacatgcagctggaagaaaagcgccgtgctattgaggcacagaaaaagaaaatggaggcgctctccgcacgccagcggctcaagctgggcaaagcggcttttctgcacgtggtaaaaaaaggaaaggccgaagcagcaccaccactacgtcctgaacacttcgcaaaagaatattcgcagcataatggggaagattgtggcgatgccgtgtctaaaacagaagatttcctcgtgaaagaggaacagcgcgaggaactgcttcacgaaccacaggacgtcgacaaggaaagcttggctttcgcacaacagcacaaagccaaagaccccgtcgctctccacgagcttgagcgaaataaggtaatttctgccgccctactcgaagataccgtcggcgaagtggttgatgtgaacgaatgcgatctgtccatcgagaagttgaacgagacaatcagcacactgcaacaagcgatcctgaagatttcccagcaacaagagcagctcctgatgaaatctccaacagtacccgtaccagggagcaaaaataatagccaggaccacaaggtaaaggcacccgttcatttcgttgagcctttatcccccactggggtggccgggcaccgcaaagctccccggctgggccagggcaggaattcacgctccggtagacctgccgaactgaaagtgccgaaggaccgtccccaaggatcctcaagaagtaagacacccacaccatctgtggagactctaccccacctcaggccttttcccgcctcatcccacccccgtacaccaactgaccccggcttggacagcgcactcgagccatctggagacccccacggcaagtgtctgttcgatagttaccggctgcacgatgaatctaatcagcggacactgacactctcctcatccaaggacgctaacatcctgtctgagcagatgtctctgaaggaggtgctggacgcctcagtgaaagaagttggttcaagttcttccgacgtgtcaggtaaggaatctgtgcctgtggaagagcccctccggtcacgcgcatccctaatcgaggttgatctgtctgatctgaaggcccctgatgaggacggagagttggtctctttggacggatccgccgatttggtctctgaaggcgaccaaaaaccgggcgttggtttctttttcaaggatgagcagaaggccgaagatgagcttgccaagaaaagagctgccttcctgctgaaacagcagagaaaggccgaggaagccagagttcgcaaacagcaactggaggccgaggtggaactgaagagagatgaagcccggcgcaaagccgaggaggacagggttagaaaagaggaagaaaaggcgagaagagaattgatcaagcaggaatacctgcggcgcaaacagcagcaaattctggaagagcaggggctgggtaagcccaagtctaaaccgaagaagccgcggcccaagtccgtccaccgcgaggagtcctgcagtgactccggcacaaagtgctccagcacaccagacaatctctctcggacccagtcaggaagctcattgtcactagcttccgctgctacgactgagcctgaaagcgtgcacagcgggggaacacccagtcagagagtggaatctatggaggccctcccaatcctgtctagaaacccatctcggagcactgatagggactgggagacggcctccgccgctagtagtcttgcgtcggtagccgagtatacaggccctaaacttttcaaggagccgtctagcaagtccaataagccaatcatccataacgcaatcagtcattgttgcctggccggaaaggtaaatgagcctcacaagaattctatcctcgaggagcttgagaagtgcgatgccaaccattatatcattctgttcagggatgccgggtgtcagttccgggcgctgtattgctactatcccgacaccgaagagatctataagctcaccggcaccggcccaaaaaacatcacaaagaagatgatcgacaaattgtacaagtactcctccgatcgtaagcaattcaatctgatacccgccaaaaccatgagtgtgtcagtagacgctctgaccattcataaccacctatggcaacccaagagaccagctgtgcctaaaaaagctcagacacgcaaatag

SEQ ID NO: 186797 - DNA, 4809 bp, Artificial Sequence
  derived and/or modified sequence
atggtggacgccagcggccgggccgccgccgagggctggcggaagatggaagccccacctgacggcgctgccgacctggtgcctctggatagatatgacgcagccagggcaaagatagcggcgaacctccagtggatatgtgccaaggcttatgggcgtgacaatattcctgaagatctgagagatcctttctacgtggatcagtatgagcaggagcacataaaacctcctgtaatcaagttactgcttagctccgaattgtactgtcgggtctgctcgctaattctgaagggcgaccaagtggcggccctgcagggccaccagtccgtgatacaggcattatcacgcaagggtatctatgtcatggagtccgacgacaccccagtcaccgaatcagatctcagccgtgccccaattaaaatgagcgcacatatggccatggtggatgcattgatgatggcgtataccgtagagatgattagcatagaaaaggtggttgcctcagttaagcggttttccacctttagcgctagtaaggaacttccatatgatctggaggacgcaatggtcttctggattaacaaggtgaatcttaaaatgcgtgagatcaccgagaaggaagtgaaattgaaacagcagctgctggaaagtcccgcccatcaaaaggtgcgataccggcgggagcatttgagcgctaggcagtccccctacttccctctcctcgaagatcttatgcgcgacgggtcagatggagcagcattgctcgccgttatccactattactgtcctgaacagatgaagctggacgacatctgccttaaggaggtgacctctatggctgactcattatataatattcggttgctgcgcgagttctccaacgaatacctgaataaatgcttttatttaacattagaggatatgctttatgcaccacttgtattaaaaccaaacgtaatggtatttatcgccgaattattctggtggttcgaaaatgtaaagcctgattttgttcaaccacgagacgttcaagagctaaaggacgctaaaactgtcctccatcagaaaagctccaggccccctgtccctatttcgaacgctacaaagcggtccttcctcggctccccagcggcagggactctcgccgaactgcaacccccagtgcagctgccagctgaaggctgccatagacactacctgcacccggaagagcccgagtacctgggtaaaggcactgccgccttcagcccttctcacccactgcttccgctgaggcagaaacagcagaagagcatccagggcgaagatattccggaccagcggcaccgatcaaactccctgaccagagtcgacgggcagcctcggggcgctgcaattgcatggcccgagaaaaaaactaggccagcatcccagccgaccccctttgcactgcatcacgcggcctcatgtgaggtagatccatccagtggcgatagtattagtttggctagatcaattagcaaggattctttggcctctaacattgttaacttgactcctcagaatcagccgcatccaacagccactaagtcgcacggcaagagcctcctttcaaacgtatcgatcgaagatgaggaggaggagctagttgctatcgtgagagccgatgtcgtgcctcaacaggccgacccagaatttccgcgtgccagtcctagggccttaggattgacagctaacgcccgaagtccacagggccagctcgacacaagtgaaagtaaacctgatagcttctttcttgaaccgcttatgccagccgttctgaagccggctaaggagaaacaggtgattactaaagaggacgaaagaggggaaggccggccgcggtccatcgtgagtcgaagaccatcggaaggaccacagccactcgtccggaggaagatgaccggatcccgcgatcttaacagaacattcaccccaattccatgcagtgaatttcctatgggtattgaccctacggaaacaggaccactgtccgtcgaaaccgccggagaagtgtgtggcggacccttggcactgggaggctttgaccctttcccccaaggcccctccactgacggatttttcctgcacgtcggccgagccgacgaggacaccgagggacgcctgtatgtgagctgttctaagtccccaaacagccacgacagtgagccatggacgctacttagacaagatagcgactcagatgtggtggatattgaagaagctgagcacgactttatgggggaagctcaccccgttgtgttttcccgctacatcggggaggaagagagcgccaagctccaagaagacatgaaggtcaaggaacacgaggataaggacgacgcctcgggtagatcctctccatgcctgtcgacggcatctcaaatgagttcagtgtctatggccagtggcagcgtcaagatgacatccttcgccgaaagaaaattacagagactgaactcctgcgagactaagtccagtaccagttcatctcagaagactacccctgacgccagcgagtcatgcccggcaccactcactacctggaggcagaagcgcgagcaatctcctagtcaacacggcaaggatcctgcctcactcctggcgtcggaactggtacagctgcatatgcagttggaggagaagaggcgggcaatcgaggctcagaaaaaaaaaatggaggcactgtcagctaggcagagactgaagctgggcaaagctgcctttttgcacgtggtaaaaaagggcaaggctgaagcagctccccccctgaggccggagcactttgccaaggaatactctcagcataacggagaggactgcggcgatgccgtctccaaaaccgaggacttcctcgtgaaagaggagcagcgagaggaactgctccacgagcctcaagatgtagacaaggaatctctcgctttcgctcagcaacataaagcaaaagatcccgtggctctccatgagctcgagagaaacaaagttatctcagcagctctgctggaggacacagttggtgaggtggtcgacgtaaacgaatgtgacctgtcaattgagaaactgaatgaaacaatttccacccttcaacaggcaattctcaaaatctcgcaacagcaggagcagctactgatgaagtcccccaccgtccccgtacctggcagtaagaataattctcaggatcacaaggtgaaagcacccgtgcacttcgtagagccattatctcccaccggagtggctggccatcgcaaagctccacgcctcggtcagggaaggaactctagatctgggcggcccgccgagttgaaggttcccaaggaccgccctcaaggcagttctcgttctaaaacacctacaccaagcgtggagactttaccgcacctgcgcccgtttccagcaagctcacaccctagaactcctacagatccaggcttagattctgctttggagccatcgggagacccccacggaaaatgtctattcgactcatatcgcctgcacgacgagagcaatcaaagaacacttacactgtcatccagtaaggatgctaacatactgtctgaacaaatgtcacttaaagaagtgttagatgcctccgttaaggaggtggggtcgtctagcagcgacgtctcgggcaaggagtcggtgcctgtggaggagcctctaagaagcagggccagcctgatcgaggtggatttaagcgacttaaaggccccagacgaggacggcgagctcgtttctctcgacggatccgccgacctggtaagtgagggcgaccagaagccgggcgtcggattcttctttaaagacgaacagaaagccgaggacgagctggcaaagaagagggccgctttcctgctcaaacagcagcgcaaggctgaagaggcccgagtccggaagcagcagttagaggccgaggtcgagcttaaacgggacgaggcacggcgaaaggccgaggaggatagggtgcgtaaggaagaagaaaaggctcgtcgtgagttaatcaagcaagagtatctcaggcggaaacagcagcagatcctggaggagcagggactggggaagcccaaatcaaagccgaaaaaaccaaggcctaagtcagttcacagggaggagtcctgttctgacagcggcacaaaatgcagttcaacccccgataatctttcccgcacccagagcggttcctccttgagcctggcctcagcggccaccaccgagccagaatccgtccatagtggtggcacccccagtcagcgggtcgaatctatggaggcactgccaatcctgagtcggaatccctctagatctacagatcgggattgggaaaccgcctctgcagcatctagcctggcgtctgtcgctgaatataccggcccaaagctgttcaaggagccaagcagcaagagtaataagcccattatccacaatgccatttcgcactgctgcctggcggggaaggtgaacgagccccacaagaatagtattctcgaggaactagaaaagtgtgatgcaaatcattacataatcctctttcgtgatgccgggtgtcagtttcgcgcactgtactgttattacccagatactgaggagatctacaagctcacgggcacaggacccaaaaatatcacaaaaaagatgatagacaaactttataagtattcctcggaccggaagcaattcaacttgattcccgctaagactatgtccgttagcgtggatgcactcactattcataatcatctctggcaacctaagcggcccgccgtacctaagaaagcgcaaactagaaagtag

SEQ ID NO: 186798 - DNA, 3975 bp, Artificial Sequence
  derived and/or modified sequence
atggcagatagcctttacaacatacgcctcttgcgggaattctcaaatgagtacctaaacaagtgtttctatctgacacttgaggacatgctgtacgctccactggtcttgaagcctaacgtgatggtgttcattgctgaactcttctggtggttcgaaaatgtgaagcctgattttgtgcagcctcgcgatgtacaggaattgaaagacgctaaaacagtcttgcaccagaaaagcagccgaccccctgtacctatatcaaacgccacgaaacggtcgtttcttggcagcccagctgccggaaccctggcagagctgcagccaccagttcagcttcccgctgaaggatgtcatcgtcattatctgcatcctgaagagcctgagtatctaggaaaggggaccgcagctttcagtccgtcccatccattactgcctttacgacagaaacaacagaagtccattcagggcgaagatatcccagaccagcgtcacagaagtaactccctgacacgggttgatggccagcctcgcggagctgctattgcttggcctgagaagaagactcgccctgccagccagcctacacctttcgccctgcatcatgccgcttcatgcgaggtcgacccttcctctggagactccatctcgttagcgaggagtatttcaaaagatagcctagcaagtaatatagttaatctgaccccccagaatcaacctcacccaactgctacaaaaagtcacgggaagtctctgttatccaacgtgtccattgaggatgaggaagaggagctggtggctattgtcagagcagatgtcgtgccccaacaagcagatcctgagttccctagggcctcccccagggccctcggattgactgccaatgcgaggagcccccagggacaactcgatacctctgagtctaagcccgactcgttcttcttggagccacttatgccggctgtcctcaaaccagccaaggaaaagcaggtgataacaaaggaagatgagcgtggagaaggaagaccaaggagtatcgtgtctcggaggccatcagagggaccacagccccttgttaggcgaaaaatgactggatcacgcgaccttaatcggacttttactccaataccttgctcggagtttcccatgggcatagaccctacagagacagggcctctgtctgtggaaaccgcgggagaggtgtgtgggggaccacttgcacttgggggttttgacccattccctcaggggccaagtacagatggattctttctgcacgttggacgagctgatgaagacacagaaggcagactctacgtatcctgcagcaagagtccaaattcacatgattccgagccttggacacttctgcgacaggatagtgattctgacgtggtagatatagaggaagctgagcacgattttatgggggaagcccaccctgttgttttttctcgatatatcggtgaggaggagagcgcgaagcttcaggaggatatgaaggtaaaagagcacgaagacaaagacgatgcttcaggcaggagtagcccctgtctatccacagcttcccagatgtcgtctgtttccatggccagtggtagcgtgaagatgacgagctttgccgagaggaagctgcaaagactgaattcttgtgagaccaagtcaagtacctcttccagccagaaaaccacccccgacgcttcagagtcgtgccctgcgcctctgacgacatggcgtcagaagagggaacagagcccaagtcagcacggtaaagaccccgctagtctgttggcaagtgaactggtccagctccatatgcagctagaagagaaaaggagggctattgaggctcagaaaaaaaagatggaggccttgtccgcgaggcagcgactgaagcttggaaaggccgctttcttgcacgttgtgaagaaaggcaaggccgaggccgctccacctctccggcctgaacacttcgccaaggagtacagccagcacaacggcgaggactgcggcgatgccgtgtcgaaaacggaggacttcctcgtgaaggaggagcaaagagaagagctgcttcatgagccacaggatgtggacaaggagtctcttgccttcgcccaacagcacaaggccaaagatccggtggcccttcatgaactggagaggaataaagtgatttcagccgctttactcgaggatacggtgggggaggtggtggatgtaaatgaatgcgatctgagcattgagaagcttaatgagaccataagcacgctccaacaggccattctaaaaattagtcagcagcaggagcaactcttaatgaagagccccactgtcccggtccctgggtcgaagaacaattctcaggatcataaggtgaaagcccctgtgcactttgtggagccgctcagcccaaccggagtggctggacatcgcaaggcaccacgcctcggtcagggccgtaacagtcgaagcgggagaccagcagaactcaaggttcccaaggaccgccctcagggctcaagtcggtccaagactcctacgccaagcgtggagaccctgcctcacctacgccctttccctgctagcagccatcctcgtactcccaccgaccctggcctggactctgccttggaaccatctggagacccccacggtaagtgtttgttcgatagctaccgacttcacgacgaatcaaaccagaggaccctgacactctcctcctccaaggatgctaatattctgagcgagcaaatgagcttgaaggaggttctggatgcgtccgtgaaggaagtcggatccagcagctcagacgtgagcgggaaggagtcagtgccggtcgaggaacctctgaggtcacgggctagtttaatcgaagtcgaccttagcgatcttaaggcccctgacgaggacggtgagctcgtgtcactggatgggtcagcagacctcgttagcgaaggagaccagaaaccaggggtgggcttcttcttcaaagatgaacaaaaagcagaagacgagctggccaagaagagggccgcattcctactgaaacagcagcgcaaagcggaagaagcccgtgtgcgtaaacagcagctcgaggccgaggttgaactgaaaagagatgaggccaggcgtaaagcggaagaagacagggtaagaaaggaggaggagaaagcaagaagagagctgatcaaacaagaatatcttcggaggaagcagcagcaaattttggaggagcagggcctgggaaagcccaagtcaaaacctaaaaagcctcgcccaaagtccgttcacagggaggaatcctgcagtgatagtgggacaaagtgtagctcgacgcccgataatctgagccggacacagagcggctcctctctgagtcttgcatccgccgcaactactgaacccgagtctgtacactccggaggaacaccatcccagcgggtggaatctatggaggctctaccaattctgagccgaaatccaagccgtagtactgacagagactgggagactgcttccgctgcaagcagcttagcaagcgtcgcagagtataccggcccaaaactgtttaaagagccgtcatctaagagtaacaaacccattatacataacgccattagtcactgttgcctggcaggcaaggtgaatgagccccataagaactctatcctggaggaattagagaagtgtgatgcgaatcattatattattcttttccgcgatgccggatgccaattcagggctttatattgttattatcccgacaccgaagagatttataagctaacaggcaccggccctaagaatatcacgaagaagatgatagataagttatacaagtatagcagcgaccgcaagcagtttaacttgatccccgctaaaacgatgtctgtgtcagtggacgccctgacaatccataaccatttatggcaacccaagagacccgcagtcccgaagaaggcccaaaccagaaaatag

SEQ ID NO: 186799 - DNA, 4809 bp, Artificial Sequence
  derived and/or modified sequence
atggtggatgcatccggtcgcgcagctgctgaaggatggcgaaaaatggaggcccctccggacggggcagccgacctggtccctttggatcggtatgacgccgctcgggctaaaatcgccgctaacctccaatggatttgcgcaaaggcgtacggtcgggacaacatccctgaagacctgcgagaccctttctatgttgaccagtatgaacaggaacatatcaagccaccggtcatcaagctgctgctctcatcagagctatactgccgggtctgttcactcattctgaagggtgatcaggtggccgcattgcagggtcaccaaagcgtgatccaggcactgagtcgcaaaggcatctacgtaatggaatctgatgatacccctgtaactgagtctgacctgtcaagagcccctatcaagatgtctgcccacatggcgatggtggacgctcttatgatggcgtacacagtggagatgatctccatcgaaaaggtggtcgccagcgtgaaacgtttcagcacgttctccgcgtcgaaggaactgccctatgacctcgaggacgcaatggtgttttggattaacaaagtgaacctgaaaatgcgtgaaattaccgagaaggaagtgaaactgaagcagcagctccttgaatcacccgctcaccaaaaggtgagataccggagggaacacttaagcgcgaggcaatccccttattttcctctcttagaagatcttatgcgcgatggcagcgatggcgctgctctgcttgcggtcatccactactactgccccgagcagatgaagttggacgatatctgcttgaaggaggtcacaagcatggcagactctttgtataacatacgcctcttaagggaattttctaacgagtacctgaacaaatgcttctatctgacactggaagacatgttatatgccccactcgtccttaaaccaaacgtcatggtcttcattgcagagttgttttggtggtttgagaatgtcaaacccgacttcgttcagccacgggacgtccaagagctcaaagatgccaagacagtgctgcatcaaaagtcgtcacgtccccctgtccctatttcaaacgctactaaacggtcattccttggctctcccgctgcaggcactctggccgaacttcagccgccagtgcagctgccagccgagggttgtcaccggcattacctgcaccctgaagaacccgaatacctgggaaagggcacggctgcgttctccccctctcaccccctgctgcctctgcgccaaaaacagcagaagtcaattcaaggagaagatattcccgaccagaggcacagaagcaactcacttacaagagtggatgggcagcctagaggggctgctattgcctggcctgaaaaaaagacgaggccagcatcccagcctacaccatttgccctacaccacgctgcttcttgcgaagtcgatccatcttcgggtgactctataagtttagccaggagtatcagcaaagacagcctcgcaagtaatatcgtgaatcttacaccgcaaaaccagccccatcctaccgcaaccaagagccacgggaaatcactgctgtccaatgtttcaattgaagatgaggaggaagagcttgtcgcaatcgtgcgtgcagacgtggtgccgcagcaagccgatccagagttccctcgcgcaagtcctcgtgccctcggccttaccgccaatgccagaagtcctcagggacaactagatactagtgaatccaagccagacagcttttttctagaacctttgatgcctgcagtcttaaagcctgcaaaagaaaaacaggttatcactaaggaggatgagcggggagagggtaggccaaggtccattgtgagcagacgcccaagcgagggaccccagccccttgtccggaggaaaatgacagggtccagagatctgaatcgcacttttactccaatcccgtgcagcgaatttcccatgggcatcgaccctaccgaaacaggtccactgtcagtcgagacagccggagaggtttgcggtggacccttagccttaggcggtttcgatccgttccctcaaggcccttcgaccgatgggttttttcttcacgttggaagagctgacgaagataccgaagggaggctgtacgtaagctgtagtaaaagccctaatagtcatgacagtgagccatggacactgcttagacaggacagcgacagcgatgtggtcgatatagaagaggctgaacacgactttatgggtgaagcccatcctgtggtgttctcccgatatataggggaagaagagtccgctaaattgcaggaggatatgaaagtgaaggaacatgaggacaaggatgacgccagcggaagatctagcccatgcctttccactgctagtcagatgagctccgtgagcatggcctccggttcggttaagatgacctctttcgccgaaaggaagcttcaaaggctgaacagctgtgagactaaaagctctacgtcgagtagccagaaaacaactcctgacgcctccgaaagttgccctgcacctctgactacatggagacagaaacgcgaacagtctcccagtcagcacggaaaggatccagccagtttgttggcctcggaacttgtgcagctgcatatgcagcttgaggagaaacgacgcgctatcgaggcacagaagaaaaagatggaggcactgagcgcacgccagagactcaaactggggaaggcagcatttctgcatgtcgtgaagaaggggaaggctgaggccgcaccgcctttacggccagagcattttgccaaggagtacagccagcacaacggcgaagactgtggggacgccgtgtccaagacagaggactttctggtgaaggaagaacagagagaagagctcctgcatgaaccacaggacgtcgacaaggaaagtcttgcctttgctcaacagcacaaagccaaagatccagttgccctacacgagctggaacgcaataaagtcattagcgccgcactcctggaggacaccgtgggtgaggtagtggacgtaaatgagtgcgacctgagcattgaaaagctgaacgaaacaatttcgacactccagcaggcaatcctcaagatctctcaacagcaggagcagttactgatgaaaagccctacggtccccgtccctggctccaagaacaatagtcaggaccataaggtcaaagccccagtgcactttgtggagccactaagcccaacaggcgtggcaggtcatcgtaaggctcccagacttggccagggcagaaactctaggtccggacgacctgccgaattgaaggtgccaaaagatcgaccccagggttcgtcacgctcaaaaactcctacaccttctgtggaaacactgccccacctccgtccctttcccgcatccagtcaccctaggacaccgacggacccgggactggatagtgccttggagccatccggagaccctcatggaaagtgccttttcgatagctatcgcctgcacgatgagtcgaaccagcgcactctcactctgtccagctcaaaagatgctaatattctcagtgagcagatgtctctgaaggaggtgttggatgccagtgtgaaggaggtcggttcttctagttctgacgtctccggaaaggaatctgtccccgtcgaggagcccctacgcagtcgagcctcgctgattgaagttgatctgagtgatctgaaagctcctgacgaggatggagaactggtgtccctcgatggcagtgctgatttggtttcagaaggagatcagaaaccgggtgtggggttcttttttaaggacgaacagaaagccgaggatgaactggccaagaagcgagccgcattcctgcttaaacaacaacgaaaagctgaagaggcaagagttcgtaagcagcagctcgaggctgaagtcgagttgaaaagggacgaagctaggcgcaaggctgaggaggatagagtgcgcaaagaggaagaaaaagccaggcgggaactcatcaagcaagagtatctccgacgcaagcaacagcaaatcctggaggagcaaggtctcggaaagccaaagagcaaaccaaaaaaaccaagacccaagtctgtgcaccgcgaggagagttgtagcgactctgggacaaagtgtagcagtactcccgataatttgtcccgcacgcagtccgggtcttccctgtctttggcgagcgcagcaaccaccgagccagaatctgtgcacagtggtggcaccccttcacagagagtcgagagcatggaagccctgcctatcctgagtaggaacccttcccgttccacggatagagactgggaaacagctagcgctgctagttcattagcctcggttgctgagtacactggcccaaagctatttaaagaaccttccagcaagtctaataaaccgattattcacaatgctatatcccattgctgcctggcaggcaaggttaacgagccgcacaaaaacagcatcctggaggagctcgagaaatgcgatgccaaccattacataattcttttcagggacgccggatgccagtttcgcgctctctactgctactatccagacactgaagaaatctataaacttactggtactgggccaaagaatattactaagaagatgatcgacaagctgtacaagtacagctccgaccgaaagcagttcaatttaattccagccaaaaccatgtccgtgagcgttgacgccctaacaattcataatcatctgtggcaacccaaaagacccgctgtgccaaagaaggcccagaccagaaaatag

SEQ ID NO: 186800 - DNA, 6054 bp, Artificial Sequence
  derived and/or modified sequence
gtcccggaaagggatctatgtgatggagagtgatgacacccccgtgacagagtccgacctcagtcgcgcacccataaaaatgagtgcccacatggcaatggtggatgccctgatgatggcctacactgtggagatgatcagcatcgagaaggtggtggccagtgtcaagcgcttctcaacgttcagtgcctcgaaagaacttccgtacgacctcgaggatgccatggtgttctggatcaacaaggtaaatcttaaaatgagagagataacagagaaagaagttaaattaaaacaacagttattggaaagtccagctcatcaaaagatatatgcttaaaggaggtaacgtcgatggccgacagtctgtataatattcggcttctgagagaattctccaatgaatatcttaataaatgtttttatctcaccttggaagatatgctgtatgcgccattagtgttgaagccgaatgttatggtttttattgcggagcttttttggtggttcgagaatgtcaagccagattttgttcagcccagggatgttcaggagctgaaagacgcgaaaacagtgttacaccagaagagcagccggcctcctgtaccgatctccaacgcgaccaaacgcagtttcctaggcagccctgctgcagggaccctggctgagctgcagccccccgtgcagctgccggcggaaggctgtcacaggcactacctgcacccggaagaacctgaatacctcgggaaaggaactgctgccttcagcccatcccatcctttattgccactgagacagaaacagcagaaatccatacagggagaggacatccctgatcagcgacatcgatcgaattctttgacccgagttgatggtcagcctcgaggagcagcaatagcctggccagaaaaaaaaaccaggcctgcgtcccagccaacaccttttgctctacatcacgctgcgagttgtgaagtggatcccagctctggcgacagcatcagcttggcccgctccatcagcaaagacagtttggcatccaacattgttaatctgaccccacagaaccagccacaccccacggccacgaagagccacgggaagagcctcctgagcaatgtcagtattgaggatgaggaagaggagcttgtggctattgttagagcagacgtggttccccagcaggctgacccggagttccccagggcctcaccccgggccttaggccttacagcaaatgcccggtctccccaaggacagctggacacctcggaaagtaagcctgacagttttttcttggagcctttgatgccagcagttcttaagccagcgaaagagaagcaggtgatcaccaaggaggatgaacggggggaagggagaccgaggagcatcgtgtctaggaggcccagcgagggcccccagcctttggtacgaaggaaaatgactggcagtcgcgacttgaataggacttttaccccgattccatgctcagaattccccatgggcatcgaccccaccgagacaggaccactgtcagtggaaaccgcaggagaggtctgtggtgggcctctggcccttggcggattcgatccgttcccccagggaccatccacggatggcttcttccttcatgtaggcagggccgatgaagacaccgagggaaggttatatgttagttgttcaaaaagccccaactcccacgattcagagccgtggactctcctcaggcaggattctgactcggatgtggtggacatagaggaagccgagcacgatttcatgggtgaggcccatcctgtggttttcagcagatacattggggaggaagagtcggccaaactgcaggaggacatgaaggtgaaggaacatgaagacaaagatgacgccagcggccgctcgagcccctgcctgagcacagcctctcagatgagcagtgtctccatggcgagtgggagcgtgaagatgaccagctttgcggagaggaagctccagagactcaacagctgtgagaccaagtccagcaccagcagctcccagaagaccacgccagatgcgtctgagagctgcccagcccctctgacgacgtggaggcagaagagggagcagagtccgagccagcatggcaaggatcccgccagcctcctggcatctgagctggtacagctgcacatgcagctggaggagaagcgcagggccatcgaggcccagaagaagaagatggaggcgctgtcggcaaggcagcgcctgaagctcggcaaggctgcattcctgcatgtggtgaagaagggcaaggccgaggctgccccacccctcaggccggagcactttgcaaaggagtactctcagcacaacggggaggactgtggggacgctgtttccaaaaccgaagactttctcgtgaaggaggagcagagagaggagctccttcacgagccacaggatgtggacaaagagagcctggcctttgctcagcaacataaagcaaaagaccctgtggctctgcacgagctggagagaaataaggtgatctccgctgccctcctggaggacactgttggggaggttgtcgacgtgaatgaatgtgacctttccatcgagaagcttaacgaaaccatcagtacgctgcagcaggccatcctgaaaatctctcagcagcaagagcagcttctgatgaagtcccccacagtcccagtgccaggctctaagaataactcgcaggaccacaaagtgaaggcaccagtccacttcgtggagccactctctcccacgggcgtggctggccaccgcaaagccccccggctgggtcaaggccggaattcccgttccggaaggccggcggagctgaaggtcccaaaagacaggccacagggctcctcccgaagtaaaaccccaacgcccagtgtagagacgctcccgcacttgagacccttccctgccagcagccaccctcggacgcccacggaccctggcctggacagtgccctggagcccagtggtgacccacatgggaagtgtctcttcgacagttacaggctccatgatgaaagcaatcagcggacacttactctgtcctcttccaaagatgccaacattctttcggagcagatgagcctcaaagaagttctggatgcgagtgtgaaggaggtggggtccagctcctcagatgtctcgggaaaagagagcgtccccgtggaggagcctctgaggagcagggccagcctcattgaagtggacctctccgacctgaaggcccccgacgaggatggggagctggtaagcctcgatggctcggcggaccttgtcagcgaaggcgaccagaagccgggggtcggcttcttcttcaaggatgaacagaaagcggaagatgagctcgccaagaagcgggcggccttcctcctgaagcagcagcgcaaggccgaggaggcccgcgtgcgcaagcagcagctggaagcggaggtggagctcaagcgtgacgaagcccggcgcaaagctgaggaagaccgggtgcggaaggaggaggagaaggcgcggcgcgagctcatcaagcaggagtacctgcggaggaagcagcagcagatcctagaggagcaggggctcggcaagcccaagtcaaagccgaagaagccgcggccgaagtcggtgcaccgggaagagtcgtgcagcgactccggcaccaagtgctcctccacccctgataacttgagccggactcagtcaggctccagcctgtccttggcctctgcggcgacgacagaacccgagagcgttcattccgggggcacaccctctcagcgagtggaatcgatggaagccctgcccatactgagccgtaacccaagcaggagcacagaccgagactgggagaccgcgtcggcggcatcttccctggcctcagtggccgagtacacaggtcccaagctctttaaggagcccagtagtaaatcaaacaagccgattattcacaatgccatatcccattgctgcctggctggaaaagtgaacgaaccccacaagaattccatattggaggagctggagaagtgtgatgccaatcactacatcatactgtttcgtgatgctggctgccagttcagggcgctttactgctactatcctgatactgaggaaatctacaaactcactggcacggggccaaagaacatcaccaagaaaatgatcgacaaactgtataaatacagctcagaccgaaaacagtttaacttgatcccagccaaaaccatgtctgtcagtgtggacgcactcacaatccacaaccacctgtggcagcccaagcggcctgcagtgccaaagaaggcccagactcgtaaatgaccccggtgcagctggcgtccaaagggtgacccagactcgtaaatgatgcccttgtggctggcatccagagggtgccacggggtccttatttattgttttcatctatttgggtacgaagtgtgcaaagtcacagaccttttgcaaagaggtttctagacagcagaagaaaacccctctctcagcgctcatctcacgcagaggatgccaggcagggtgaggatgggggagtagatgccgcttttgcagtggctcgcactgctgtggccactgctgaccactgaggctcccagcggagggtgttcacagccaggtcccgggccacggagctcccttacttgaagttctccttcagcatagattagacgtgatccactttgctttcttgcttctcacctcgcccccttgcacattgcctgacaccctcatattggccagctgtaatctcgtgactatgggactgaggctcaatcttggcttggggtgtttgaatgtctatagcaaaggaattcataatgggaaatctttttcatttgagaaattgtatgatatttattggttgtgtctactgccaacatttatatccaattctaagatttctgaaaaaaaattcttatcccttgctgctcagaaaaagtttacggaaaacaccagttcactaaaagcaccgaaatctgcaaagcctgtcttccgctagaacaacgtctacaaatgtgaagatgatgacttctggcacgcggtcatgagggtggggaatggcactaggagctgatgtttgcctcatttaaagtaggcaagccgagccaactgcagccatcattcattaagttttgggtagtgctctaatggtttgttcactttaataaagacagattttggtaaagtagaatatttttcattctgagcatgtttgtcccaaaaggtgatgcacttaagctgacagtcccttcagtggttttgttaggtcacggcttgtcctgtctggattctgcatctggaagcgctgcatgctctcagaggagcgtgccgtttcccctgtagatggatacttttgttttgttgcctatttaaaaacaattaagtggttatttgcagttatttcagaactccaagtaagtggatggctttgggttctttctgccttggtcccaatggtgttgatgcttctgtggagcgcggacattcccaggagcaggtgcgtgccagccatggctgccagacactgctgcaactgaccagctgccggaagattctggagccactaacattagttttgcacatattttcttgggagtgttacttgaatctatctcaaactgcagaaaaaatcaaaagatcaataattgggagaaaaagagacaaatttaactgttacataattttagatagacaaaaaacatgagtgagtcgtgtacataaggagggaacatggtacagaaggctagaaggaattataggtcttattcccctttcctcagtcctttgaagagaagtacagtctcttgcgattttgtatatatcgtgttcgacacagccgctctctgtcctgtaaatagggaactaaaggctgtatgatttctcaagtgctgagttacacagtcctgagtgagctttctgttaccatactttcacacgtgggctttatttctcactgtatgtttgatatgatattactgtatttattttaagaaagcactaagatgtaataaagtgatgaactaatttgcttta

SEQ ID NO: 186801 - DNA, 7696 bp, Artificial Sequence
  derived and/or modified sequence
ggcgcggcgaggggcggcggcgcctttgttgcggccgggccgccgcctcagccctttgtctgcagatggtggacgcgagcggccgcgccgccgccgagggctggaggaagatggaggccccgccggacggcgccgccgacctcgtgcccctggaccgctacgacgcggcgcgcgccaagatcgccgccaacctgcagtggatctgcgccaaggcctacggccgagataacatccctgaggacctcagagaccctttctacgttgaccagtatgagcaggagcacattaagccgcctgttatcaagcttctcctgtccagcgagctgtactgccgtgtctgcagcctcatcctgaaaggggaccaggtggccgccttacagggacaccagtctgtcatccaggccctgtcccggaaagggatctatgtgatggagagtgatgacacccccgtgacagagtccgacctcagtcgcgcacccataaaaatgagtgcccacatggcaatggtggatgccctgatgatggcctacactgtggagatgatcagcatcgagaaggtggtggccagtgtcaagcgcttctcaacgttcagtgcctcgaaagaacttccgtacgacctcgaggatgccatggtgttctggatcaacaaggtaaatcttaaaatgagagagataacagagaaagaagttaaattaaaacaacagttattggaaagtccagctcatcaaaaggtccgctatcgacgagagcacctttctgctaggcagtcaccctacttcccgttgttggaggatttgatgagagacggcagtgatggtgctgctctcttagctgtgattcactattattgcccagagcagatgaaactggatgatatatgcttaaaggaggtaacgtcgatggccgacagtctgtataatattcggcttctgagagaattctccaatgaatatcttaataaatgtttttatctcaccttggaagatatgctgtatgcgccattagtgttgaagccgaatgttatggtttttattgcggagcttttttggtggttcgagaatgtcaagccagattttgttcagcccagggatgttcaggagctgaaagacgcgaaaacagtgttacaccagaagagcagccggcctcctgtaccgatctccaacgcgaccaaacgcagtttcctaggcagccctgctgcagggaccctggctgagctgcagccccccgtgcagctgccggcggaaggctgtcacaggcactacctgcacccggaagaacctgaatacctcgggaaaggaactgctgccttcagcccatcccatcctttattgccactgagacagaaacagcagaaatccatacagggagaggacatccctgatcagcgacatcgatcgaattctttgacccgagttgatggtcagcctcgaggagcagcaatagcctggccagaaaaaaaaaccaggcctgcgtcccagccaacaccttttgctctacatcacgctgcgagttgtgaagtggatcccagctctggcgacagcatcagcttggcccgctccatcagcaaagacagtttggcatccaacattgttaatctgaccccacagaaccagccacaccccacggccacgaagagccacgggaagagcctcctgagcaatgtcagtattgaggatgaggaagaggagcttgtggctattgttagagcagacgtggttccccagcaggctgacccggagttccccagggcctcaccccgggccttaggccttacagcaaatgcccggtctccccaaggacagctggacacctcggaaagtaagcctgacagttttttcttggagcctttgatgccagcagttcttaagccagcgaaagagaagcaggtgatcaccaaggaggatgaacggggggaagggagaccgaggagcatcgtgtctaggaggcccagcgagggcccccagcctttggtacgaaggaaaatgactggcagtcgcgacttgaataggacttttaccccgattccatgctcagaattccccatgggcatcgaccccaccgagacaggaccactgtcagtggaaaccgcaggagaggtctgtggtgggcctctggcccttggcggattcgatccgttcccccagggaccatccacggatggcttcttccttcatgtaggcagggccgatgaagacaccgagggaaggttatatgttagttgttcaaaaagccccaactcccacgattcagagccgtggactctcctcaggcaggattctgactcggatgtggtggacatagaggaagccgagcacgatttcatgggtgaggcccatcctgtggttttcagcagatacattggggaggaagagtcggccaaactgcaggaggacatgaaggtgaaggaacatgaagacaaagatgacgccagcggccgctcgagcccctgcctgagcacagcctctcagatgagcagtgtctccatggcgagtgggagcgtgaagatgaccagctttgcggagaggaagctccagagactcaacagctgtgagaccaagtccagcaccagcagctcccagaagaccacgccagatgcgtctgagagctgcccagcccctctgacgacgtggaggcagaagagggagcagagtccgagccagcatggcaaggatcccgccagcctcctggcatctgagctggtacagctgcacatgcagctggaggagaagcgcagggccatcgaggcccagaagaagaagatggaggcgctgtcggcaaggcagcgcctgaagctcggcaaggctgcattcctgcatgtggtgaagaagggcaaggccgaggctgccccacccctcaggccggagcactttgcaaaggagtactctcagcacaacggggaggactgtggggacgctgtttccaaaaccgaagactttctcgtgaaggaggagcagagagaggagctccttcacgagccacaggatgtggacaaagagagcctggcctttgctcagcaacataaagcaaaagaccctgtggctctgcacgagctggagagaaataaggtgatctccgctgccctcctggaggacactgttggggaggttgtcgacgtgaatgaatgtgacctttccatcgagaagcttaacgaaaccatcagtacgctgcagcaggccatcctgaaaatctctcagcagcaagagcagcttctgatgaagtcccccacagtcccagtgccaggctctaagaataactcgcaggaccacaaagtgaaggcaccagtccacttcgtggagccactctctcccacgggcgtggctggccaccgcaaagccccccggctgggtcaaggccggaattcccgttccggaaggccggcggagctgaaggtcccaaaagacaggccacagggctcctcccgaagtaaaaccccaacgcccagtgtagagacgctcccgcacttgagacccttccctgccagcagccaccctcggacgcccacggaccctggcctggacagtgccctggagcccagtggtgacccacatgggaagtgtctcttcgacagttacaggctccatgatgaaagcaatcagcggacacttactctgtcctcttccaaagatgccaacattctttcggagcagatgagcctcaaagaagttctggatgcgagtgtgaaggaggtggggtccagctcctcagatgtctcgggaaaagagagcgtccccgtggaggagcctctgaggagcagggccagcctcattgaagtggacctctccgacctgaaggcccccgacgaggatggggagctggtaagcctcgatggctcggcggaccttgtcagcgaaggcgaccagaagccgggggtcggcttcttcttcaaggatgaacagaaagcggaagatgagctcgccaagaagcgggcggccttcctcctgaagcagcagcgcaaggccgaggaggcccgcgtgcgcaagcagcagctggaagcggaggtggagctcaagcgtgacgaagcccggcgcaaagctgaggaagaccgggtgcggaaggaggaggagaaggcgcggcgcgagctcatcaagcaggagtacctgcggaggaagcagcagcagatcctagaggagcaggggctcggcaagcccaagtcaaagccgaagaagccgcggccgaagtcggtgcaccgggaagagtcgtgcagcgactccggcaccaagtgctcctccacccctgataacttgagccggactcagtcaggctccagcctgtccttggcctctgcggcgacgacagaacccgagagcgttcattccgggggcacaccctctcagcgagtggaatcgatggaagccctgcccatactgagccgtaacccaagcaggagcacagaccgagactgggagaccgcgtcggcggcatcttccctggcctcagtggccgagtacacaggtcccaagctctttaaggagcccagtagtaaatcaaacaagccgattattcacaatgccatatcccattgctgcctggctggaaaagtgaacgaaccccacaagaattccatattggaggagctggagaagtgtgatgccaatcactacatcatactgtttcgtgatgctggctgccagttcagggcgctttactgctactatcctgatactgaggaaatctacaaactcactggcacggggccaaagaacatcaccaagaaaatgatcgacaaactgtataaatacagctcagaccgaaaacagtttaacttgatcccagccaaaaccatgtctgtcagtgtggacgcactcacaatccacaaccacctgtggcagcccaagcggcctgcagtgccaaagaaggcccagactcgtaaatgaccccggtgcagctggcgtccaaagggtgacccagactcgtaaatgatgcccttgtggctggcatccagagggtgccacggggtccttatttattgttttcatctatttgggtacgaagtgtgcaaagtcacagaccttttgcaaagaggtttctagacagcagaagaaaacccctctctcagcgctcatctcacgcagaggatgccaggcagggtgaggatgggggagtagatgccgcttttgcagtggctcgcactgctgtggccactgctgaccactgaggctcccagcggagggtgttcacagccaggtcccgggccacggagctcccttacttgaagttctccttcagcatagattagacgtgatccactttgctttcttgcttctcacctcgcccccttgcacattgcctgacaccctcatattggccagctgtaatctcgtgactatgggactgaggctcaatcttggcttggggtgtttgaatgtctatagcaaaggaattcataatgggaaatctttttcatttgagaaattgtatgatatttattggttgtgtctactgccaacatttatatccaattctaagatttctgaaaaaaaattcttatcccttgctgctcagaaaaagtttacggaaaacaccagttcactaaaagcaccgaaatctgcaaagcctgtcttccgctagaacaacgtctacaaatgtgaagatgatgacttctggcacgcggtcatgagggtggggaatggcactaggagctgatgtttgcctcatttaaagtaggcaagccgagccaactgcagccatcattcattaagttttgggtagtgctctaatggtttgttcactttaataaagacagattttggtaaagtagaatatttttcattctgagcatgtttgtcccaaaaggtgatgcacttaagctgacagtcccttcagtggttttgttaggtcacggcttgtcctgtctggattctgcatctggaagcgctgcatgctctcagaggagcgtgccgtttcccctgtagatggatacttttgttttgttgcctatttaaaaacaattaagtggttatttgcagttatttcagaactccaagtaagtggatggctttgggttctttctgccttggtcccaatggtgttgatgcttctgtggagcgcggacattcccaggagcaggtgcgtgccagccatggctgccagacactgctgcaactgaccagctgccggaagattctggagccactaacattagttttgcacatattttcttgggagtgttacttgaatctatctcaaactgcagaaaaaatcaaaagatcaataattgggagaaaaagagacaaatttaactgttacataattttagatagacaaaaaacatgagtgagtcgtgtacataaggagggaacatggtacagaaggctagaaggaattataggtcttattcccctttcctcagtcctttgaagagaagtacagtctcttgcgattttgtatatatcgtgttcgacacagccgctctctgtcctgtaaatagggaactaaaggctgtatgatttctcaagtgctgagttacacagtcctgagtgagctttctgttaccatactttcacacgtgggctttatttctcactgtatgtttgatatgatattactgtatttattttaagaaagcactaagatgtaataaagtgatgaactaatttgctttacattgaatcgtatgtgtgaggttgctgtggctcatttcgctgaccaggcgacaccaactccttgctttataggagtttcacattgttctttaccatggccctatcgaagtcagtggaattggattctttttaatgaagagctagaaaatatctggcatagagctggaaaattgcattcccatgggacgtctgaatcaattctggattttctccatggaatgagtcagtgtgtggaacatcctgaaacttgtccttaagcgtgtagttttcactgttcgttgcgagtaagcactaatgtggcatggacattcctgatgtcccaagtccccaggccagtgttcgcctaatgattgacagaagcgtccctgcgttcttcatgcttggacacagcaacccttttaattagtcttgaaaagtttcagacacaggattaattttcgtggtggtgcttttgggcctttctggcttgggtggtggtaaagtcatgattttgcagttgataacactgacttataactctgtttatcaatgtctcctatattcaaagcccctgcagtggtatttgtgtctcgttgcaaatttctttcagcggaaagcttgcacaactttcgttgtgtctcagaattctaaccttgttatttaagacaagctgctctacccatttaggatataactttgtaaagaaagtgtaaaccaaatgattcaatgtatgatgaagtttatgtgtaaatccttggtaatgctagaattctgggagcccagaagggttgaaagagaaatgaaacttgcgtgagtcccattattttacgcatgtatgtgcagatacgttctacccacacgtgtgcgtgcacatggctgtgtgcgtgcaccaaagatggactgctttccatgtgtccttttgactttctgcacgtgtcactgcggtgcagtctcttagcagacttcaggcccaaactgtattcttcactcaggcaaaattgaaaagtggaataattctaaattacttctaggttatacttttacctccctgaaattgtagttgtcacttggagggcaaaatatttattgaaataaaattttctgttaaaaattca

SEQ ID NO: 186802 - DNA, 3975 bp, Artificial Sequence
  derived and/or modified sequence
atggccgacagcctgtacaacatcagactgctgagagagttcagcaacgagtacctgaacaagtgcttctacctgaccctggaggacatgctgtacgcccccctggtgctgaagcccaacgtgatggtgttcatcgccgagctgttctggtggttcgagaacgtgaagcccgacttcgtgcagcccagagacgtgcaggagctgaaggacgccaagaccgtgctgcaccagaagagcagcagaccccccgtgcccatcagcaacgccaccaagagaagcttcctgggcagccccgccgccggcaccctggccgagctgcagccccccgtgcagctgcccgccgagggctgccacagacactacctgcaccccgaggagcccgagtacctgggcaagggcaccgccgccttcagccccagccaccccctgctgcccctgagacagaagcagcagaagagcatccagggcgaggacatccccgaccagagacacagaagcaacagcctgaccagagtggacggccagcccagaggcgccgccatcgcctggcccgagaagaagaccagacccgccagccagcccacccccttcgccctgcaccacgccgccagctgcgaggtggaccccagcagcggcgacagcatcagcctggccagaagcatcagcaaggacagcctggccagcaacatcgtgaacctgaccccccagaaccagccccaccccaccgccaccaagagccacggcaagagcctgctgagcaacgtgagcatcgaggacgaggaggaggagctggtggccatcgtgagagccgacgtggtgccccagcaggccgaccccgagttccccagagccagccccagagccctgggcctgaccgccaacgccagaagcccccagggccagctggacaccagcgagagcaagcccgacagcttcttcctggagcccctgatgcccgccgtgctgaagcccgccaaggagaagcaggtgatcaccaaggaggacgagagaggcgagggcagacccagaagcatcgtgagcagaagacccagcgagggcccccagcccctggtgagaagaaagatgaccggcagcagagacctgaacagaaccttcacccccatcccctgcagcgagttccccatgggcatcgaccccaccgagaccggccccctgagcgtggagaccgccggcgaggtgtgcggcggccccctggccctgggcggcttcgaccccttcccccagggccccagcaccgacggcttcttcctgcacgtgggcagagccgacgaggacaccgagggcagactgtacgtgagctgcagcaagagccccaacagccacgacagcgagccctggaccctgctgagacaggacagcgacagcgacgtggtggacatcgaggaggccgagcacgacttcatgggcgaggcccaccccgtggtgttcagcagatacatcggcgaggaggagagcgccaagctgcaggaggacatgaaggtgaaggagcacgaggacaaggacgacgccagcggcagaagcagcccctgcctgagcaccgccagccagatgagcagcgtgagcatggccagcggcagcgtgaagatgaccagcttcgccgagagaaagctgcagagactgaacagctgcgagaccaagagcagcaccagcagcagccagaagaccacccccgacgccagcgagagctgccccgcccccctgaccacctggagacagaagagagagcagagccccagccagcacggcaaggaccccgccagcctgctggccagcgagctggtgcagctgcacatgcagctggaggagaagagaagagccatcgaggcccagaagaagaagatggaggccctgagcgccagacagagactgaagctgggcaaggccgccttcctgcacgtggtgaagaagggcaaggccgaggccgccccccccctgagacccgagcacttcgccaaggagtacagccagcacaacggcgaggactgcggcgacgccgtgagcaagaccgaggacttcctggtgaaggaggagcagagagaggagctgctgcacgagccccaggacgtggacaaggagagcctggccttcgcccagcagcacaaggccaaggaccccgtggccctgcacgagctggagagaaacaaggtgatcagcgccgccctgctggaggacaccgtgggcgaggtggtggacgtgaacgagtgcgacctgagcatcgagaagctgaacgagaccatcagcaccctgcagcaggccatcctgaagatcagccagcagcaggagcagctgctgatgaagagccccaccgtgcccgtgcccggcagcaagaacaacagccaggaccacaaggtgaaggcccccgtgcacttcgtggagcccctgagccccaccggcgtggccggccacagaaaggcccccagactgggccagggcagaaacagcagaagcggcagacccgccgagctgaaggtgcccaaggacagaccccagggcagcagcagaagcaagacccccacccccagcgtggagaccctgccccacctgagacccttccccgccagcagccaccccagaacccccaccgaccccggcctggacagcgccctggagcccagcggcgacccccacggcaagtgcctgttcgacagctacagactgcacgacgagagcaaccagagaaccctgaccctgagcagcagcaaggacgccaacatcctgagcgagcagatgagcctgaaggaggtgctggacgccagcgtgaaggaggtgggcagcagcagcagcgacgtgagcggcaaggagagcgtgcccgtggaggagcccctgagaagcagagccagcctgatcgaggtggacctgagcgacctgaaggcccccgacgaggacggcgagctggtgagcctggacggcagcgccgacctggtgagcgagggcgaccagaagcccggcgtgggcttcttcttcaaggacgagcagaaggccgaggacgagctggccaagaagagagccgccttcctgctgaagcagcagagaaaggccgaggaggccagagtgagaaagcagcagctggaggccgaggtggagctgaagagagacgaggccagaagaaaggccgaggaggacagagtgagaaaggaggaggagaaggccagaagagagctgatcaagcaggagtacctgagaagaaagcagcagcagatcctggaggagcagggcctgggcaagcccaagagcaagcccaagaagcccagacccaagagcgtgcacagagaggagagctgcagcgacagcggcaccaagtgcagcagcacccccgacaacctgagcagaacccagagcggcagcagcctgagcctggccagcgccgccaccaccgagcccgagagcgtgcacagcggcggcacccccagccagagagtggagagcatggaggccctgcccatcctgagcagaaaccccagcagaagcaccgacagagactgggagaccgccagcgccgccagcagcctggccagcgtggccgagtacaccggccccaagctgttcaaggagcccagcagcaagagcaacaagcccatcatccacaacgccatcagccactgctgcctggccggcaaggtgaacgagccccacaagaacagcatcctggaggagctggagaagtgcgacgccaaccactacatcatcctgttcagagacgccggctgccagttcagagccctgtactgctactaccccgacaccgaggagatctacaagctgaccggcaccggccccaagaacatcaccaagaagatgatcgacaagctgtacaagtacagcagcgacagaaagcagttcaacctgatccccgccaagaccatgagcgtgagcgtggacgccctgaccatccacaaccacctgtggcagcccaagagacccgccgtgcccaagaaggcccagaccagaaagtag

SEQ ID NO: 186803 - DNA, 4809 bp, Artificial Sequence
  derived and/or modified sequence
atggtggacgccagcggcagagccgccgccgagggctggagaaagatggaggccccccccgacggcgccgccgacctggtgcccctggacagatacgacgccgccagagccaagatcgccgccaacctgcagtggatctgcgccaaggcctacggcagagacaacatccccgaggacctgagagaccccttctacgtggaccagtacgagcaggagcacatcaagccccccgtgatcaagctgctgctgagcagcgagctgtactgcagagtgtgcagcctgatcctgaagggcgaccaggtggccgccctgcagggccaccagagcgtgatccaggccctgagcagaaagggcatctacgtgatggagagcgacgacacccccgtgaccgagagcgacctgagcagagcccccatcaagatgagcgcccacatggccatggtggacgccctgatgatggcctacaccgtggagatgatcagcatcgagaaggtggtggccagcgtgaagagattcagcaccttcagcgccagcaaggagctgccctacgacctggaggacgccatggtgttctggatcaacaaggtgaacctgaagatgagagagatcaccgagaaggaggtgaagctgaagcagcagctgctggagagccccgcccaccagaaggtgagatacagaagagagcacctgagcgccagacagagcccctacttccccctgctggaggacctgatgagagacggcagcgacggcgccgccctgctggccgtgatccactactactgccccgagcagatgaagctggacgacatctgcctgaaggaggtgaccagcatggccgacagcctgtacaacatcagactgctgagagagttcagcaacgagtacctgaacaagtgcttctacctgaccctggaggacatgctgtacgcccccctggtgctgaagcccaacgtgatggtgttcatcgccgagctgttctggtggttcgagaacgtgaagcccgacttcgtgcagcccagagacgtgcaggagctgaaggacgccaagaccgtgctgcaccagaagagcagcagaccccccgtgcccatcagcaacgccaccaagagaagcttcctgggcagccccgccgccggcaccctggccgagctgcagccccccgtgcagctgcccgccgagggctgccacagacactacctgcaccccgaggagcccgagtacctgggcaagggcaccgccgccttcagccccagccaccccctgctgcccctgagacagaagcagcagaagagcatccagggcgaggacatccccgaccagagacacagaagcaacagcctgaccagagtggacggccagcccagaggcgccgccatcgcctggcccgagaagaagaccagacccgccagccagcccacccccttcgccctgcaccacgccgccagctgcgaggtggaccccagcagcggcgacagcatcagcctggccagaagcatcagcaaggacagcctggccagcaacatcgtgaacctgaccccccagaaccagccccaccccaccgccaccaagagccacggcaagagcctgctgagcaacgtgagcatcgaggacgaggaggaggagctggtggccatcgtgagagccgacgtggtgccccagcaggccgaccccgagttccccagagccagccccagagccctgggcctgaccgccaacgccagaagcccccagggccagctggacaccagcgagagcaagcccgacagcttcttcctggagcccctgatgcccgccgtgctgaagcccgccaaggagaagcaggtgatcaccaaggaggacgagagaggcgagggcagacccagaagcatcgtgagcagaagacccagcgagggcccccagcccctggtgagaagaaagatgaccggcagcagagacctgaacagaaccttcacccccatcccctgcagcgagttccccatgggcatcgaccccaccgagaccggccccctgagcgtggagaccgccggcgaggtgtgcggcggccccctggccctgggcggcttcgaccccttcccccagggccccagcaccgacggcttcttcctgcacgtgggcagagccgacgaggacaccgagggcagactgtacgtgagctgcagcaagagccccaacagccacgacagcgagccctggaccctgctgagacaggacagcgacagcgacgtggtggacatcgaggaggccgagcacgacttcatgggcgaggcccaccccgtggtgttcagcagatacatcggcgaggaggagagcgccaagctgcaggaggacatgaaggtgaaggagcacgaggacaaggacgacgccagcggcagaagcagcccctgcctgagcaccgccagccagatgagcagcgtgagcatggccagcggcagcgtgaagatgaccagcttcgccgagagaaagctgcagagactgaacagctgcgagaccaagagcagcaccagcagcagccagaagaccacccccgacgccagcgagagctgccccgcccccctgaccacctggagacagaagagagagcagagccccagccagcacggcaaggaccccgccagcctgctggccagcgagctggtgcagctgcacatgcagctggaggagaagagaagagccatcgaggcccagaagaagaagatggaggccctgagcgccagacagagactgaagctgggcaaggccgccttcctgcacgtggtgaagaagggcaaggccgaggccgccccccccctgagacccgagcacttcgccaaggagtacagccagcacaacggcgaggactgcggcgacgccgtgagcaagaccgaggacttcctggtgaaggaggagcagagagaggagctgctgcacgagccccaggacgtggacaaggagagcctggccttcgcccagcagcacaaggccaaggaccccgtggccctgcacgagctggagagaaacaaggtgatcagcgccgccctgctggaggacaccgtgggcgaggtggtggacgtgaacgagtgcgacctgagcatcgagaagctgaacgagaccatcagcaccctgcagcaggccatcctgaagatcagccagcagcaggagcagctgctgatgaagagccccaccgtgcccgtgcccggcagcaagaacaacagccaggaccacaaggtgaaggcccccgtgcacttcgtggagcccctgagccccaccggcgtggccggccacagaaaggcccccagactgggccagggcagaaacagcagaagcggcagacccgccgagctgaaggtgcccaaggacagaccccagggcagcagcagaagcaagacccccacccccagcgtggagaccctgccccacctgagacccttccccgccagcagccaccccagaacccccaccgaccccggcctggacagcgccctggagcccagcggcgacccccacggcaagtgcctgttcgacagctacagactgcacgacgagagcaaccagagaaccctgaccctgagcagcagcaaggacgccaacatcctgagcgagcagatgagcctgaaggaggtgctggacgccagcgtgaaggaggtgggcagcagcagcagcgacgtgagcggcaaggagagcgtgcccgtggaggagcccctgagaagcagagccagcctgatcgaggtggacctgagcgacctgaaggcccccgacgaggacggcgagctggtgagcctggacggcagcgccgacctggtgagcgagggcgaccagaagcccggcgtgggcttcttcttcaaggacgagcagaaggccgaggacgagctggccaagaagagagccgccttcctgctgaagcagcagagaaaggccgaggaggccagagtgagaaagcagcagctggaggccgaggtggagctgaagagagacgaggccagaagaaaggccgaggaggacagagtgagaaaggaggaggagaaggccagaagagagctgatcaagcaggagtacctgagaagaaagcagcagcagatcctggaggagcagggcctgggcaagcccaagagcaagcccaagaagcccagacccaagagcgtgcacagagaggagagctgcagcgacagcggcaccaagtgcagcagcacccccgacaacctgagcagaacccagagcggcagcagcctgagcctggccagcgccgccaccaccgagcccgagagcgtgcacagcggcggcacccccagccagagagtggagagcatggaggccctgcccatcctgagcagaaaccccagcagaagcaccgacagagactgggagaccgccagcgccgccagcagcctggccagcgtggccgagtacaccggccccaagctgttcaaggagcccagcagcaagagcaacaagcccatcatccacaacgccatcagccactgctgcctggccggcaaggtgaacgagccccacaagaacagcatcctggaggagctggagaagtgcgacgccaaccactacatcatcctgttcagagacgccggctgccagttcagagccctgtactgctactaccccgacaccgaggagatctacaagctgaccggcaccggccccaagaacatcaccaagaagatgatcgacaagctgtacaagtacagcagcgacagaaagcagttcaacctgatccccgccaagaccatgagcgtgagcgtggacgccctgaccatccacaaccacctgtggcagcccaagagacccgccgtgcccaagaaggcccagaccagaaagtag

SEQ ID NO: 186804 - protein, 170 aa, Artificial Sequence
  derived and/or modified sequence
MAVTGWLESLRTAQKTALLQDGRRKVHYLFPDGKEMAEEYDEKTSELLVRKWRVKSALGAMGQWQLEVGDPAPLGAGNLGPELIKESNANPIFMRKDTKMSFQWRIRNLPYPKDVYSVSVDQKERCIIVRTTNKKRTGWRLLWTPLAMRCAGVHGTPSEIDTSYLWMTPC

SEQ ID NO: 186805 - protein, 117 aa, Artificial Sequence
  derived and/or modified sequence
MAEEYDEKTSELLVRKWRVKSALGAMGQWQLEVGDPAPLGAGNLGPELIKESNANPIFMRKDTKMSFQWRIRNLPYPKDVYSVSVDQKERCIIVRTTNKNTRSQRRLWWPSLSYRRN

SEQ ID NO: 186806 - protein, 203 aa, Artificial Sequence
  derived and/or modified sequence
MAVTGWLESLRTAQKTALLQDGRRKVHYLFPDGKEMAEEYDEKTSELLVRKWRVKSALGAMGQWQLEVGDPAPLGAGNLGPELIKESNANPIFMRKDTKMSFQWRIRNLPYPKDVYSVSVDQKERCIIVRTTNKKYYKKFSIPDLDRHQLPLDDALLSFAHANCTLIISYQKPKEVVVAESELQKELKKVKTAHSNDGDCKTQ

SEQ ID NO: 186807 - protein, 246 aa, Artificial Sequence [sequence omitted]

SEQ ID NO: 186808 - protein, 116 aa, Artificial Sequence
  derived and/or modified sequence
AEEYDEKTSELLVRKWRVKSALGAMGQWQLEVGDPAPLGAGNLGPELIKESNANPIFMRKDTKMSFQWRIRNLPYPKDVYSVSVDQKERCIIVRTTNKNTRSQRRLWWPSLSYRRN

SEQ ID NO: 186809 - DNA, 513 bp, Artificial Sequence
  derived and/or modified sequence
atggccgtgaccggctggctggagagcctgagaaccgcccagaagaccgccctgctgcaggacggcagaagaaaggtgcactacctgttccccgacggcaaggagatggccgaggagtacgacgagaagaccagcgagctgctggtgagaaagtggagagtgaagagcgccctgggcgccatgggccagtggcagctggaggtgggcgaccccgcccccctgggcgccggcaacctgggccccgagctgatcaaggagagcaacgccaaccccatcttcatgagaaaggacaccaagatgagcttccagtggagaatcagaaacctgccctaccccaaggacgtgtacagcgtgagcgtggaccagaaggagagatgcatcatcgtgagaaccaccaacaagaagagaaccggctggagactgctgtggacccccctggccatgagatgcgccggcgtgcacggcacccccagcgagatcgacaccagctacctgtggatgaccccctgctag

SEQ ID NO: 186810 - DNA, 354 bp, Artificial Sequence
  derived and/or modified sequence
atggccgaggagtacgacgagaagaccagcgagctgctggtgagaaagtggagagtgaagagcgccctgggcgccatgggccagtggcagctggaggtgggcgaccccgcccccctgggcgccggcaacctgggccccgagctgatcaaggagagcaacgccaaccccatcttcatgagaaaggacaccaagatgagcttccagtggagaatcagaaacctgccctaccccaaggacgtgtacagcgtgagcgtggaccagaaggagagatgcatcatcgtgagaaccaccaacaagaacaccagaagccagagaagactgtggtggcccagcctgagctacagaagaaactag

SEQ ID NO: 186811 - DNA, 612 bp, Artificial Sequence
  derived and/or modified sequence
atggccgtgaccggctggctggagagcctgagaaccgcccagaagaccgccctgctgcaggacggcagaagaaaggtgcactacctgttccccgacggcaaggagatggccgaggagtacgacgagaagaccagcgagctgctggtgagaaagtggagagtgaagagcgccctgggcgccatgggccagtggcagctggaggtgggcgaccccgcccccctgggcgccggcaacctgggccccgagctgatcaaggagagcaacgccaaccccatcttcatgagaaaggacaccaagatgagcttccagtggagaatcagaaacctgccctaccccaaggacgtgtacagcgtgagcgtggaccagaaggagagatgcatcatcgtgagaaccaccaacaagaagtactacaagaagttcagcatccccgacctggacagacaccagctgcccctggacgacgccctgctgagcttcgcccacgccaactgcaccctgatcatcagctaccagaagcccaaggaggtggtggtggccgagagcgagctgcagaaggagctgaagaaggtgaagaccgcccacagcaacgacggcgactgcaagacccagtag

SEQ ID NO: 186812 - DNA, 741 bp, Artificial Sequence
  derived and/or modified sequence
atggagaccagaagaggcagaagaagaaccttcggcggcgagtgggagagacccgcccccgtgctggtgagcgccagcagacacggcggcgcccagagaagaagctgcggcgagatgggccacggcagaagcagatgcggcgagcccagcggcaacggcggcgtgagccagctgagagtgaagagcagagccggcgccgtgtacagcccctgcacccagctggcccaggccagagagagccagctgggcgccagaagaaagctggagtgccccacccccgcccccagagtgagccccacccccagagtgggccccagagtgggcagcaccaccggccaggccagccaccccggcgtgggcagaaacagacccctgaccagcagagccaacgagagcggcagaagaggcgagggcggccagatggccagaatcgccagcgagagcgccggcagcgaccccctggagagactgccctggcagagactgggcgtgctgctgagcagaggcaagatggccgtgaccggctggctggagagcctgagaaccgcccagaagaccgccctgctgcaggacggcaacagcagagtgcccaccggcagcttcgtgttcttcccccagggccccgccctgagagagggcccccagggcctgggcagacagagctggaagggcctgggcggccagcccggccaggtgctgcacctgcagatgagaagactgagattcaccgagatgacctag

SEQ ID NO: 186813 - DNA, 351 bp, Artificial Sequence
  derived and/or modified sequence
gccgaggagtacgacgagaagaccagcgagctgctggtgagaaagtggagagtgaagagcgccctgggcgccatgggccagtggcagctggaggtgggcgaccccgcccccctgggcgccggcaacctgggccccgagctgatcaaggagagcaacgccaaccccatcttcatgagaaaggacaccaagatgagcttccagtggagaatcagaaacctgccctaccccaaggacgtgtacagcgtgagcgtggaccagaaggagagatgcatcatcgtgagaaccaccaacaagaacaccagaagccagagaagactgtggtggcccagcctgagctacagaagaaactag

SEQ ID NO: 186814 - DNA, 513 bp, Artificial Sequence
  derived and/or modified sequence
atggcagtgactgggtggctggagtccctgagaacagcccagaaaacagcacttctgcaggatggtcgccggaaagtacattacttgtttcctgacggaaaggagatggccgaggagtacgatgaaaaaacatccgagctcctggtgcggaagtggcgggtaaagagcgctttgggcgccatgggccagtggcagctagaggtaggggaccctgcacctcttggtgcaggaaacctggggccagagctcataaaggaatctaacgctaatccgatcttcatgagaaaggacaccaaaatgagcttccaatggcgtattaggaacctaccttatcctaaggatgtgtactccgtttccgtggaccagaaagagcgctgcataatcgtgcgcacaacaaataaaaaacgtacgggctggaggttgctttggactcccttggcaatgaggtgtgctggggttcacggcacccctagtgagattgacacctcctacctgtggatgaccccctgttag

SEQ ID NO: 186815 - DNA, 513 bp, Artificial Sequence
  derived and/or modified sequence
atggcagtcaccggctggctcgaatccctgagaacggcccagaagacggccctgttacaggacggccggaggaaagtccattacctgttccctgacggcaaagagatggctgaggaatacgatgaaaaaacttccgagttactcgtaaggaaatggcgggtcaagtccgcactgggcgccatggggcagtggcagctggaagtgggtgacccagcgcctttgggagctggcaatctcggccctgagcttataaaggagagtaatgctaaccccatcttcatgcggaaagacaccaaaatgtcatttcagtggcgtatcagaaatctcccttatcctaaagacgtgtacagcgtatcagtggatcagaaagagagatgcatcattgttaggactacaaataagaagagaaccggttggaggttgctgtggacccccctggctatgcggtgcgcaggggtccatgggactcccagcgagatcgacacttcatatctgtggatgaccccatgttag

SEQ ID NO: 186816 - DNA, 354 bp, Artificial Sequence
  derived and/or modified sequence
atggcagaagagtatgacgagaagactagtgagctgctcgtacggaagtggagagtgaaatcagcgctgggggcaatggggcagtggcagctcgaggtgggcgacccagcccccctcggagccggaaaccttggcccggaactgatcaaagagtctaacgctaatcccattttcatgcgcaaagacacgaaaatgtcctttcaatggagaattagaaatctgccttatccaaaggacgtgtatagtgtgtccgtagatcagaaggaacgctgcataatcgtcagaactaccaataagaacactcggagccaaaggaggctgtggtggccttccttgagttatcgtcgcaactag

SEQ ID NO: 186817 - DNA, 612 bp, Artificial Sequence
  derived and/or modified sequence
atggcagtaaccggttggctcgagtccctccggactgctcaaaagaccgccctgctgcaggatggcagaagaaaagtccactatttattcccagacgggaaagaaatggctgaggagtatgatgaaaagacatcagaactcttggtgagaaagtggcgtgttaaatctgcactgggagccatgggtcagtggcagttagaggtcggggaccccgcccctctgggggccgggaatctgggcccagaacttataaaggaatctaacgccaaccctatattcatgcgcaaagataccaagatgagcttccagtggagaatccggaatctgccatacccaaaagatgtctactcagtgtccgtcgaccaaaaggaacgctgtatcattgtgaggacaacgaataaaaagtattataaaaagttcagcataccggaccttgacagacaccagctccccctggacgacgccctactttcattcgcacacgcaaattgcactctgatcatttcttatcaaaaaccaaaggaagtggtcgtggcggagtcggagctgcagaaagagctcaaaaaggtgaagacagcccactctaacgatggcgactgtaaaacccagtag

SEQ ID NO: 186818 - DNA, 741 bp, Artificial Sequence
  derived and/or modified sequence
atggaaactagaagaggccggagaaggacgtttggaggcgagtgggagaggcccgcaccagtgctggtgtctgcatcccggcatggaggagctcagagacggagctgtggggaaatggggcatgggcgtagtcgctgcggcgagccatcgggtaatggtggagtgtcccagcttagggtgaagtctagggccggggcagtctattctccgtgtacacagttagctcaggcacgcgaatcacagctcggggctcggcgaaagctggaatgccctaccccagctccacgtgtgtccccaactcccagagtcggcccacgggtgggcagcacaaccggtcaggctagtcaccctggcgtaggcagaaaccgtccccttacatcccgggccaatgagtccgggcgacgaggagaggggggccagatggctcgcattgcctccgagtccgccgggagcgaccctctggagcgtctgccctggcagagactgggggttctcctcagccgtggaaaaatggccgttaccggatggctggagagtttacgcacggcccagaagaccgcactgctccaagatggcaatagccgtgtccccacaggcagcttcgtgttttttccccaaggacccgcactgcgggaaggaccgcaaggcttgggaaggcaaagctggaaaggtctgggtggccagcctggtcaggttctccatctgcagatgcgacgccttcggttcaccgagatgacctag

SEQ ID NO: 186819 - DNA, 351 bp, Artificial Sequence
  derived and/or modified sequence
gcagaggagtacgacgaaaagacctctgagctgttggtacggaaatggagggtcaaatccgccttaggtgccatgggacagtggcagctggaggtgggcgaccccgcgccactgggtgctggcaacctgggtcctgagctgatcaaagagagtaatgcgaaccctattttcatgaggaaggacaccaagatgtctttccagtggcggatccgaaacctgccctaccctaaagacgtatatagcgtctccgtggatcagaaggaacggtgcatcatagtgcgcacaacaaacaagaacactagatcgcagagaaggctgtggtggcctagcctttcctacaggcgaaactag

SEQ ID NO: 186820 - DNA, 641 bp, Artificial Sequence
  derived and/or modified sequence
agcaggggaaagatggcggtgacgggctggttggagagtctgcggacagcccagaagactgcgctgctgcaggacgggagaaggaaggttcactatttattcccagacggcaaggaaatggctgaagaatatgacgagaagacgagtgaactacttgtgagaaagtggcgtgtgaaaagtgccctgggagccatgggccagtggcagcttgaagtaggagacccagcgcccctaggagcagggaacctggggcctgaactcatcaaggaaagcaatgccaatcctatcttcatgcgcaaggacaccaagatgagtttccagtggcggattcgaaacctcccctatcctaaggatgtctatagtgtctctgtggaccagaaggagcgctgcatcattgtcagaacaaccaacaagaagcggactggttggaggcttctctggacccctctggccatgcggtgtgcaggtgtgcatggcaccccctctgagatagacaccagctacctctggatgacgccttgctgagctttgcccacgccaactgcaccctgatcatctcttaccagaagccaaaggaggttgtggtggccgagtctgagctacagaaggaactaaagaaggtgaagacagcccacagcaac

SEQ ID NO: 186821 - DNA, 518 bp, Artificial Sequence
  derived and/or modified sequence
gaaagatggcggtgacgggctggttggagagtctgcggacagcccagaagactgcgctgctgcaggacgggagaaggaaggttcactatttattcccagacggcaaggaaatggctgaagaatatgacgagaagacgagtgaactacttgtgagaaagtggcgtgtgaaaagtgccctgggagccatgggccagtggcagcttgaagtaggagacccagcgcccctaggagcagggaacctggggcctgaactcatcaaggaaagcaatgccaatcctatcttcatgcgcaaggacaccaagatgagtttccagtggcggattcgaaacctcccctatcctaaggatgtctatagtgtctctgtggaccagaaggagcgctgcatcattgtcagaacaaccaacaagaagcggactggttggaggcttctctggacccctctggccatgcggtgtgcaggtgtgcatggcaccccctctgagatagacaccagctacctctggatgacgccttgctga

SEQ ID NO: 186822 - DNA, 695 bp, Artificial Sequence
  derived and/or modified sequence
gaaagatggcggtgacgggctggttggagagtctgcggacagcccagaagactgcgctgctgcaggacgggagaaggaaggttcactatttattcccagacggcaaggaaatggctgaagaatatgacgagaagacgagtgaactacttgtgagaaagtggcgtgtgaaaagtgccctgggagccatgggccagtggcagcttgaagtaggagacccagcgcccctaggagcagggaacctggggcctgaactcatcaaggaaagcaatgccaatcctatcttcatgcgcaaggacaccaagatgagtttccagtggcggattcgaaacctcccctatcctaaggatgtctatagtgtctctgtggaccagaaggagcgctgcatcattgtcagaacaaccaacaagaataccagaagccaaaggaggttgtggtggccgagtctgagctacagaaggaactaaagaaggtgaagacagcccacagcaacgatggggactgcaagacccagtagttggcccctgagccttatacctccaccacagggggtgccgtgagacttcaaggcttggcccttcttgaccacggcagcctcctgtcttctaggagctatcaagggtctctaagaactgggcatggggcactcctagccagtgagtcatggtcatatttcctgagtaaagtcattctgagtt

SEQ ID NO: 186823 - DNA, 858 bp, Artificial Sequence
  derived and/or modified sequence
ggaacggttgccatggcagcggctgggcgtgctgcttagcaggggaaagatggcggtgacgggctggttggagagtctgcggacagcccagaagactgcgctgctgcaggacgggagaaggaaggttcactatttattcccagacggcaaggaaatggctgaagaatatgacgagaagacgagtgaactacttgtgagaaagtggcgtgtgaaaagtgccctgggagccatgggccagtggcagcttgaagtaggagacccagcgcccctaggagcagggaacctggggcctgaactcatcaaggaaagcaatgccaatcctatcttcatgcgcaaggacaccaagatgagtttccagtggcggattcgaaacctcccctatcctaaggatgtctatagtgtctctgtggaccagaaggagcgctgcatcattgtcagaacaaccaacaagaagtactacaagaagttctccattcctgatctagatagacaccagctacctctggatgacgccttgctgagctttgcccacgccaactgcaccctgatcatctcttaccagaagccaaaggaggttgtggtggccgagtctgagctacagaaggaactaaagaaggtgaagacagcccacagcaacgatggggactgcaagacccagtagttggcccctgagccttatacctccaccacagggggtgccgtgagacttcaaggcttggcccttcttgaccacggcagcctcctgtcttctaggagctatcaagggtctctaagaactgggcatggggcactcctagccagtgagtcatggtcatatttcctgagtaaagtcattctgagttacttactgcacaggga

SEQ ID NO: 186824 - DNA, 369 bp, Artificial Sequence
  derived and/or modified sequence
gctgaagaatatgacgagaagacgagtgaactacttgtgagaaagtggcgtgtgaaaagtgccctgggagccatgggccagtggcagcttgaagtaggagacccagcgcccctaggagcagggaacctggggcctgaactcatcaaggaaagcaatgccaatcctatcttcatgcgcaaggacaccaagatgagtttccagtggcggattcgaaacctcccctatcctaaggatgtctatagtgtctctgtggaccagaaggagcgctgcatcattgtcagaacaaccaacaagaataccagaagccaaaggaggttgtggtggccgagtctgagctacagaaggaactaaagaaggtgaagacagccc

SEQ ID NO: 186825 - DNA, 513 bp, Artificial Sequence
  derived and/or modified sequence
atggctgtgacaggctggctggagagcctgaggacagcccagaagacagccctgctgcaggatggaagaaggaaggtgcactacctgttcccagatggcaaggagatggccgaggagtatgatgagaagaccagcgagctgctggtgaggaagtggagggtgaagagcgccctgggcgccatgggccagtggcagctggaggtgggggaccctgcccccctgggcgccggcaacctgggccctgagctgatcaaggagagcaatgccaaccccatcttcatgaggaaggacaccaagatgtccttccagtggaggatccggaacctgccctaccccaaggatgtgtacagcgtgtctgtggaccagaaggagcgctgcatcatcgtgaggaccaccaacaagaagaggacaggctggaggctgctgtggacccccctggccatgagatgtgccggcgtgcacggcacccccagcgagattgacaccagctacctgtggatgaccccctgctag

SEQ ID NO: 186826 - DNA, 354 bp, Artificial Sequence
  derived and/or modified sequence
atggccgaggagtatgatgagaagaccagcgagctgctggtgaggaagtggagggtgaagagcgccctgggcgccatgggccagtggcagctggaggtgggggaccctgcccccctgggcgccggcaacctgggccctgagctgatcaaggagagcaatgccaaccccatcttcatgaggaaggacaccaagatgtccttccagtggaggatccggaacctgccctaccccaaggatgtgtacagcgtgtctgtggaccagaaggagcgctgcatcatcgtgaggaccaccaacaagaacaccaggagccagaggcggctgtggtggcccagcctgagctacagaagaaattag

SEQ ID NO: 186827 - DNA, 612 bp, Artificial Sequence
  derived and/or modified sequence
atggctgtgacaggctggctggagagcctgaggacagcccagaagacagccctgctgcaggatggaagaaggaaggtgcactacctgttcccagatggcaaggagatggccgaggagtatgatgagaagaccagcgagctgctggtgaggaagtggagggtgaagagcgccctgggcgccatgggccagtggcagctggaggtgggggaccctgcccccctgggcgccggcaacctgggccctgagctgatcaaggagagcaatgccaaccccatcttcatgaggaaggacaccaagatgtccttccagtggaggatccggaacctgccctaccccaaggatgtgtacagcgtgtctgtggaccagaaggagcgctgcatcatcgtgaggaccaccaacaagaagtactacaagaagttcagcatcccagacctggacagacaccagctgcccctggatgatgccctgctgagctttgcccacgccaactgcaccctcatcatctcctaccagaagcccaaggaggtggtggtggccgagagcgagctgcagaaggagctgaagaaggtgaagacagcccacagcaatgatggagactgcaagacccagtag

SEQ ID NO: 186828 - DNA, 741 bp, Artificial Sequence
  derived and/or modified sequence
atggagacccggcggggcagaagaaggacctttggaggagagtgggagaggcctgcccctgtgctggtgtctgccagccgccacggcggggcccagaggaggagctgtggggagatgggccacggccgcagccgctgtggggagcccagcggaaatggaggagtgtcccagctgcgggtgaagagccgggccggggctgtgtacagcccctgcacccagctggcccaggcccgggagagccagctgggcgcccggaggaagctggagtgccccaccccagccccccgggtgagccccaccccccgggtgggcccccgggtgggcagcaccaccggccaggccagccaccctggggtgggcaggaaccggcccctgaccagccgggccaatgaaagtggccggcggggggagggcggccagatggcccgcatcgccagcgagagcgctggcagtgaccccctggagcggctgccctggcagaggctgggcgtgctgctgagccggggcaagatggctgtgacaggctggctggagagcctgaggacagcccagaagacagccctgctgcaggacggcaacagccgggtgcccaccggcagctttgtgttcttcccccagggccctgccctgcgggagggcccccagggcctgggccggcagagctggaagggcctgggcggccagcccggccaggtgctgcacctgcagatgaggcggctgcgcttcacagagatgacctag

SEQ ID NO: 186829 - DNA, 351 bp, Artificial Sequence
  derived and/or modified sequence
gctgaggagtatgatgagaagaccagcgagctgctggtgaggaagtggagggtgaagagcgccctgggcgccatgggccagtggcagctggaggtgggggaccctgcccccctgggcgccggcaacctgggccctgagctgatcaaggagagcaatgccaaccccatcttcatgaggaaggacaccaagatgtccttccagtggaggatccggaacctgccctaccccaaggatgtgtacagcgtgtctgtggaccagaaggagcgctgcatcatcgtgaggaccaccaacaagaacaccaggagccagaggcggctgtggtggcccagcctgagctacagaagaaattag

SEQ ID NO: 186830 - DNA, 513 bp, Artificial Sequence
  derived and/or modified sequence
atggccgtgaccggctggctggagagcctgcggaccgcccagaagacggcgcttctgcaggacggtcgtcgcaaggttcattaccttttcccagacggaaaagagatggccgaagaatacgacgaaaagacatccgagctgttagtaagaaaatggagggtgaaatccgcccttggcgctatggggcagtggcagctcgaggtgggggacccagcccccctgggggctgggaatttgggcccagaactgattaaggaatccaatgcaaatcccattttcatgagaaaggacacaaaaatgagcttccaatggaggattaggaatctgccttatcccaaggatgtgtatagtgtgtctgtggaccaaaaggagagatgcattatagtgagaaccactaataaaaaaagaacaggctggagactgttgtggacgccgttggctatgcggtgtgccggcgtgcacggcacaccttccgaaattgatactagctacctttggatgacaccctgttag

SEQ ID NO: 186831 - DNA, 513 bp, Artificial Sequence
  derived and/or modified sequence
atggccgtgaccggctggctggagagcctgcggaccgcccagaagaccgccttgctgcaggacggtagacggaaagtgcattacctgtttccagacggaaaggagatggccgaggaatatgatgagaaaacgtcagaactgcttgtgaggaagtggcgggtgaagtcagccctgggcgcaatggggcagtggcagctggaagtcggcgatcccgcgccactaggtgcaggtaatctgggtcccgaactgataaaagagtccaatgccaaccccatatttatgaggaaagataccaaaatgtcattccaatggcgtattaggaatcttccataccccaaagacgtgtacagcgtcagcgttgatcagaaagaacgatgcattattgtacgaacaaccaataagaaacgcaccgggtggcgtctcctttggaccccactggcgatgcggtgcgctggggtccatggtacgcccagtgaaattgatactagctacctatggatgacaccatgttag

SEQ ID NO: 186832 - DNA, 354 bp, Artificial Sequence
  derived and/or modified sequence
atggccgaggagtacgacgagaagaccagcgagctgctggtgcggaaatggcgggtcaaatcggctctcggagcaatggggcaatggcagctggaggtgggagaccctgcacccctaggagccggcaatctcggcccagagctcatcaaggagtccaatgccaacccaatttttatgcggaaagacactaaaatgtcttttcagtggcggattcggaacctgccgtaccctaaggacgtctatagcgtatccgtggaccagaaagagaggtgcattattgtcagaacaaccaataagaacactcgttcacaaagaagactttggtggccctcactgtcctacagacgtaactag

SEQ ID NO: 186833 - DNA, 612 bp, Artificial Sequence
  derived and/or modified sequence
atggccgtgaccggctggctggagagcctgcggaccgcccagaagacagccctgttacaggatgggagaagaaaggtgcattatctcttcccggacggcaaagaaatggctgaggagtatgatgagaaaaccagtgagttactggtgagaaagtggagggtgaaaagcgcccttggtgctatggggcagtggcagctcgaggtcggagacccagctccgctaggggctggcaatctgggtcctgagctcattaaggagtccaatgcaaatcctatctttatgcgcaaggacacaaagatgagtttccagtggaggattcgcaacctcccctatccgaaggacgtgtacagcgtgtccgtcgaccagaaggaacgatgcataatcgttcgtacaactaataaaaaatactacaaaaagttcagtattcccgatctcgacagacaccagctcccgcttgatgacgctctcctgtctttcgcccacgctaattgcaccctgattatttcttaccagaagcctaaggaagttgtggtggccgagtcagagctgcagaaagaattgaagaaggtaaagaccgcccatagtaacgatggcgactgcaagacgcagtag

SEQ ID NO: 186834 - DNA, 741 bp, Artificial Sequence
  derived and/or modified sequence
atggagacccggcggggccggcggcggaccttcggcggcgagtgggaacgaccagcgccagttctcgtcagtgcttcgaggcacgggggcgcgcagcgacggtcgtgcggcgaaatgggtcacggtagaagccgttgcggcgagccatctggcaacggcggcgtcagccagttgagagtgaagagcagagcaggggctgtatactctccttgtactcagcttgcacaggcccgtgagtcacagcttggcgcgagaagaaagctcgagtgtcctacccccgccccacgtgtgagcccaacgccccgcgtgggcccccgggttggttcaacaaccgggcaggcctcccatcctggggtgggccgtaatcgcccccttaccagtcgggccaatgagagcggtcgaaggggggagggcggacagatggcccgcatcgcatctgaaagcgcaggtagcgacccattggagcggctgccctggcagcgcctcggggtgctcctctcaagaggcaaaatggcggtgacaggctggttggagtcactgaggaccgcacagaagactgcactgctacaggacggcaattccagggtgcccaccgggagcttcgtgttttttccacagggcccggccctgagagagggtccgcagggcttaggaagacagtcatggaaaggattgggcggccaacctggccaggtactccacctccagatgagaaggcttcgcttcaccgagatgacttag

SEQ ID NO: 186835 - DNA, 351 bp, Artificial Sequence
  derived and/or modified sequence
gccgaggagtacgacgagaagaccagcgagctgctggtgcggaagtggagggtgaagagtgccttaggtgctatgggccagtggcagttggaagtgggtgatcccgcccccctgggggcgggtaatctcgggcctgagctgattaaagagtccaatgcaaatccaatctttatgaggaaagacacaaagatgtcatttcagtggcggatacgaaacctgccctatcctaaggatgtgtactcagtgtctgtggatcagaaggagcgctgcattattgttcggacaaccaacaagaatacccgctcacagagaaggctgtggtggccctcgctgagctacaggcgcaactag

SEQ ID NO: 186836 - DNA, 513 bp, Artificial Sequence
  derived and/or modified sequence
atggccgtgacaggctggctggagtcactccgtaccgcccagaagacggcactgctgcaagacggaaggagaaaagtgcactacctgtttcctgacgggaaagaaatggcggaagaatacgacgagaagacgtcggagcttttagtgcggaaatggagagtgaagtccgcgctgggtgccatgggtcagtggcagttggaagtgggagatcccgctccactgggagctggcaatcttggcccagagctgattaaagagtctaacgcaaacccaatttttatgcgcaaggacacaaagatgtcattccaatggcgcatcagaaacttgccgtatccaaaagacgtctacagcgtctcagtggaccagaaagagcgttgtattattgttaggacaactaacaagaaacggaccggatggagattgctatggactcccctagctatgcgctgcgccggtgtacacgggaccccctccgagatcgacacctcctacctgtggatgacgccttgttag

SEQ ID NO: 186837 - DNA, 513 bp, Artificial Sequence
  derived and/or modified sequence
atggccgtgacaggctggcttgagtctctgcggactgcacagaaaacagccttattgcaagatggtcgacggaaagtgcattatttattcccagacggcaaggagatggccgaagagtacgacgagaaaacttcggagctattagtccggaagtggcgagtgaagagtgcccttggagctatgggacagtggcagcttgaggtgggagacccagctccccttggggcaggcaatctcgggccagagcttattaaggagtctaatgctaaccctatctttatgaggaaggacaccaaaatgagctttcagtggaggatcaggaatcttccatatccaaaggacgtatattctgtgagcgtagaccagaaagaacgctgtatcattgtacgtactacaaacaaaaagaggactgggtggcggctattatggacacctctggccatgcgctgcgccggagtacatggaaccccttcggagattgacacgtcttacctgtggatgaccccatgttag

SEQ ID NO: 186838 - DNA, 354 bp, Artificial Sequence
  derived and/or modified sequence
atggctgaggaatacgacgagaagaccagcgaacttctggtccgaaagtggagagtgaagtccgcccttggggctatgggccagtggcagttggaagtcggtgaccccgcacccctgggagcagggaatttaggacccgagttgatcaaggagtctaacgcgaatcccatttttatgcggaaagacactaaaatgtccttccagtggcgaatcagaaacctgccatacccaaaagatgtgtattctgtttctgtggaccaaaaggagcggtgcatcatagtgagaaccacaaataagaataccagatctcagcgccgactgtggtggccctccctctcttaccggagaaactag

SEQ ID NO: 186839 - DNA, 612 bp, Artificial Sequence
  derived and/or modified sequence
atggcagttacaggctggctagagagcctgagaacagcacaaaagaccgccttacttcaggacgggagaaggaaggtacattatttattcccagatggtaaagagatggctgaagagtacgacgagaaaacctccgagttactggtgcggaagtggcgggtaaagagtgctcttggcgcaatgggccaatggcagttggaggtgggcgaccccgctccactcggggctggaaatctggggcctgagctgatcaaggaatctaacgcaaacccaatatttatgagaaaagacacaaagatgagttttcagtggcgcatccggaacctgccttatccaaaggacgtatatagcgtgagcgtggaccaaaaggagcgttgcataatagtcagaacaactaacaagaagtactacaagaagttctccataccagacctggaccggcaccagctccccttggacgacgccctgctttcatttgcacacgctaactgcaccctcattatttcctaccagaagcctaaagaagttgtggttgctgaatctgagcttcaaaaggagctgaaaaaggtcaaaaccgcacattccaatgacggggactgtaaaactcagtag

SEQ ID NO: 186840 - DNA, 741 bp, Artificial Sequence
  derived and/or modified sequence
atggaaacccggaggggccgacgcagaacattcggcggtgaatgggagcggcctgcacccgtgctcgtcagcgctagccgccacggcggtgctcaaagaaggtcctgtggcgagatgggtcatgggagatcccggtgcggagagccgtccggaaacggtggagtgtcacagttgcgagtgaagagtcgagctggcgctgtctacagcccttgtactcagctggcgcaggcgagggagagtcagctcggagccaggcgaaagctcgaatgtccaacccccgcaccgcgagtctctccaaccccacgggtcggccctagggttgggagcacaactggacaggcttcacaccccggagtcggccgtaaccgacctctgacgtctagggccaacgagtcaggcaggcggggagagggtggacaaatggcgcgaattgcctctgaatctgccggtagcgatcctcttgagcggctgccttggcagcgtttgggcgtgctgctgagtcgcggaaagatggctgtgaccggctggctggagtcactgagaacagcgcaaaaaacagcccttcttcaggatggcaactctcgggttcccactggcagttttgtcttcttcccccagggccctgccttacgtgagggaccgcaaggcttggggcgacagagctggaaagggttggggggtcagcccggacaggtgcttcatctgcaaatgagacggctgaggtttacagagatgacatag

SEQ ID NO: 186841 - DNA, 351 bp, Artificial Sequence
  derived and/or modified sequence
gcagaggaatatgacgaaaaaacttcggaacttctggtacgaaagtggcgtgtgaagtctgctcttggggcaatgggccagtggcagcttgaagtcggggatcccgcacccctcggggcaggcaacctgggaccagagctgataaaagagtcgaatgcaaatccaatcttcatgagaaaggacacaaagatgtcattccagtggcggatccgaaacttgccataccccaaggacgtgtattcagtgtcagtggaccagaaggaaagatgcattattgtgaggaccacgaataagaatactagatcacaacgtcgcctgtggtggccttccctctcatacagacgaaattag

SEQ ID NO: 186842 - protein, 580 aa, Artificial Sequence
  derived and/or modified sequence
MFAGLQDLGVANGEDLKETLTNCTEPLKAIEQFQTENGVLLPSLQSALPFLDLHGTPRLEFHQSVFDELRDKLLERVSAIASEGKAEERYKKLEDLLEKSFSLVKMPSLQPVVMCVMKHLPKVPEKKLKLVMADKELYRACAVEVKRQIWQDNQALFGDEVSPLLKQYILEKESALFSTELSVLHNFFSPSPKTRRQGEVVQRLTRMVGKNVKLYDMVLQFLRTLFLRTRNVHYCTLRAELLMSLHDLDVGEICTVDPCHKFTWCLDACIRERFVDSKRARELQGFLDGVKKGQEQVLGDLSMILCDPFAINTLALSTVRHLQELVGQETLPRDSPDLLLLLRLLALGQGAWDMIDSQVFKEPKMEVELITRFLPMLMSFLVDDYTFNVDQKLPAEEKAPVSYPNTLPESFTKFLQEQRMACEVGLYYVLHITKQRNKNALLRLLPGLVETFGDLAFGDIFLHLLTGNLALLADEFALEDFCSSLFDGFFLTASPRKENVHRHALRLLIHLHPRVAPSKLEALQKALEPTGQSGEAVKELYSQLGEKLEQLDHRKPSPAQAAETPALELPLPSVPAPAPL

SEQ ID NO: 186843 - DNA, 1743 bp, Artificial Sequence
  derived and/or modified sequence
atgttcgctgggttacaggatctcggtgtggctaatggcgaggacttaaaggagacgctaacaaattgcacagaaccactaaaagcaattgagcaatttcaaaccgagaatggcgtattactgccgagtctacagtcagccttacccttcctggacctgcacgggacacccaggctcgagtttcaccaatctgtgtttgacgagctgagagataagttgcttgagcgggttagcgcgatcgcctcagaggggaaggctgaagaacggtataaaaagttggaggatctactcgaaaaatcattttctttggtcaagatgcccagcctgcagcccgttgtgatgtgcgtcatgaaacatctgcccaaagtgccagaaaaaaaattgaaactggtgatggctgacaaagagttataccgggcctgcgccgtggaagtgaaacgccaaatttggcaggataatcaagcgctcttcggtgacgaagtctctccccttttgaagcagtatatccttgagaaggagagcgctcttttcagcaccgagcttagcgtcctccataactttttcagcccttctccaaaaacccggaggcagggtgaagtagttcagcgcttgacccggatggtcggtaaaaacgtcaagctatatgacatggtgctgcaatttctgcgtaccctgtttctgcgcacaagaaacgtgcattactgcactctgcgggccgaattgttgatgtctctgcacgatttagatgtaggtgagatttgcactgtcgacccctgccacaagttcacctggtgtctggatgcatgtatccgggaacgcttcgtagattctaaacgagctagagaactccaaggttttctcgatggcgtcaagaagggccaggagcaggtgttaggagatctatcaatgatactgtgcgatccttttgccattaacactttggcattaagcactgtaaggcatctacaagagctggtgggtcaggaaactttgccccgtgatagcccagacctgctgctcctgctgcgccttctggcactgggccagggtgcatgggacatgatcgacagccaagtgtttaaagagcccaagatggaagtggaactgattacacggtttttgccaatgctcatgtcttttctggtcgacgactataccttcaacgtagaccaaaaactgcctgccgaggagaaggcaccagtttcataccctaacacgcttccggagtcttttaccaaattcctgcaggaacagaggatggcctgtgaagtgggcctgtactatgtgctccatatcactaaacaaagaaacaaaaacgcgctgctgcgcttactgcctggcttagtggaaacttttggcgatctggcattcggcgatatctttctacacctccttactggcaatctggctctgctggccgatgaatttgctctggaggacttttgttccagtctgtttgatggcttcttcctgactgccagcccaaggaaagagaacgtgcatcgacacgccttaagattattgatccatctccacccccgggtagcaccatccaagctggaggctttgcagaaggccttggagcccacaggacagtccggcgaggccgtcaaggagctgtactcacaactgggcgaaaaattggaacagcttgatcacagaaagccatcccctgctcaggcagccgagacccctgcattggaactgcctctccctagcgtccccgcgcctgcgccgctgtag

SEQ ID NO: 186844 - DNA, 1743 bp, Artificial Sequence
  derived and/or modified sequence
atgtttgctggcctgcaggacctgggcgtggccaacggggaggacctgaaggagaccctgaccaactgcacagagcccctgaaggccatcgagcagttccagacagaaaatggagtgctgctgcccagcctgcagagcgccctgcccttcctggacctgcacggcaccccccggctggagttccaccagagcgtgtttgatgagctgcgggacaagctgctggagcgggtgtctgccatcgccagcgagggcaaggccgaggagcgctacaagaagctggaggacctgctggagaagagcttcagcctggtgaagatgcccagcctgcagcctgtggtgatgtgtgtgatgaagcacctgcccaaggtgcctgagaagaagctgaagctggtgatggctgacaaggagctgtaccgggcctgtgctgtggaggtgaagaggcagatctggcaggacaaccaggccctgtttggagatgaggtgagccccctgctgaagcagtacatcctggagaaggagagcgccctcttcagcacagagctgtctgtgctgcacaacttcttcagccccagccccaagacccggcggcagggcgaggtggtgcagaggctgaccaggatggtgggcaagaatgtgaagctgtatgacatggtgctgcagttcctgcggaccctcttcctgcggaccagaaatgtgcactactgcaccctgcgggcagagctgctgatgagcctgcatgacctggatgtgggggagatctgcaccgtggacccctgccacaagttcacctggtgcctggatgcctgcatccgggagagatttgtggacagcaagagggcccgggagctgcagggcttcctggatggagtgaagaagggccaggagcaggtgctgggggacctgtccatgatcctgtgtgacccctttgccatcaacaccctggccctgagcacagtgcgccacctgcaggagctggtgggccaggagaccctgccccgggacagcccagacctgctgctgctgctgcggctgctggccctgggccagggcgcctgggacatgattgacagccaggtgttcaaggagcccaagatggaggtggagctgatcacccgcttcctgcccatgctgatgtccttcctggtggatgactacaccttcaacgtggaccagaagctgcctgctgaggagaaggcccctgtgtcctaccccaacaccctgcctgagagcttcaccaagttcctgcaggagcagaggatggcctgtgaggtgggcctgtactacgtgctgcacatcaccaagcagaggaacaagaatgccctgctgcggctgctgcccggcctggtggagaccttcggggacctggcctttggagacatcttcctgcacctgctgaccggcaacctggccctgctggctgatgaatttgccctggaggacttctgcagcagcctgtttgatggcttcttcctgacagccagccccaggaaagaaaatgtgcacagacatgccctgcggctgctgatccacctgcacccccgggtggcccccagcaagctggaggccctgcagaaggccctggagcccaccggccagagcggggaggccgtgaaggagctgtacagccagctgggggagaagctggagcagctggaccacaggaagcccagccctgcccaggccgctgagaccccagccctggagctgcccctgcccagcgtgcctgccccagcccccctgtag

SEQ ID NO: 186845 - DNA, 1743 bp, Artificial Sequence
  derived and/or modified sequence
atgttcgccggcctgcaggacctgggcgtggccaacggcgaggacctcaaggagactttaacgaattgcacagagcccttaaaagctatcgaacagtttcagaccgaaaatggcgtgctgctgccaagtctccagagtgcactgccgtttctggatctccacggtacccccaggctagagtttcaccagagcgtcttcgacgaacttagagacaaattgctggaaagggtaagtgccatcgcaagtgaggggaaagccgaagagagatataaaaagctggaagatctgcttgagaaatctttcagcctagtcaagatgcccagtttgcaaccggttgtaatgtgcgtcatgaagcacctgcctaaggttccagaaaaaaaattaaagctggtgatggcagacaaggaactataccgggcttgtgcggtggaggtgaaacggcagatttggcaggataaccaagccctgtttggagacgaagtgagccccctactcaagcaatatatcttggaaaaagagtctgctctcttcagcacagagctatctgttttgcacaattttttcagcccgtctcctaagacacgacgtcagggagaggtggtccagaggctgaccaggatggttggtaagaatgttaaactgtatgacatggttctccagtttttgcggacgttgtttctgcggactagaaacgtgcactattgcactctgcgggcggagctgctcatgtccctccacgacctggacgtcggcgaaatatgcacggtagacccatgtcacaaattcacctggtgcctggatgcttgcattagagagcggtttgtcgattctaagcgggctcgagaattacaggggttcctggatggggtcaagaaggggcaggagcaggtgctgggagacctgtctatgattctatgtgatccgtttgctattaacacactagctcttagtactgtcaggcatcttcaagagttggtgggacaggaaacccttcccagagactcgcctgatctgctgttgctgctgagactgcttgcattggggcagggggcttgggacatgattgatagccaggtcttcaaggagcccaagatggaagtggagctcatcactagatttctgccgatgctaatgagcttcttggtcgacgactatacattcaacgtcgatcagaagcttcccgccgaagagaaggccccagtgtcctaccctaacaccctgcccgagtcttttaccaagtttctccaggagcagcggatggcgtgcgaggttgggctgtattacgtgctacacattacgaagcagcggaacaagaacgccctgctgaggttgctccctgggctggtggaaacatttggcgacctggcatttggtgatatttttttacacctgctcaccgggaacctggctctgttagctgacgaatttgcactggaggacttctgctcatcactgttcgatgggtttttcctaacagcctccccccgcaaagagaatgtacaccggcatgctttgagactgctgatccatttacaccctcgcgtggcaccatcaaaactggaggccctgcagaaagctctagaaccaaccggccagagcggcgaggcagtgaaggaactgtattctcagctcggtgaaaaacttgaacaactagaccaccgtaagccatccccagcgcaggccgcggagactcctgcgctagaacttcccttgccgagtgttccagcccctgccccactttag

SEQ ID NO: 186846 - DNA, 1743 bp, Artificial Sequence
  derived and/or modified sequence
atgttcgcaggcttgcaggatttgggagtggcaaatggtgaggatctgaaagagacattgactaactgcactgagcccttgaaagccatcgaacagttccagacagaaaacggagtcttgctgccttcgcttcagtccgctttgccatttctggatctgcatggaacaccgaggttggagttccaccagagtgtgttcgatgagctgagagataaactgttggagcgggtgagcgcaattgcatccgagggcaaagccgaagaaagatataagaagctggaggatcttctcgaaaagtctttctccctggtgaaaatgccctcattacagcccgtcgttatgtgcgtgatgaagcatcttccaaaagtgcccgagaaaaagttgaaactggttatggcagacaaggaactataccgcgcatgtgccgtggaagtaaaaagacaaatttggcaagacaatcaagccctctttggcgatgaggtttcccccctattaaagcagtacatcctggaaaaggagagcgccttgttttccacagaactgagcgtcctccataactttttctctccctcacctaaaactaggaggcagggagaagtggtacagagactgacccggatggttgggaagaatgtcaagttatatgacatggtgctacagtttctgagaactctgttcctgcggactaggaatgtacactattgcaccctgcgcgctgaattgctgatgtcattgcatgatttggacgtcggggagatatgcacagtagacccatgccacaaatttacatggtgtctcgatgcttgcatacgagaaaggtttgtggactctaagcgtgcacgcgaacttcaaggtttccttgatggggtgaagaaaggccaagaacaggttctcggcgatctttctatgatactttgtgatccttttgccattaacactctagctttgtccacagtgcgccacttgcaggagctggttggacaagagaccttgcctcgcgactcaccagatctccttcttttgctgcgtctcctggccctcgggcagggagcgtgggacatgattgattcccaggtttttaaagagccgaaaatggaagtggagttgattaccagatttctgcctatgctcatgtcttttctggttgacgactacacctttaatgtggaccagaagttgcccgcagaggagaaggcccctgtgagctatccaaacaccttacccgaaagttttacgaagttcctgcaggagcagcgcatggcctgcgaggtgggcttatattacgtgctacacatcaccaagcaacgcaataaaaatgccctgctaaggctcctgcccggtttggtggaaacgtttggtgatctcgcatttggagatatcttcttgcacctattaacgggaaatcttgcactgcttgctgacgaatttgccctggaagatttctgttctagcctattcgatggttttttcctgactgcttccccacggaaagaaaatgtgcacagacatgctctcaggctgctgatacatttacatcctagggtggccccttctaagctggaagccctgcagaaagctcttgagcccactggccaaagtggagaagctgttaaggaactgtatagccaattaggggagaagctggagcagttggaccatcggaaaccatcccccgctcaggcagccgagacaccagccctagaactgcctcttccttctgtgcctgctccagctccgctctag

SEQ ID NO: 186847 - DNA, 2698 bp, Artificial Sequence
  derived and/or modified sequence
cgggaccgggtgggcgcatgcgcgctgggctggctgggcggggtctctcgcgccgggtgagggcgctgctcccaggaacctgcgcgcggccccggcggcgtttcccgggggccggttggcgggcggacctgggcggtgcggggcggaagtgggcggctgcgggacgcgcgcggagtcgcgcggcgggcgggacctggccgagctggagggcgccggggagcggggctcgggcggtccccgaggcccggcggagcgggcttctggggtgtctgcggcggcgccgggggaacgggctggggatggggcgcctagccgggcggtggccggggcctcggccatgttcgcggggctgcaggacctgggcgtggccaacggcgaggacctgaaggagaccctgaccaactgcacggagccgctcaaggccatcgagcagttccagacagagaatggtgtgctgctgccatctcttcagtcagccctccccttcttggacctgcacgggacgccgcggctggagttccaccagtcggtattcgatgagctgcgggacaagctgctggagcgagtgtcagccatcgcttcggaggggaaggctgaggaaaggtacaagaagctggaagaccttctggagaagagcttttctctggtgaagatgccgtccctgcagcccgtggtgatgtgcgtcatgaagcacctgcccaaggttccggagaaaaaactgaagctggttatggctgacaaggagctgtatcgagcctgcgccgtggaggtgaagcggcagatctggcaagacaaccaggccctcttcggggacgaggtttccccactcctgaagcagtacatcctggagaaggagagcgctctcttcagtacagagctctctgtcctgcacaactttttcagtccttcccccaagaccaggcgccagggcgaggtggtgcagcggctgacgcggatggtggggaagaacgtgaagctgtacgacatggtgctgcagtttctgcgcacgctcttcctgcgcacgcggaatgtgcactactgcacgctgcgggctgagctgctcatgtccctgcacgacctggacgtgggtgaaatctgcaccgtggacccgtgccacaagttcacctggtgcctggacgcctgcatccgagagcggttcgtggacagcaagagggcgcgggagctgcaggggtttctcgatggcgtcaagaagggccaggagcaggtgctgggggacctgtccatgatcctgtgtgaccccttcgccatcaacacgctggcactgagcacagtcaggcacctgcaggagctggtcggccaggagacactgcccagggacagccccgacctcctgctgctgctccggctgctggcgctgggccagggagcctgggacatgatcgacagccaggtcttcaaggagcccaagatggaggtagagctcatcaccaggttcctcccgatgctcatgtccttcctggtggatgactacactttcaatgtggatcagaaacttccggctgaggagaaagccccagtctcatatccaaacacacttcccgaaagcttcactaagtttctgcaggagcagcgcatggcctgcgaggtggggctgtactacgtcctgcacatcaccaagcagaggaacaagaacgcgctcctccgcctgctgcccgggctggtggagacctttggcgacttggcctttggcgacatcttcctccacctgctcacgggcaaccttgcgctgctggccgacgaatttgcccttgaggacttctgcagcagcctcttcgatggcttcttcctcaccgcctctccaaggaaggagaacgtgcaccggcacgcgctgcggctcctcattcacctgcaccccagggtggccccgtctaagctggaggcgttgcagaaggccctggagcctacaggccagagcggagaggcagtgaaggagctttactcccagctcggcgagaagctggaacagctggatcaccggaagcccagcccggcacaggctgcggagacgccggccctggagctgcccctccccagcgtgcccgcccctgccccgctctgagggccctccagacctgctcgggtgctggggccatgccgagtcgcggccctgctcagccggaagaggctcccggacctggatgtacagggcagtctctcttcccggggctatggctgggcctgtcctgccgtcatggccccctgcttcctgctccttggagctggctcccggaccttgcccaccatccatgcagtggctcccagggcagagcctctccttgtactttggcagccatagaaagcgtgctcattttctgttttcctgtgttaggaaaaaaccacctgttttccaaggggagagggcggggcctgagggtgggggcggggcctcttcattggcccagcttggcgaaagcgaggcacactgcttactgccttggggttgtggagatggacccgtgacctcgtggaggccgtgtgggggcagcagcctggcctgtgccatggtgggtgtcctggggcctgtgcggagggagccacctcaccctgcagcccagtttgcaggtgtggccttgtttctccttgcccagcagtgctgccttcagcggccgtgacggggccagctggacacacggtgagattttctcgtatgtaaataaaaggcattttggtaaacgtg

SEQ ID NO: 186848 - DNA, 1743 bp, Artificial Sequence
  derived and/or modified sequence
atgttcgccggcctgcaggacctgggcgtggccaacggcgaggacctgaaggagaccctgaccaactgcaccgagcccctgaaggccatcgagcagttccagaccgagaacggcgtgctgctgcccagcctgcagagcgccctgcccttcctggacctgcacggcacccccagactggagttccaccagagcgtgttcgacgagctgagagacaagctgctggagagagtgagcgccatcgccagcgagggcaaggccgaggagagatacaagaagctggaggacctgctggagaagagcttcagcctggtgaagatgcccagcctgcagcccgtggtgatgtgcgtgatgaagcacctgcccaaggtgcccgagaagaagctgaagctggtgatggccgacaaggagctgtacagagcctgcgccgtggaggtgaagagacagatctggcaggacaaccaggccctgttcggcgacgaggtgagccccctgctgaagcagtacatcctggagaaggagagcgccctgttcagcaccgagctgagcgtgctgcacaacttcttcagccccagccccaagaccagaagacagggcgaggtggtgcagagactgaccagaatggtgggcaagaacgtgaagctgtacgacatggtgctgcagttcctgagaaccctgttcctgagaaccagaaacgtgcactactgcaccctgagagccgagctgctgatgagcctgcacgacctggacgtgggcgagatctgcaccgtggacccctgccacaagttcacctggtgcctggacgcctgcatcagagagagattcgtggacagcaagagagccagagagctgcagggcttcctggacggcgtgaagaagggccaggagcaggtgctgggcgacctgagcatgatcctgtgcgaccccttcgccatcaacaccctggccctgagcaccgtgagacacctgcaggagctggtgggccaggagaccctgcccagagacagccccgacctgctgctgctgctgagactgctggccctgggccagggcgcctgggacatgatcgacagccaggtgttcaaggagcccaagatggaggtggagctgatcaccagattcctgcccatgctgatgagcttcctggtggacgactacaccttcaacgtggaccagaagctgcccgccgaggagaaggcccccgtgagctaccccaacaccctgcccgagagcttcaccaagttcctgcaggagcagagaatggcctgcgaggtgggcctgtactacgtgctgcacatcaccaagcagagaaacaagaacgccctgctgagactgctgcccggcctggtggagaccttcggcgacctggccttcggcgacatcttcctgcacctgctgaccggcaacctggccctgctggccgacgagttcgccctggaggacttctgcagcagcctgttcgacggcttcttcctgaccgccagccccagaaaggagaacgtgcacagacacgccctgagactgctgatccacctgcaccccagagtggcccccagcaagctggaggccctgcagaaggccctggagcccaccggccagagcggcgaggccgtgaaggagctgtacagccagctgggcgagaagctggagcagctggaccacagaaagcccagccccgcccaggccgccgagacccccgccctggagctgcccctgcccagcgtgcccgcccccgcccccctgtag

SEQ ID NO: 186849 - protein, 549 aa, Artificial Sequence
  derived and/or modified sequence
MEFAELIKTPRVDNVVLHRPFYPAVEGTLCLTGHHLILSSRQDNTEELWLLHSNIDAIDKRFVGSLGTIIIKCKDFRIIQLDIPGMEECLNIASSIEALSTLDSITLMYPFFYRPMFEVIEDGWHSFLPEQEFELYSSATSEWRLSYVNKEFAVCPSYPPIVTVPKSIDDEALRKVATFRHGGRFPVLSYYHKKNGMVIMRSGQPLTGTNGRRCKEDEKLINATLRAGKRGYIIDTRSLNVAQQTRAKGGGFEQEAHYPQWRRIHKSIERYHILQESLIKLVEACNDQTHNMDRWLSKLEASNWLTHIKEILTTACLAAQCIDREGASILIHGTEGTDSTLQVTSLAQIILEPRSRTIRGFEALIEREWLQAGHPFQQRCAQSAYCNTKQKWEAPVFLLFLDCVWQILRQFPCSFEFNENFLIMLFEHAYASQFGTFLGNNESERCKLKLQQKTMSLWSWVNQPSELSKFTNPLFEANNLVIWPSVAPQSLPLWEGIFLRWNRSSKYLDEAYEEMVNIIEYNKELQAKVNILRRQLAELETEDGMQESP

SEQ ID NO: 186850 - DNA, 1650 bp, Artificial Sequence
  derived and/or modified sequence
atggagttcgctgagctgatcaagacaccccgcgtggataacgtagttcttcatcgacccttctaccccgctgtagagggtacgctctgtttgaccggacaccatttgattctctcttctaggcaagataataccgaggaactgtggcttctgcactccaacattgacgcaattgacaagcgtttcgttggctccctaggcacaatcatcattaaatgtaaggacttccgcatcatccagctggacatacccggcatggaagaatgcctaaacattgccagcagcattgaagccctgagtaccttggacagcatcactctcatgtaccccttcttttataggccaatgttcgaggtgatcgaagatgggtggcattcttttctgccggagcaggaattcgagctctactcttctgccacttcggagtggcgcttgtcttatgttaacaaggagtttgccgtgtgccccagttatcctcccatagtcaccgtcccaaagagtatcgatgatgaagcgcttcgtaaggtggccaccttcaggcatgggggacgctttcctgtgctctcttattatcataagaagaatgggatggtgatcatgcgttcgggtcagccgcttacagggacgaatgggcgtcgctgcaaagaggatgaaaagcttattaatgccacattgcgggcaggaaagcgaggctatatcatagatacccggtccttgaacgtcgctcagcagacaagggcgaaaggcggaggattcgagcaggaagcacactacccacaatggcgacgaattcacaaatctatcgaacgctatcacatcctacaagagagcttgatcaagctggttgaagcctgcaatgatcaaactcataatatggatcgctggctctccaaactcgaagctagcaactggctcacacacatcaaggagattctgacgacagcctgtcttgcagctcagtgcattgaccgggaaggcgcaagcattctgattcatggtaccgaaggaaccgactctactctgcaagtcacttctctggcccagattatcctggagccaagaagccgcacaatccgtggatttgaagcactcatcgagcgtgagtggctgcaggccggacaccccttccaacagcggtgcgcacaatccgcctactgcaatactaaacagaagtgggaggcccccgtctttcttctcttcctggattgtgtctggcagatactgcgccaatttccctgctccttcgaattcaacgaaaacttccttatcatgctgttcgagcacgcctacgcaagccaattcggaacctttctcgggaataacgagtcagagcggtgcaagcttaagcttcaacagaagacaatgagcctttggagctgggtaaaccagccctcggaactgagtaaatttacgaatccgttgttcgaggccaacaatctggtaatctggccatcggtggcaccacagagtctgcccttgtgggaggggatattcttgcgctggaatcgaagtagcaaatacctggacgaagcatatgaagagatggtcaatattatcgagtacaataaagagctgcaggctaaggtcaatattctgcgaagacagctcgcagaattggaaacggaggatggaatgcaggagtccccctag

SEQ ID NO: 186851 - DNA, 1650 bp, Artificial Sequence
  derived and/or modified sequence
atggagtttgctgagctgatcaagaccccccgggtggacaacgtggtgctgcaccggcccttctacccagctgtggagggcaccctgtgcctgaccggccaccacctgatcctgagcagccggcaggacaacacagaggagctgtggctgctgcacagcaacattgatgccatcgacaagagatttgtgggcagcctgggcaccatcatcatcaagtgcaaggacttccgcatcatccagctggacatccctggcatggaggagtgcctgaacatcgccagcagcattgaggccctgagcaccctggacagcatcaccctgatgtaccccttcttctaccggcccatgtttgaggtgattgaagatggctggcacagcttcctgcctgagcaggagtttgagctgtacagcagcgccaccagcgagtggaggctgtcctatgtgaacaaggagtttgctgtgtgccccagctacccacccatcgtgacagtgcccaagagcattgatgatgaggccctgaggaaggtggccaccttcagacatggaggccgcttccctgtgctgagctactaccacaagaagaatggcatggtgatcatgaggagcggccagcccctgaccggcaccaacggccgccgctgcaaggaggatgagaagctgatcaatgccaccctgcgggccggcaagaggggctacatcatcgacaccaggagcctgaatgtggcccagcagacccgggccaagggcggcggctttgagcaggaggcccactacccccagtggaggcgcatccacaagagcattgaaagataccacatcctgcaggagagcctcatcaagctggtggaggcctgcaatgaccagacccacaacatggaccgctggctgagcaagctggaggccagcaactggctgacccacatcaaggagatcctgaccacagcctgcctggccgcccagtgcatcgaccgggagggcgccagcatcctgatccacggcacagagggcacagacagcaccctgcaggtgaccagcctggcccagatcatcctggagcccaggagcaggaccatccggggctttgaggccctgattgagcgggagtggctgcaggccggccaccccttccagcagagatgtgcccagagcgcctactgcaacaccaagcagaagtgggaggcccctgtgttcctgctcttcctggactgtgtgtggcagatcctgcggcagttcccctgcagctttgagttcaatgaaaacttcctgatcatgctgtttgagcacgcctatgccagccagtttggcaccttcctgggcaacaatgaaagtgagcgctgcaagctgaagctgcagcagaagaccatgagcctgtggagctgggtgaaccagcccagcgagctgagcaagttcaccaaccccctgtttgaggccaacaacctggtgatctggcccagcgtggccccccagagcctgcccctgtgggagggcatcttcctgcgctggaacagaagcagcaagtacctggatgaggcctatgaggagatggtgaacatcatcgagtacaacaaggagctgcaggccaaggtgaacatcctgcggcggcagctggccgagctggagacagaagatggcatgcaggagagcccctag

SEQ ID NO: 186852 - DNA, 1650 bp, Artificial Sequence
  derived and/or modified sequence
atggagttcgccgagctgatcaagaccccccgggtggacaacgtggtcctacaccgcccattctatcccgcagtcgaaggcaccctgtgcttgaccggccaccatctcatactgtctagcagacaagataatactgaggaactatggctgctccactccaacattgacgcgatagataagcgattcgtgggttccctaggtactatcattatcaaatgcaaagactttagaattatccaactcgacatcccagggatggaggagtgcctgaatatcgcctcttccatcgaagctttatctaccctggatagtatcacgctgatgtacccctttttttaccgccccatgtttgaagtgatcgaggacggatggcattcctttctaccggaacaggagttcgagctgtattcctccgcaacttccgagtggcgattaagttatgtcaacaaggaattcgcagtgtgcccttcatatcctcccattgtcacagtacctaagtcgattgatgatgaggccttaagaaaagtggctactttccgtcacggggggcggtttccggtcttaagttattatcacaaaaaaaacggcatggtgattatgagatccgggcaaccactgaccggaaccaacggaagacgctgtaaagaagacgagaagcttatcaatgctactctgcgggctggaaaaaggggttatatcatagacactaggagccttaacgtggctcaacagacgcgagccaagggggggggtttcgaacaggaagcacactacccgcagtggcgaaggatccacaagtctatcgagcggtaccacatcttgcaggagagcttaattaagctggtggaagcctgtaacgatcaaactcataacatggatcgctggctttcaaaactcgaggcttcaaactggctcactcacatcaaagagatactgactacagcttgcttagcagcccagtgtatcgaccgcgagggtgcatccatactgatccatggcaccgagggaaccgattccactttgcaggtcaccagcttggcccagatcatcctggaacctagaagcaggaccatccgcggctttgaggctctcattgagcgggaatggctgcaggcaggccaccccttccagcagcggtgcgcgcagtcagcctactgtaatacgaagcagaaatgggaggcacctgtgttcctgctgtttctggactgtgtttggcagattctccgacagtttccctgttctttcgaattcaatgagaattttctcattatgctgtttgaacacgcctacgccagccagtttggtaccttcctggggaataacgaatccgaaaggtgtaaattgaagctccaacagaagactatgtcactatggtcctgggtaaaccagcccagtgagcttagtaaattcactaatcccttattcgaggctaacaaccttgtcatctggcctagcgttgcaccacaatccctgcctctgtgggaaggaatctttttacgatggaatcgctcctccaagtacctggatgaagcatatgaggagatggttaacatcatcgagtacaataaagagcttcaggcaaaagtgaacattctgcgcaggcaactagctgagctggaaactgaagacggaatgcaggagtccccatag

SEQ ID NO: 186853 - DNA, 7472 bp, Artificial Sequence
  derived and/or modified sequence
gtcttccgagtttcgagacctgctgcttccgcccggagttgttgtgggctccagcagcgagtagccacttccgctaggagtccctagcggccagggcgtggaagcggattctgaggcggctttctcctactgccctccgcttgccaacgcgggacccggagcccaacggcagcggcggtccttgggcctgtggagaggggttctctgtggccgagtcctaggcctggtgaaccgcgcggtgcgggagaggcgcttgggcctcgtccagccccagcccctgtctccccgcggccggtgccggcggctgtaggcctcgccgcgcccacccagcctggggcgggcccagcctcaccgcccggcccgccccgccccacgggccagccccgcgccgggtgtttccgctacttccctgcggcggggtaaccgcctcgcacctaccgggctcggttccctggctccggccgcgggggagcatggagtttgcggagctgattaagaccccgcgggtggacaatgtggtgctgcaccggcctttctacccggctgtcgagggcaccctgtgcctgacgggccaccacttgatcctgtcctcccggcaggacaatacggaggagctgtggctcctccattcaaacatcgacgccatcgacaagcgatttgtaggatcactgggtaccatcatcataaaatgtaaagattttcgaattattcagttggatattcctggaatggaggaatgcttgaatatagccagttccattgaggcattgtctactctggactccatcactctgatgtaccctttcttttaccgtcctatgtttgaagtgatagaagatggctggcattccttccttcctgagcaagaatttgaactctattcttcagctaccagtgaatggaggctaagctatgtcaataaggaatttgctgtctgtccctcttacccaccaattgtcacagtgcccaaatccatcgatgatgaagctcttcggaaggtagctacatttcgacatggagggcgcttcccagtactaagctattaccacaaaaaaaatgggatggtaattatgcgaagtggtcagccactcactggtacaaacgggaggaggtgcaaggaggacgagaagctgataaatgctaccctcagggctggaaagcgtggctacatcattgacacccgatccctgaacgtggctcagcaaactagagccaaaggaggtggctttgaacaagaagctcattatcctcagtggaggcgaattcataagtccattgagaggtatcacattcttcaggagagcttaatcaaacttgtggaagcttgtaatgaccaaacacataacatggaccgatggctcagtaaattggaggcctctaactggctgactcacatcaaagagattctgacaactgcctgcctagcggctcagtgcatcgacagggaaggagcatcaatattgattcacggaacagaaggaactgattccacactccaggtgacctccttggcccagatcatcttagagccaagaagcaggaccattcgtggttttgaggccctgattgaaagagagtggctgcaggctggtcacccattccagcagcgctgtgcacagtcagcctactgtaacaccaagcagaagtgggaggctcctgtatttcttctcttcttggactgcgtgtggcagatccttcgtcagtttccctgttcttttgagtttaatgagaatttcctcatcatgctctttgagcatgcttatgcctcacagtttggaacatttctgggcaacaatgaaagtgaaagatgtaagttgaagctacagcagaagacgatgtctttgtggtcctgggttaatcagcccagtgagctgagtaaattcaccaatcccctctttgaagccaacaaccttgtcatctggccttcagttgctccgcagagtcttccactgtgggaaggtattttcctacgttggaatagatcctctaagtatttggatgaagcatatgaagaaatggttaacatcattgaatataataaagaattacaagcaaaagtcaatatccttcgaaggcagttggcagaactggaaacagaggacgggatgcaggagagtccctgaaaggtctcctcgcacccttcgcaaggaccttcttgggcctgtgtccgccgttctctccttgtgcccttcagttcacttttacacggtagccttgaagtgaaggctttagatgtgggacccccctaatgtaatggatttctcaatactgtatgaataatgaaacttactatcataaaccatgtttcatgtggcctgttagggcctgtcactttgggagccggaaggaggtgctagtcattttatttttacgtgaaatagatgacctatttaatgccatttgtgtttcatgccattttatccaaagctttttctctgtgtccactctccaaacagcattctagagcagtcaaggagacagctaatctctctagggactatttggtggtttaaaaaaagggtcagacttttaaacactctgaccatagaaatgtttttcaaaatggcaacaatggataaaccaaggattttgtgtttaacaatccatttccagtgtcttcgccacataaaatagccattttctttaaaatagttttggactaacgaagctgaaatctattctcattcttgtttgtcaagaaaggaaaatctgttattcaaggtaaattatttctacaagggcaacaggtatggtcctccgatatttacattaagaagagttaaatttattttaacgtagacactaaaagtatgtgcaatatacaattaaagtaggaatttgttactgattgagaattgttactggtgaattggttttcaggttttgagcatacatatacaatgtgtttcaaatgctgcttgtaaaattaaaccatcatctagaatagagttaatttattataatcaagctacaaataggttttcttaaaccagagatgcactgcccttgtctaaagttcttattgcactggtttatatgtgtatgtgtgttttattgtgtgtttttttaatttgtaagtattctaagagtttcctaatactaaggttaaaattttcatgttgacctgagccttttgcaaatttgctttggctctattgatttgtccattatgtgttaggcaaatataacttaagtggagggggaagtttatgaatataatatagctctgtgttttaaacctcagaaacagatttgagtgtttcagtattatagaaacagtgatgactattcatgctctgctagtctatgcctgcaactccaaatgtttgtggttcagtatttcccacctacatttctgtttggtgacattgctcattttaacaaatatgaccgagtctagtttttctttaaaaggatagtttatgagtaatctttaaaaccatttccataccatctgtatataaccatttcggtagagaacacactacactgaaccctgctttagagctgtgtgttgagctaaaaatataattttttaaaaattgactagcaaaatctatggccacactgagaagcctttgaaaatggcaaatacttttcatcaccaattgcccaattcatctttcttctgcttcctcagccttgtagcaaaggctacacagcagcccacagtccacagtctttttgggaaaattggcctgccaccttctttaagctcagtttatttttgacttactttctttgctgtagttatgaaccttggggcattaaaatcccatggcaaggagcataagagatgttctcgtagctctgcgttgtgtgaaatgtccatcttagttttgttaaaaaaaaaaaaaaaaaaaggaaacagcctcacttttttgtgctccctcagaattgcttgctatgtctgttaatacagctgagctttttgttttcttctctttttgtctcaagattgtatatgaaggaggcttttcttctcagctaacaggcatataaggaaaaccatctagagagttttctttagaagtgactcccattagcctggtgtggtggtgtgtgcctatagtcccagccactaggaaagctgaggcagaaggatcccttgagcctaggaggttgaggctgcagtgagctatgatcgcatcagtccactccagcctgagcaacagagcgagaccctgtgtctaagtaaagaaaaagccagaagtgactcccactgcttctgttgatcggccatagggcttccatgggtggaaacttgtgagggagtttgtattaggtctggtcatggagggatgatgtaccatcaaggtagacccatcttcctgatgcacatttgctgtgcgagccagagtacagtcataacacggtattcgcatttcgttttctctgtctcactgagacaacaatctatactgttttggcaagtttgcattttagtattaatttataattagggattgttcaaacttcagatctgtttacaggttgtaaaaataaacttcggtatcagtgcatctacagaagtgttatttggtaatccaaatattagagttttcccaaatccaaaaacggtcagaaataagtccattatcaatataatttgaagaagatttttagtagtactgtgaagttcgtgcttacctggatgagaagaataaatgacacggatacactcctgagaagacactcgttaaacattgcatcggagagctgcctttgataaatgtgctgttaaacacttgaatgaagagaatggtggcagaatgagtgagcaagcagattgccccagaggggccggtaataatcacgtgagggataatcagattcctgcgtattcagcatcttctctattcatgtggagtgaaagctggtttttatacaggagatacgtaaagtaggccccacaaataatatttttaaaatacaaaggatcaccacaatcctctattgaacatataaggatcctcagatttaaataagtactttttttttttttaatcagaagaacattgttgtttgattatatgtttttaaaaacctgaagcttttttggtggcaggacctttcaataaatatttatttggtcaaaattttttattttgattttattaaatgggaagaaagcaagcagaaatagtaaaattcagtaggtttaaaacaatctataaatgtattttatttccaagaaaacttagggtctcaaagcaagattttaaagtgatttttgagaagacttgggggggacaataatagacattcatgtcagatcccatatgggggatttttaaacatttctttgaactttgaggcctgatttaggggtgggattttattgctttttgttttaaaggatgaaattttgtggggttttagtctttgattcagtcagtatttggtttatgttaaataaaaaatcagtatcatggaaaagatatgaccataatttagtctcctcaagtgaaaaacaggagtaatgtttcgttgcactttgaaagatctgcttcaaggcataactcgtgtagttgtctggtttcagggatagctgtttgaattgtcattctaaagtaggtcatcaggttcacttattatccgaccttaatctgggataaaggttttggtatttgcccacttctagatagaatgaatgaaaacaacacaagcgttttatgagcactctttatcagaaaggtatttcctggaccagaaatgggcaatagttacaatagttgatcctctgttctggaagctttgaaatttatcagagaatgaagtcattcagtacatctgataaagttttgttgttgttgttgttgttgttgttttaattgggcaaccctcagaactgaagaggttcagagaactttccaggtttatactatacctcaagaccacatagattagctactgcttattctttcacatgggctaggcctgttctcctcctccagacctagtattctaagttattaccacatagtatttttatgttacccatcatctttaaaaacattataggctgggcatggtggcttacgcctgtaatcccagcactttgggaggccaaggcgggcggatcatgaggtcaggagatcgagaccatcctggctaacacggtgaaaacccatgtctactaaaaatacaaaaaattagccaggtgtggtggcgggcgcctgtagtcccagctactcaggaggctgaggcaggagaatggtgtgaacccgggaggcagagcttgcagtgagccgagatcgcaccactgcactccagcctgggcgaaagggcaagactccatctcaaaaaaaaaaaaaaaaaaagactcatttatccatttacatttattctcagatgataaaatatatactgatactataactttcttatggtatcagttttctttattttcttgaataaaattacttctaccttcatttggtctttataatccactgtccacagcatcttcctttaaaccaatagtcccagaagagaccctctgaaattctaggactggatattaaaatgcctgaacctgttatctaaatcctttttaagaaacttaatgttccagctcttgaactacactgtggaacagtaatttgtgcccaatttagtggaagataatgaggctcactgtaaacactacattgtcctgcaaagtaattctgatgagagtttactgacttctagagccattctctttaaccgtctgcaggtctaaggattaactatatttgtgatttgtaataaaactgagttgtacaacactgcctgtgtttgtctggccaagacatttgcttcacttttaaaatgcacgttatctttggagaggtgaattattctacaaaatgcaccctaaatctcattgtttaaaaccttactgatctaataccatctacacaaaaaaatgttgtagttgcagaacttagtttataaaaacaaagaatgtgtatttcttcaatagccgggtatttggattgttctcttgataatatttgaatgtgactcttggatttaagtgcactattattcatggcttatacaataaaattgcactgtatggcaaatatgtctataatgtatgctttgctgaaacctcaagagtgctgtaaggtacaggtttccatattgtgaacctgtgtacgcacacacacatatacatacagtcttagggaaaaaaaaaagcagaacttttgtaagtctgtgtaacattttaatattgtttgtaatattcactaggtgataatttcccctgtaccctataactgtaatcattcaccttgggttggccggtttgtcaagcttggtttactgaatcaagaaagagtcttgtcgaatgtggtactgttcttagtgtgtaatatttgcgtatggtgttcctctgcctcagaggacagttgcacagatggctagtgttaaatttctatagacgatggtaataaaatctgaatatatttaagtgctaa

SEQ ID NO: 186854 - DNA, 1650 bp, Artificial Sequence
  derived and/or modified sequence
atggaattcgctgagttgatcaagaccccaagagtggacaacgttgttctgcatcgacccttctatcctgcggtcgaggggacactgtgtttgaccggacaccacctgattctctcttctaggcaggataatacggaagaactctggctcctgcacagcaacattgacgctatcgataagcgatttgtcggctcgctgggtacaatcatcattaagtgcaaagactttaggatcatacagctcgatatccctggcatggaagagtgtctgaacattgcaagctcaatcgaagcattaagcacactggactcgatcaccctgatgtacccattcttttatcgcccaatgttcgaggtaatcgaggacggctggcattcattcctcccggaacaggagtttgaactctacagctctgccacgtcagagtggcggctgtcctacgtcaataaggagttcgctgtgtgtccatcttatccccctattgttaccgttcctaagtccattgacgatgaggcccttcggaaggtggcaacgttcagacacggcggtcggtttcctgtgttatcctactatcacaagaagaacggaatggtgattatgcgaagtggccagccactgacaggaaccaacggaagacggtgtaaggaggacgagaaactcatcaacgcgactcttagagcaggcaagcgaggatatataattgatactagatcgctcaacgtcgctcagcagaccagagcgaagggtgggggatttgaacaggaggcgcattatccgcagtggagacgaatccataagtccattgagcgctaccatatcctccaggagtccctcattaagctcgttgaggcctgtaacgatcagacccacaacatggacagatggctaagtaagttagaggctagcaactggctgacccacatcaaagagatactgactacagcgtgcctggcggctcagtgtatcgatagagaaggggcttcaatccttattcacggtaccgagggcaccgactcaaccctgcaagtcactagcttagcccaaattatactggagccccgatctaggaccattagaggattcgaagctttgatagaacgcgaatggctgcaggctggacaccccttccagcagcggtgtgctcagtcagcctattgtaataccaagcaaaaatgggaggcccctgtctttcttcttttcctcgactgtgtgtggcagattctccgccagtttccatgctcttttgaattcaacgagaattttttgattatgctgttcgaacacgcgtacgcctctcagttcggaaccttcctagggaataatgagtctgaacggtgcaagctgaagctgcaacagaaaaccatgtcattatggtcttgggtgaatcaaccctccgaattgtctaagttcacgaacccactctttgaggccaacaacctcgtcatatggccgtccgttgccccacagtccctgcccctgtgggagggaatctttttgcggtggaatcgcagcagcaaatatctggacgaggcgtacgaggagatggtaaacatcatagagtataataaggagctgcaggctaaggtcaatattctgcgccgtcaactggcagagctggaaactgaagacgggatgcaagagtcaccgtag

SEQ ID NO: 186855 - DNA, 1650 bp, Artificial Sequence
  derived and/or modified sequence
atggagttcgccgagctgatcaagacccccagagtggacaacgtggtgctgcacagacccttctaccccgccgtggagggcaccctgtgcctgaccggccaccacctgatcctgagcagcagacaggacaacaccgaggagctgtggctgctgcacagcaacatcgacgccatcgacaagagattcgtgggcagcctgggcaccatcatcatcaagtgcaaggacttcagaatcatccagctggacatccccggcatggaggagtgcctgaacatcgccagcagcatcgaggccctgagcaccctggacagcatcaccctgatgtaccccttcttctacagacccatgttcgaggtgatcgaggacggctggcacagcttcctgcccgagcaggagttcgagctgtacagcagcgccaccagcgagtggagactgagctacgtgaacaaggagttcgccgtgtgccccagctacccccccatcgtgaccgtgcccaagagcatcgacgacgaggccctgagaaaggtggccaccttcagacacggcggcagattccccgtgctgagctactaccacaagaagaacggcatggtgatcatgagaagcggccagcccctgaccggcaccaacggcagaagatgcaaggaggacgagaagctgatcaacgccaccctgagagccggcaagagaggctacatcatcgacaccagaagcctgaacgtggcccagcagaccagagccaagggcggcggcttcgagcaggaggcccactacccccagtggagaagaatccacaagagcatcgagagataccacatcctgcaggagagcctgatcaagctggtggaggcctgcaacgaccagacccacaacatggacagatggctgagcaagctggaggccagcaactggctgacccacatcaaggagatcctgaccaccgcctgcctggccgcccagtgcatcgacagagagggcgccagcatcctgatccacggcaccgagggcaccgacagcaccctgcaggtgaccagcctggcccagatcatcctggagcccagaagcagaaccatcagaggcttcgaggccctgatcgagagagagtggctgcaggccggccaccccttccagcagagatgcgcccagagcgcctactgcaacaccaagcagaagtgggaggcccccgtgttcctgctgttcctggactgcgtgtggcagatcctgagacagttcccctgcagcttcgagttcaacgagaacttcctgatcatgctgttcgagcacgcctacgccagccagttcggcaccttcctgggcaacaacgagagcgagagatgcaagctgaagctgcagcagaagaccatgagcctgtggagctgggtgaaccagcccagcgagctgagcaagttcaccaaccccctgttcgaggccaacaacctggtgatctggcccagcgtggccccccagagcctgcccctgtgggagggcatcttcctgagatggaacagaagcagcaagtacctggacgaggcctacgaggagatggtgaacatcatcgagtacaacaaggagctgcaggccaaggtgaacatcctgagaagacagctggccgagctggagaccgaggacggcatgcaggagagcccctag

SEQ ID NO: 186856 - protein, 541 aa, Artificial Sequence
  derived and/or modified sequence
MLSPQRVAAAASRGADDAMESSKPGPVQVVLVQKDQHSFELDEKALASILLQDHIRDLDVVVVSVAGAFRKGKSFILDFMLRYLYSQKESGHSNWLGDPEEPLTGFSWRGGSDPETTGIQIWSEVFTVEKPGGKKVAVVLMDTQGAFDSQSTVKDCATIFALSTMTSSVQIYNLSQNIQEDDLQQLQLFTEYGRLAMDEIFQKPFQTLMFLVRDWSFPYEYSYGLQGGMAFLDKRLQVKEHQHEEIQNVRNHIHSCFSDVTCFLLPHPGLQVATSPDFDGKLKDIAGEFKEQLQALIPYVLNPSKLMEKEINGSKVTCRGLLEYFKAYIKIYQGEDLPHPKSMLQATAEANNLAAAASAKDIYYNNMEEVCGGEKPYLSPDILEEKHCEFKQLALDHFKKTKKMGGKDFSFRYQQELEEEIKELYENFCKHNGSKNVFSTFRTPAVLFTGIVALYIASGLTGFIGLEVVAQLFNCMVGLLLIALLTWGYIRYSGQYRELGGAIDFGAAYVLEQASSHIGNSTQATVRDAVVGRPSMDKKAQ

SEQ ID NO: 186857 - DNA, 1707 bp, Artificial Sequence
  derived and/or modified sequence
atgagaaccgctggccgggacccagtttccgccggtctccaattcccaaaggatggctccacccagcgccctgctaatagagcacgattcgtgcctgccagaacacgtccgagtcctcttcatccctgttgtttttgcttcgagggcggaggctccatgctatcaccacaaagggtggccgctgccgcttctcggggcgccgacgacgccatggagagcagcaatatactgctgcaggatcacattagagacctagacgtagtggtggtatcggtcgccggagcctttagaaagggcaagagtttcatcctggactttatgctccggtacctgtactcccagaaagaaagtggccacagcaactggttgggagatccagaggagcccctcactggcttctcctggaggggggggagtgatcctgaaacaacaggaatccagatttggagcgaggtcttcaccgtggaaaagcccggcggtaagaaagtggccgttgtacttatggacacccagggggcctttgattcgcagtctactgtcaaggattgcgctaccatttttgctctgagtactatgacctctagtgtgcaaatctataacctgagccagaacatccaggaagacgacctgcagcaactccaactgttcacagaatacggacgcttagccatggacgagatttttcagaaaccattccagaccctcatgttcctggtgagagattggtcctttccttatgagtactcctatggtctgcagggcggcatggcttttttggacaagcgacttcaggtgaaggaacaccaacatgaggagattcagaatgtgcgaaatcacattcattcctgtttcagcgatgtcacatgctttctgctacctcatcctggtttacaggttgccacctctcccgattttgatggcaaactgaaagacatcgcaggagagtttaaagagcagctacaggctctcatcccgtacgtgttgaacccttccaagctcatggagaaagaaatcaatggcagcaaagtcacatgtcgcgggcttctggaatatttcaaggcctatatcaagatatatcagggcgaggacctgccccatccaaagagtatgctccaagccacagcggaggcaaataatctggctgccgctgcctctgcaaaagacatctactataataatatggaagaggtctgtgggggggagaagccttatctcagccctgatatcctagaggagaagcattgcgaatttaaacagttggcactcgatcatttcaagaaaaccaaaaaaatgggcggcaaagacttcagctttcgctatcagcaggaactggaggaggaaattaaggaactctacgagaatttctgcaaacataacggatccaaaaatgttttttctacctttcggaccccagctgtgcttttcacgggaatcgtggccttgtacatagcatccgggctgacgggattcattgggctggaggttgtggcccagttgttcaactgtatggttggactgcttctcatagcgcttctgacatggggatacatcaggtactcagggcagtacagggagctagggggagcaattgacttcggggccgcttacgtgctggagcaggcatctagccacattggaaacagcacacaggccaccgtgagagacgctgttgtggggcgccctagcatggacaagaaggctcaatag

SEQ ID NO: 186858 - DNA, 1626 bp, Artificial Sequence
  derived and/or modified sequence
atgcttagtccccagcgagtggcagccgccgcatccaggggagcagacgatgcaatggagtcgagtaaaccgggacccgtgcaggtggttctcgtacagaaggatcagcattcgtttgagctggacgagaaggcactcgccagcatactactgcaggatcatatcagggacctggatgttgtagtggtgtctgtggcaggggcctttcggaagggcaagagcttcatcctggattttatgctcaggtacctctacagccagaaggagtctgggcatagtaactggctaggcgaccctgaagaaccgttaacgggctttagttggaggggcggaagtgatccagagacgactgggatacagatctggtctgaggtgttcactgtagagaagcctggcggcaaaaaggtggccgttgtgctcatggatactcaaggagccttcgatagtcagagtacagttaaggactgcgctaccatattcgccttgagtactatgacatcatccgtgcagatttacaacctgagtcaaaacattcaggaggatgacctgcaacagctgcagctgttcacagagtacgggcggcttgccatggacgaaattttccagaaaccctttcaaacgctcatgttccttgtgagagactggtcgtttccctatgaatactcttacggcctgcagggaggtatggccttcctggataaacgcctacaggtgaaagaacaccagcacgaggaaattcagaacgttcgtaatcacatacatagttgcttttccgacgttacatgcttcctcctcccccaccccgggttacaggtcgccacatcccccgacttcgatggcaagctaaaggacatagctggagaattcaaggaacaactccaggccctgataccttatgtgctgaatcccagtaagctgatggagaaggagatcaacggtagcaaggtcacatgccgcggcctcctcgagtactttaaagcatacatcaagatctaccagggtgaagacttgcctcatcctaagagtatgcttcaagcaacggctgaagccaataatctggccgctgctgcctctgccaaggatatttattacaataacatggaggaggtgtgtggcggagagaaaccttatcttagtccagatattctggaagaaaaacattgcgagttcaaacagttagctctggaccacttcaaaaaaaccaagaaaatgggcgggaaggattttagttttcgatatcaacaagaactggaggaggagatcaaagagctctacgagaacttctgtaaacacaatgggtctaagaatgtattctctacgtttcggactccagccgttctatttactgggattgtcgccctgtacattgctagtggcctgaccggtttcattgggttagaggtggtcgcacagttattcaattgcatggtggggcttctgctaatcgccctactcacctggggctatatcagatactccggccagtaccgggagcttggcggcgccattgatttcggagcagcatacgtcctcgaacaagcctcaagccatatcgggaattcaacacaagccacggtcagagatgccgttgtcggcaggccatccatggataagaaagcccaatag

SEQ ID NO: 186859 - DNA, 1707 bp, Artificial Sequence
  derived and/or modified sequence
atgaggacagctggccgggaccctgtgtctgctggcctgcagttccccaaggatggcagcacccagaggcctgccaacagagccaggtttgtgcctgcccggacccggcccagccccctgcacccctgctgcttctgctttgaaggaggcggctccatgctgagcccccagagggtggccgccgccgccagcagaggagcagatgatgccatggagagcagcaacatcctgctgcaggaccacatccgggacctggatgtggtggtggtgtctgtggccggggccttcaggaagggcaagagcttcatcctggacttcatgctgcgctacctgtacagccagaaggagagcggccacagcaactggctgggggaccctgaggagcccctgaccggcttctcctggaggggcggcagtgaccctgagaccaccggcatccagatctggagcgaggtgttcaccgtggagaagccaggcggcaagaaggtggccgtggtgctgatggacacccagggcgcctttgacagccagagcacagtgaaggactgtgccaccatctttgccctgagcaccatgaccagctctgtgcagatctacaacctgagccagaacatccaggaggatgacctgcagcagctgcagctgttcacagaatatggccgcctggccatggatgagatcttccagaagcccttccagaccctgatgttcctggtgcgggactggagcttcccctatgagtacagctatggcctgcagggcggcatggccttcctggacaagaggctgcaggtgaaggagcaccagcacgaggagatccagaatgtgaggaaccacatccacagctgcttcagtgatgtgacctgcttcctgctgccccaccctggcctgcaggtggccaccagcccagactttgatggcaagctgaaggacattgctggggagttcaaggagcagctgcaggccctgatcccctacgtgctgaaccccagcaagctgatggagaaggagatcaatggcagcaaggtgacctgccggggcctgctggagtacttcaaggcctacatcaagatctaccagggcgaggacctgccccaccccaagtccatgctgcaggccacagctgaggccaacaacctggccgctgctgccagcgccaaggacatctactacaacaacatggaggaggtgtgtggcggggagaagccctacctgagcccagacatcctggaggagaagcactgtgagttcaagcagctggccctggaccacttcaagaagaccaagaagatgggcggcaaggacttctccttccgctaccagcaggagctggaggaggagatcaaggagctgtatgagaacttctgcaagcacaacggcagcaagaatgtgttcagcaccttccgcaccccagctgtgctcttcaccggcatcgtggccctgtacatcgccagcggcctgaccggcttcatcggcctggaggtggtggcccagctgttcaactgcatggtgggcctgctgctgattgccctgctgacctggggctacatccgctacagcggccagtaccgggagctgggcggggccatcgactttggagctgcctacgtgctggagcaggccagcagccacatcggcaacagcacccaggccaccgtgagagatgctgtggtgggccggcccagcatggacaagaaggcccagtag

SEQ ID NO: 186860 - DNA, 1626 bp, Artificial Sequence
  derived and/or modified sequence
atgctgagcccccagagggtggccgccgccgccagcagaggagcagatgatgccatggagagcagcaagccaggccctgtgcaggtggtgctggtgcagaaggaccagcacagctttgagctggatgagaaggccctggccagcatcctgctgcaggaccacatccgggacctggatgtggtggtggtgtctgtggccggggccttcaggaagggcaagagcttcatcctggacttcatgctgcgctacctgtacagccagaaggagagcggccacagcaactggctgggggaccctgaggagcccctgaccggcttctcctggaggggcggcagtgaccctgagaccaccggcatccagatctggagcgaggtgttcaccgtggagaagccaggcggcaagaaggtggccgtggtgctgatggacacccagggcgcctttgacagccagagcacagtgaaggactgtgccaccatctttgccctgagcaccatgaccagctctgtgcagatctacaacctgagccagaacatccaggaggatgacctgcagcagctgcagctgttcacagaatatggccgcctggccatggatgagatcttccagaagcccttccagaccctgatgttcctggtgcgggactggagcttcccctatgagtacagctatggcctgcagggcggcatggccttcctggacaagaggctgcaggtgaaggagcaccagcacgaggagatccagaatgtgaggaaccacatccacagctgcttcagtgatgtgacctgcttcctgctgccccaccctggcctgcaggtggccaccagcccagactttgatggcaagctgaaggacattgctggggagttcaaggagcagctgcaggccctgatcccctacgtgctgaaccccagcaagctgatggagaaggagatcaatggcagcaaggtgacctgccggggcctgctggagtacttcaaggcctacatcaagatctaccagggcgaggacctgccccaccccaagtccatgctgcaggccacagctgaggccaacaacctggccgccgccgccagcgccaaggacatctactacaacaacatggaggaggtgtgtggcggggagaagccctacctgagcccagacatcctggaggagaagcactgtgagttcaagcagctggccctggaccacttcaagaagaccaagaagatgggcggcaaggacttctccttccgctaccagcaggagctggaggaggagatcaaggagctgtatgagaacttctgcaagcacaacggcagcaagaatgtgttcagcaccttccgcaccccagctgtgctcttcaccggcatcgtggccctgtacatcgccagcggcctgaccggcttcatcggcctggaggtggtggcccagctgttcaactgcatggtgggcctgctgctgattgccctgctgacctggggctacatccgctacagcggccagtaccgggagctgggcggggccatcgactttggagctgcctacgtgctggagcaggccagcagccacatcggcaacagcacccaggccaccgtgagagatgctgtggtgggccggcccagcatggacaagaaggcccagtag

SEQ ID NO: 186861 - DNA, 1707 bp, Artificial Sequence
  derived and/or modified sequence
atgcggaccgccggccgggaccccgtgagcgccggcctgcagttccctaaagatggctccacccagcgccctgcaaatcgtgcccgattcgtacccgcacgcactaggccatcccctcttcacccttgctgtttttgcttcgagggggggggctctatgttatcccctcaacgggttgctgccgctgcttcacgaggtgctgatgatgcaatggagtcttccaatattctgctacaggatcatatcagagatcttgatgtcgtcgtggtgagcgttgccggggcatttcggaaaggtaaaagcttcattctggactttatgctcagatacctctacagtcagaaagagtctggacacagcaactggctgggggaccccgaggagcccctcacgggcttcagctggcgaggcggcagtgaccccgaaacgaccgggatccagatctggtctgaagtgtttaccgtcgaaaaaccagggggaaaaaaggtggcagtggtactgatggatacccaaggcgctttcgactcgcagagcactgtcaaggactgcgccaccatttttgccttgtccaccatgacgtcttccgtgcagatctacaacctgagccaaaacatacaggaggacgatctgcaacaactgcagctgttcacagaatacggtaggttagctatggacgagattttccagaagccttttcagacactcatgtttctggtgagggactggtcgttcccctacgagtacagctatggccttcaggggggcatggccttcttggacaaacgcctgcaggtgaaagaacaccagcatgaagaaatacagaacgtcaggaaccacatccattcatgcttttctgacgttacatgctttctgctaccccaccctggcctgcaagtggcaacatcaccagattttgacgggaaacttaaggatatcgccggcgagtttaaggagcagctgcaggccttgatcccttatgtgctgaacccgtccaaactcatggaaaaggagattaacggcagcaaggttacatgtcgcggtttgcttgaatactttaaggcttatatcaaaatctaccagggcgaggaccttccccacccaaaatcaatgctccaggctaccgcagaagccaataatcttgctgcggctgcaagcgccaaggacatctattataacaatatggaagaggtttgcggtggggagaagccatatttgtcgcccgacattctcgaggaaaaacattgcgagtttaaacagcttgcacttgaccactttaaaaagactaagaagatgggcggaaaggacttcagctttcgctaccaacaggaactggaggaggaaataaaagaactgtatgagaacttctgtaaacataacggaagcaagaatgtgttcagcacgtttagaactcccgccgtgttattcaccgggattgttgccctttacattgcgtcaggtctcacgggcttcattggactggaagttgtggcacagttgttcaactgcatggttgggctgcttctcatagccctgctgacgtgggggtacattaggtacagtggtcaatatcgagagctcggcggagctattgacttcggggctgcatacgtgctggaacaggcctcaagccatatcggaaactcgacacaggctactgtgagagacgcagttgtcggcagaccgagtatggacaagaaagcccaatag

SEQ ID NO: 186862 - DNA, 1626 bp, Artificial Sequence
  derived and/or modified sequence
atgctgagcccccagcgggtggccgccgccgccagccggggcgccgatgatgccatggagagctccaaacccgggcccgtgcaggttgtgctggtacagaaagatcagcactctttcgaactggatgagaaagctctcgcttctatactgctacaagatcatatccgcgacttggacgtggttgtggtgagtgtggcgggggcctttcgcaaaggtaaatcgttcattttggacttcatgctgcgctatttatactctcagaaagaatctgggcatagtaactggctaggagaccccgaggaaccacttactgggttcagttggcgaggaggtagcgacccagaaaccaccgggatacagatctggagcgaggttttcaccgtggagaaaccaggagggaagaaagtggcggtggtcctgatggacactcagggcgcttttgattctcagagcacagtcaaagattgtgcaacgatatttgcccttagcacgatgaccagttccgttcagatttacaatttgtcacagaatatccaggaagacgaccttcagcagttacagctgttcactgagtacggaagactcgctatggacgaaatcttccagaagcccttccaaacactgatgtttttagttcgggactggtctttcccctacgagtacagttacggtctgcaaggtggaatggctttcttggacaagcggttacaggttaaagagcatcagcacgaagagatacagaatgtgaggaatcacattcatagctgtttcagcgatgtcacatgctttctgctgcctcaccccggtctgcaggtcgctacttcccccgacttcgacggcaaactcaaggacatcgcaggggaattcaaggaacagctgcaggcgctgattccttatgtgctgaatccgtctaaattgatggaaaaagaaatcaatggaagtaaggtgacatgtcgcgggctcttagagtactttaaagcatatattaagatttatcagggcgaggatctgcctcaccccaaaagcatgctccaggccacagctgaggccaataatttagccgctgctgcatccgccaaggacatttattacaataacatggaggaggtgtgcggcggcgagaagccttatctgagccctgatatcctggaagagaagcactgcgaattcaaacaactcgccttagaccattttaagaagaccaagaagatgggaggaaaagatttctcattcagatatcagcaggaactggaagaagaaatcaaagaattatacgagaatttctgtaagcataacgggtctaaaaatgtcttttccacttttaggacacctgccgtgttgttcacaggcatagtagccctgtacatcgcgtccggcctgaccgggttcataggactggaggtcgttgcacagctgtttaactgtatggttgggcttctgctaatcgccctgctcacttgggggtatatacggtattccggccaatatagagaactgggcggagctatagacttcggcgccgcgtacgtgttagagcaagcttcatcacacatcggaaatagcacccaggcgacggtaagggacgcagtcgttggcaggccttctatggacaagaaagcccagtag

SEQ ID NO: 186863 - DNA, 1707 bp, Artificial Sequence
  derived and/or modified sequence
atgagaaccgccggtcgagaccctgtgagcgccggtctgcagttccccaaggatggcagcacgcagcggcctgccaaccgcgctcgcttcgtgcctgctcggactagaccttctccgctacacccctgctgcttctgttttgaagggggtggatccatgctatctcctcaaagagtggcagccgcagcgagcaggggagccgacgatgccatggagtccagcaatatcttgcttcaggatcacatcagggatttggatgtggtcgtcgtttcagttgctggggctttccgaaagggtaagtcatttatactggacttcatgctaaggtacctctactcccagaaagagagtggtcacagtaattggcttggagatccagaggaaccactcactggtttctcttggcgcggaggtagcgatcctgaaacgacgggcatccagatctggagtgaggttttcaccgtcgaaaaacccggtggcaaaaaggtagcagtggtgctgatggatactcagggggctttcgactcacaaagcacagttaaggactgcgcaacgatctttgccctctcaacgatgactagcagcgtgcaaatatacaacctctcacagaacatccaagaagacgatttacagcaattgcaactgtttaccgagtacggaagattagcaatggatgagatatttcagaagccgttccaaactctgatgtttttagtgagagactggagcttcccttacgagtatagctacggacttcaagggggtatggcatttttggacaagcgcctgcaagtcaaagagcatcagcacgaggaaattcagaatgtgagaaaccacatacattcttgctttagcgatgtgacctgcttccttttgccccaccctgggctgcaggtagcgacatcgccggatttcgacggaaaacttaaagatattgcaggcgaattcaaagagcagctgcaagctctgattccctatgtattgaatccgagtaaattgatggagaaggagatcaatggttccaaagtgacctgtcggggtctgttggaatattttaaggcttatattaagatttaccagggtgaagacctgccacaccctaaaagtatgcttcaggcgaccgctgaggccaataatctagccgcagcagcaagtgccaaagatatctactacaataatatggaagaagtgtgtgggggtgaaaaaccttatcttagccccgatattctggaagagaagcattgcgaatttaagcaactcgcgctcgaccactttaaaaagacaaagaaaatgggaggcaaagatttctctttccgataccagcaggagctggaggaggaaatcaaagagctgtatgaaaatttttgcaaacacaatggaagtaaaaacgtgtttagcacattccgaactccggcagtgctgttcacaggtattgtggcgctctatatcgcttcaggactgaccgggtttatcggtctcgaagtggtggctcagctgtttaactgtatggttgggctgttattaatagcactgcttacttggggttacataaggtactctgggcagtacagagaactggggggtgctattgacttcggcgctgcttacgtcctcgaacaggcatccagtcatataggcaactcaacccaggcaactgtacgcgatgccgttgttggcaggccaagcatggacaagaaggcacagtag

SEQ ID NO: 186864 - DNA, 1626 bp, Artificial Sequence
  derived and/or modified sequence
atgctgagccctcagagagttgcagccgcagctagccggggagccgacgacgctatggaaagcagtaaacccggtccggtacaagtggtgctcgtgcagaaggaccagcatagttttgagcttgatgagaaggcactcgctagcatccttctacaagatcacatcagggatctcgacgtagttgttgtgtccgtcgccggagcttttcgaaaagggaaatcttttattttggattttatgctacggtacttatattcccagaaggagtccgggcacagcaattggttaggggatcccgaagagcctctgaccgggttttcatggcggggaggttccgacccggagaccaccggaatacaaatttggagcgaggtcttcactgttgaaaagcccggaggtaagaaggtcgccgtggttctaatggacacccagggggcttttgattctcagtctacagtcaaagattgcgctacaatctttgctctaagtactatgaccagctctgtccaaatttacaacctctcccagaatatacaagaagacgacctacagcaactgcagctttttaccgaatatggcaggctcgcaatggatgagatcttccagaagccttttcaaacacttatgtttttagtgcgggactggtcttttccatatgagtattcctacggccttcagggcggaatggcattccttgataagcgcctgcaagtgaaagagcaccagcatgaggaaattcagaatgtccgcaaccatatacactcatgtttctccgacgtgacgtgctttctccttcctcatcccggactgcaagttgctacaagtcccgacttcgacgggaaacttaaggacattgcgggagagtttaaagagcagttgcaggcactgataccctacgtcctcaatccgtctaagttgatggagaaggagattaatggatccaaggttacctgtcgcggactgttagagtattttaaagcctatataaaaatctaccagggagaagacctccctcaccctaaatccatgctgcaagccacagcggaagcaaacaacttagctgctgccgctagtgccaaggacatctattacaacaacatggaggaagtctgtggcggagagaagccctatctgtcacccgatattctggaggagaagcactgcgagttcaagcaactggcattagaccattttaagaagacaaagaaaatgggcggaaaagacttcagtttcagatatcaacaggaacttgaagaggagatcaaggagctgtacgaaaacttttgtaagcacaacggcagcaaaaatgttttttccacgttccggactcccgctgtgctcttcaccggcatcgtggctctgtacatagcctctggtctgactggcttcatcgggctcgaggtggtggcgcaactgttcaactgcatggttggccttttacttatcgcgctcctaacgtggggatatattaggtattccggccagtacagggagctgggcggtgctatcgacttcggtgcagcgtacgtgttggagcaggcctccagccatatcggcaactcaactcaggccaccgtgcgggatgcagttgtgggacgaccgtccatggacaagaaagctcaatag

SEQ ID NO: 186865 - DNA, 6938 bp, Artificial Sequence
  derived and/or modified sequence
atgaggaccgctggccgggacccagtgagcgcgggactacaattcccaaaggacggtagcactcagcgccccgccaacagggcccggttcgttcccgcccgcacccgtccctctcctctgcacccctgctgcttctgctttgaaggcggaggctccatgttgtcccctcagcgagtggcagcagctgcctcaagaggagcagatgatgccatggagagcagcaacatcctcttgcaggaccacatccgagatcttgatgtggtggtggtttcagtggctggtgccttccgaaagggcaagtccttcattctggattttatgctacgatacttatattctcagaaggaaagtggccattcaaattggttgggtgacccagaagaaccgttaacaggattttcctggagagggggatctgatccagaaaccactgggattcaaatctggagtgaagttttcactgtggagaagccaggtgggaagaaggttgcagttgttctgatggatacccagggggcatttgacagccagtcaactgtgaaagactgtgctaccatctttgctctaagcactatgactagttctgttcagatttataatttatctcagaacattcaagaagatgatcttcaacagctgcagctcttcacagaatacggtcgtctggcaatggatgaaattttccaaaagcctttccagacactgatgtttttggttagagattggagtttcccttatgaatatagctatggactccaaggaggaatggcatttttggataagcgtttacaggtgaaggaacatcaacatgaagaaattcagaatgttcgaaatcacattcactcatgtttctccgatgtcacctgctttctcttaccacatccaggactccaggtggccacaagccctgactttgatgggaaattaaaagatattgctggtgaattcaaagagcagttacaggcactgataccgtatgtattaaacccatctaagttaatggaaaaggagatcaatggctcaaaggtcacctgtcggggactactggagtattttaaggcatatattaaaatttatcaaggagaagatctgcctcaccccaagtccatgcttcaggccactgctgaagccaacaacttagcagctgcagcctctgccaaggacatttattataacaacatggaagaggtttgtgggggagagaaaccttatttgtctccagacattctagaggagaagcactgtgaattcaaacaacttgctctggaccattttaagaagaccaagaagatgggtgggaaggatttcagctttcgttaccagcaggagctggaggaggaaatcaaggaattatatgagaacttctgcaagcacaatggtagcaagaacgtcttcagcaccttccgaacccctgcagtgctgttcacgggcattgtagctttgtacatagcctcaggcctcactggcttcataggtcttgaggttgtagcccagttgttcaactgtatggttggactactgttaatagcactcctcacctggggctacatcaggtattctggtcaatatcgtgagctgggcggagctattgattttggtgccgcatatgtgttggagcaggcttcttctcatatcggtaattccactcaggccactgtgagggatgcagttgttggaagaccatccatggataaaaaagctcaatagcatcttaacgtgaagatcaaacaagaacacaacaagcccctactgatttctgggtttctgccacggccacaggttcatatccagaggaatggcagatctgagacgatccaggaagagctaaaacatggccctgtaataaatgagcagacctctcctgtggtttcaaattattaaacacacttccatttctcttggaagcatttcttttccttgctgttatagatgcaagcctgtgtctattttcatattactctgctttgtgcactttatggaggaggaagctagaggaaaaatggaaatgcagcttttaagttctttatgtgccacttagtgccttttaagattgattccatggttttgcacacacgatggggaggggatggaggataacctcatgaaaggtgccgttttcgggtgaaacttgacatttcttttatactttactcttttgagaaggattctttttttttttttttttttttttgagttggagtctcgctctgtcaccaggcttgagtgcagtggtgtgatcttggctcactgcaacctctgcctgccgggttcaagcagttctcctgcctcagcctcccaagtagctgggactacaggtgtacgccaccatacccagctaatttttttgtatttttagtagagatggggtttcaccatgttggccaggatggtcttggtctcttgaccttgtgatccgcctgcccgccttggcctcccaaagtgctgggattacaggcgtgagccaccgtgcccggccaagaaggattccttttttaaaagtttacagaacttggagaaacttcagaactaaagactaactgaaaatgatgtcattacactcaaaaaaaatttacaatagggaatcctgttgccacatagtgtggaaaaatcatgtcatatttaaatataccatactctgaaatgtgaggtttttacccagtaggctgacagttttgttgcaacttgctctattttttttttttttttggtccctatagcttctttctagaaaaagaggcaaacgtgccttgaaaagccagagtggctcataataaaaggaatgcgctagatacttcaagaaaaaagctaagtttaaatgaaccatgtgacctctgataagtcacttgaacttgtgccttggtcaggttcactgtaggtttacatatgtatgtatgttttacacaactcttgtaattgtcatttgaggggttttgtttttgagagttctgcataagaacagaactttattaaggattagagggaagatacaaatattactgcgtttaattgatgtctaatttcatgtggcttagcagcaattaataacctgatttaaggtctttattcagaatgttaatttgcattctctgccgtgtctaatgttcttaataatgaagctaaaattaacccattttatttagtgaattatctatttaattttactttggctagtctggtagctttaagatagctttgccttagcaaggatcaaagtcctacccaaatataaaaaatatctagaagtatctaagagttctttttttctatttaccttgattaggagataaaagttttatctgttagttgcttttccttttggaattattgtggattttaaaacttaaaacttgcctgcaagtatttatataaacattcaggtatataagccttaatttctaagataatttaacttttgttatgggagggaggtaagagtgtaaattttatatacatgaaggtaagatctgagtgtaaactttacatacatgaagtatgaatggaaggtagaaaaaaagtcccttttcgcatgtaatctctttatcaaagaattttcttttgacactttaccactgaagtatttttgtaagtcctaaattcgcagcatattgtttcatatttatatgccatcttgcaaatagttcttgctattttattcactgctgttacactttagaaaaattccagcttgtttacttgcatttatcagtgatgccaaccaagctttgactgttaacttgaaagcttgcttctgaaatgttggtgcattttcaggtgacctcttatctctctgaaagttcatacctattagcaggctctgtaaatattgacatacttagcttttaatacattctataagtaaatttatagatttcagaataacttaaaaaatttaatggtaagaaggggtgatgtgtcgaaaactcatactaaagtattaggtcactttaaaaaaagtgataatgtatgatttaatgaaatcttaagattcagttactatttaaattcaccatttctgttttggtcttataaagagaccttggtttaattatccagaggaagtcctcttcaccattttttttttttcttagttctgcttctggaaagtgttttataaagttttctcagtgagggttcttaagagttttctttggcctcttttctctcaacagtaaattgatgattttatatcagctttttcaataaaagatgcattatcattactggctataaatcatcctggggagatttataaccaggttaaaaataatatcttttacttctctcaccttttacttgtggttcagatgctcagactgtgcctgtttgcgtcgtgtctgttgctctgccgctttccatgcaggcatttttaattttacacaatcctaacaatatatggaactcattcctatgaatatataaaaggaggcttccaaaattttctattaaaatatttcaggataaattaagtgttgataatttgaaaaaataatttcaatgagctgcttatagtaaaaatggtagaatcagagttttcattctttgagaaatctttctgtaagattggctcatagataaaatgagacaaactactatgtatgataaaacaccttcagagtcatgccttgttttattttattttattttttgagacagaggtctcgctctgtcgcccaggttggagtgcagtggtgcaatctcgctcactgcaacctccacctcccaggttcaagcgattctcctgtctcagcttcctgagtagctgggactacaggtgtacaccaccacgcctggctaatttttgtttttttactagaggtggggttttgccatgttggccaggctggtctcaaactcctgacctcaggtgatccactccccccagcctcccaaagtgctgggattacaggcatgagccaccccgcccagctgagtcatgccttattttcgtagtataccaagaaatgttctatggaagtttacgttttaacacctcttttatacttggtaaaattgcctgtgtttcgctttattcctttttttttttgagacggactcttgtactgtcacccaggctgaagtgcagtggcgcaatcttggctcactacaacctccgcctcctgggttcaagtgattcttttgcctcagcctcccaagtagcagggattacaggcatgtgccaccacacccggcttatttttgtatttttagtagagacagggcttcgccatgttgaccaggctggtctcaactcctctgggaatccgcctgtcttggccttccagggtgctgggattacaggcgtgagccactggaacctggccttgttttgctttattttttctcttacatgaagtaaagcgctttggtcaaacacacaaaaatactgccttgtactggtggttggtttcattagtggatcacacacagtgttctacttggcttgtaaaatggtgccttggatagggtgagtttggataagtatgtatgtatgtatgagttatagcaaaattaagtagattgaatcaagtccatgcaaaagcaataaaacagttttaattttttaattttttaaaaattaaaactttaataaaacagtttttaattttttgctaggttcttttaaaaaatgatgtaacttacatggaagtcttcacaggacttttttctttcctggaactattgaaatgtaatttaggatgatttgatcttccatctcaagttgtcaacatggctgtgtcattctggcttacatatgttttatttaacaaaattctagtcaagggataagggcataatgaagacaagcttcagttatgaaagtacaaactatttgtgtgattaatttttaaaaatgacattaagaagcccattgtaaaataatatttgcagtcaaatggtttttcttgctgtaagtcctgttgtagctatgtttagggtagtggttctcatctaccttggagtgcataagacttacctagcaggcttgtttaaaaagttcagattcctagctttgtacccagggattgcctcaggtggtatgggctgtggtcctggagtcatcacttttataaatagtggttcagagaccacagagagagactgcttcatcgaatgggaagtaccaaggagaaagtacaattcagtattgtctggaggcaagtggacactttgtacctgaggtttagaataggtggtctcttgccagtacaatccccaggcgttttctgtgttcagaagtagtaagaatgcctttaattcagaggattatctaagctctttaaagctgtttttctccattgtcatagtgccttctctgaaaaatgaatgtacaggtatcctattttctaatgtaattaggattttttaaaagcaatttttgatagtttttcttttaaaaagtaaaattcagcactgtgacttgaacccccaaatctttcacatacaggtgaaacattaagccacaaataaaaataatgaacaagaaagaagacaagatcctaattcctgtcattagtgacctaagtaccccatatcagaaactttgcaaaacagatctagggacagaagggctttgaaagacatttttctttggggcaaatttcgtgtgccagaactacagtttaaatgtttttatgagcaagggaaggtagcattgattcccatagctttctaattagatacatgctgtcatggatgtaagccttaaaggagttaatactaatcttgtacatacacaaattttcctcaggtttttttattttaaaaaatgatttgttaaaagtactgtctgctagacccttgcctttgagtggctttgaaacttaatatagtttttaaaaagtgcaatgggatgagattatgctattagtatattaaaagcatgtttctgttttactccaatttgtaagatcatttaatggaataaagatcacaacacc

SEQ ID NO: 186866 - DNA, 7135 bp, Artificial Sequence
  derived and/or modified sequence
acacgcggcaggcggtggcgggattctgccgcgtgcgctttcccgccccgcctcgcctagcctcgtcctgcgctcgccacgcctcgggctgtccgttgggccacgcagaccgcgctgcgctcgctccgtcgcggctccgcgtgccccaccttctggctagttttttctagagcccaggctccgcccgtttcccgcttccagggcccggttcgttcccgcccgcacccgtccctctcctctgcacccctgctgcttctgctttgaaggcggaggctccatgttgtcccctcagcgagtggcagcagctgcctcaagaggagcagatgatgccatggagagcagcaagcctggtccagtgcaggttgttttggttcagaaagatcaacattcctttgagctagatgagaaagccttggccagcatcctcttgcaggaccacatccgagatcttgatgtggtggtggtttcagtggctggtgccttccgaaagggcaagtccttcattctggattttatgctacgatacttatattctcagaaggaaagtggccattcaaattggttgggtgacccagaagaaccgttaacaggattttcctggagagggggatctgatccagaaaccactgggattcaaatctggagtgaagttttcactgtggagaagccaggtgggaagaaggttgcagttgttctgatggatacccagggggcatttgacagccagtcaactgtgaaagactgtgctaccatctttgctctaagcactatgactagttctgttcagatttataatttatctcagaacattcaagaagatgatcttcaacagctgcagctcttcacagaatacggtcgtctggcaatggatgaaattttccaaaagcctttccagacactgatgtttttggttagagattggagtttcccttatgaatatagctatggactccaaggaggaatggcatttttggataagcgtttacaggtgaaggaacatcaacatgaagaaattcagaatgttcgaaatcacattcactcatgtttctccgatgtcacctgctttctcttaccacatccaggactccaggtggccacaagccctgactttgatgggaaattaaaagatattgctggtgaattcaaagagcagttacaggcactgataccgtatgtattaaacccatctaagttaatggaaaaggagatcaatggctcaaaggtcacctgtcggggactactggagtattttaaggcatatattaaaatttatcaaggagaagatctgcctcaccccaagtccatgcttcaggccactgctgaagccaacaacttagcagctgcagcctctgccaaggacatttattataacaacatggaagaggtttgtgggggagagaaaccttatttgtctccagacattctagaggagaagcactgtgaattcaaacaacttgctctggaccattttaagaagaccaagaagatgggtgggaaggatttcagctttcgttaccagcaggagctggaggaggaaatcaaggaattatatgagaacttctgcaagcacaatggtagcaagaacgtcttcagcaccttccgaacccctgcagtgctgttcacgggcattgtagctttgtacatagcctcaggcctcactggcttcataggtcttgaggttgtagcccagttgttcaactgtatggttggactactgttaatagcactcctcacctggggctacatcaggtattctggtcaatatcgtgagctgggcggagctattgattttggtgccgcatatgtgttggagcaggcttcttctcatatcggtaattccactcaggccactgtgagggatgcagttgttggaagaccatccatggataaaaaagctcaatagcatcttaacgtgaagatcaaacaagaacacaacaagcccctactgatttctgggtttctgccacggccacaggttcatatccagaggaatggcagatctgagacgatccaggaagagctaaaacatggccctgtaataaatgagcagacctctcctgtggtttcaaattattaaacacacttccatttctcttggaagcatttcttttccttgctgttatagatgcaagcctgtgtctattttcatattactctgctttgtgcactttatggaggaggaagctagaggaaaaatggaaatgcagcttttaagttctttatgtgccacttagtgccttttaagattgattccatggttttgcacacacgatggggaggggatggaggataacctcatgaaaggtgccgttttcgggtgaaacttgacatttcttttatactttactcttttgagaaggattctttttttttttttttttttttttgagttggagtctcgctctgtcaccaggcttgagtgcagtggtgtgatcttggctcactgcaacctctgcctgccgggttcaagcagttctcctgcctcagcctcccaagtagctgggactacaggtgtacgccaccatacccagctaatttttttgtatttttagtagagatggggtttcaccatgttggccaggatggtcttggtctcttgaccttgtgatccgcctgcccgccttggcctcccaaagtgctgggattacaggcgtgagccaccgtgcccggccaagaaggattccttttttaaaagtttacagaacttggagaaacttcagaactaaagactaactgaaaatgatgtcattacactcaaaaaaaatttacaatagggaatcctgttgccacatagtgtggaaaaatcatgtcatatttaaatataccatactctgaaatgtgaggtttttacccagtaggctgacagttttgttgcaacttgctctattttttttttttttttggtccctatagcttctttctagaaaaagaggcaaacgtgccttgaaaagccagagtggctcataataaaaggaatgcgctagatacttcaagaaaaaagctaagtttaaatgaaccatgtgacctctgataagtcacttgaacttgtgccttggtcaggttcactgtaggtttacatatgtatgtatgttttacacaactcttgtaattgtcatttgaggggttttgtttttgagagttctgcataagaacagaactttattaaggattagagggaagatacaaatattactgcgtttaattgatgtctaatttcatgtggcttagcagcaattaataacctgatttaaggtctttattcagaatgttaatttgcattctctgccgtgtctaatgttcttaataatgaagctaaaattaacccattttatttagtgaattatctatttaattttactttggctagtctggtagctttaagatagctttgccttagcaaggatcaaagtcctacccaaatataaaaaatatctagaagtatctaagagttctttttttctatttaccttgattaggagataaaagttttatctgttagttgcttttccttttggaattattgtggattttaaaacttaaaacttgcctgcaagtatttatataaacattcaggtatataagccttaatttctaagataatttaacttttgttatgggagggaggtaagagtgtaaattttatatacatgaaggtaagatctgagtgtaaactttacatacatgaagtatgaatggaaggtagaaaaaaagtcccttttcgcatgtaatctctttatcaaagaattttcttttgacactttaccactgaagtatttttgtaagtcctaaattcgcagcatattgtttcatatttatatgccatcttgcaaatagttcttgctattttattcactgctgttacactttagaaaaattccagcttgtttacttgcatttatcagtgatgccaaccaagctttgactgttaacttgaaagcttgcttctgaaatgttggtgcattttcaggtgacctcttatctctctgaaagttcatacctattagcaggctctgtaaatattgacatacttagcttttaatacattctataagtaaatttatagatttcagaataacttaaaaaatttaatggtaagaaggggtgatgtgtcgaaaactcatactaaagtattaggtcactttaaaaaaagtgataatgtatgatttaatgaaatcttaagattcagttactatttaaattcaccatttctgttttggtcttataaagagaccttggtttaattatccagaggaagtcctcttcaccattttttttttttcttagttctgcttctggaaagtgttttataaagttttctcagtgagggttcttaagagttttctttggcctcttttctctcaacagtaaattgatgattttatatcagctttttcaataaaagatgcattatcattactggctataaatcatcctggggagatttataaccaggttaaaaataatatcttttacttctctcaccttttacttgtggttcagatgctcagactgtgcctgtttgcgtcgtgtctgttgctctgccgctttccatgcaggcatttttaattttacacaatcctaacaatatatggaactcattcctatgaatatataaaaggaggcttccaaaattttctattaaaatatttcaggataaattaagtgttgataatttgaaaaaataatttcaatgagctgcttatagtaaaaatggtagaatcagagttttcattctttgagaaatctttctgtaagattggctcatagataaaatgagacaaactactatgtatgataaaacaccttcagagtcatgccttgttttattttattttattttttgagacagaggtctcgctctgtcgcccaggttggagtgcagtggtgcaatctcgctcactgcaacctccacctcccaggttcaagcgattctcctgtctcagcttcctgagtagctgggactacaggtgtacaccaccacgcctggctaatttttgtttttttactagaggtggggttttgccatgttggccaggctggtctcaaactcctgacctcaggtgatccactccccccagcctcccaaagtgctgggattacaggcatgagccaccccgcccagctgagtcatgccttattttcgtagtataccaagaaatgttctatggaagtttacgttttaacacctcttttatacttggtaaaattgcctgtgtttcgctttattcctttttttttttgagacggactcttgtactgtcacccaggctgaagtgcagtggcgcaatcttggctcactacaacctccgcctcctgggttcaagtgattcttttgcctcagcctcccaagtagcagggattacaggcatgtgccaccacacccggcttatttttgtatttttagtagagacagggcttcgccatgttgaccaggctggtctcaactcctctgggaatccgcctgtcttggccttccagggtgctgggattacaggcgtgagccactggaacctggccttgttttgctttattttttctcttacatgaagtaaagcgctttggtcaaacacacaaaaatactgccttgtactggtggttggtttcattagtggatcacacacagtgttctacttggcttgtaaaatggtgccttggatagggtgagtttggataagtatgtatgtatgtatgagttatagcaaaattaagtagattgaatcaagtccatgcaaaagcaataaaacagttttaattttttaattttttaaaaattaaaactttaataaaacagtttttaattttttgctaggttcttttaaaaaatgatgtaacttacatggaagtcttcacaggacttttttctttcctggaactattgaaatgtaatttaggatgatttgatcttccatctcaagttgtcaacatggctgtgtcattctggcttacatatgttttatttaacaaaattctagtcaagggataagggcataatgaagacaagcttcagttatgaaagtacaaactatttgtgtgattaatttttaaaaatgacattaagaagcccattgtaaaataatatttgcagtcaaatggtttttcttgctgtaagtcctgttgtagctatgtttagggtagtggttctcatctaccttggagtgcataagacttacctagcaggcttgtttaaaaagttcagattcctagctttgtacccagggattgcctcaggtggtatgggctgtggtcctggagtcatcacttttataaatagtggttcagagaccacagagagagactgcttcatcgaatgggaagtaccaaggagaaagtacaattcagtattgtctggaggcaagtggacactttgtacctgaggtttagaataggtggtctcttgccagtacaatccccaggcgttttctgtgttcagaagtagtaagaatgcctttaattcagaggattatctaagctctttaaagctgtttttctccattgtcatagtgccttctctgaaaaatgaatgtacaggtatcctattttctaatgtaattaggattttttaaaagcaatttttgatagtttttcttttaaaaagtaaaattcagcactgtgacttgaacccccaaatctttcacatacaggtgaaacattaagccacaaataaaaataatgaacaagaaagaagacaagatcctaattcctgtcattagtgacctaagtaccccatatcagaaactttgcaaaacagatctagggacagaagggctttgaaagacatttttctttggggcaaatttcgtgtgccagaactacagtttaaatgtttttatgagcaagggaaggtagcattgattcccatagctttctaattagatacatgctgtcatggatgtaagccttaaaggagttaatactaatcttgtacatacacaaattttcctcaggtttttttattttaaaaaatgatttgttaaaagtactgtctgctagacccttgcctttgagtggctttgaaacttaatatagtttttaaaaagtgcaatgggatgagattatgctattagtatattaaaagcatgtttctgttttactccaatttgtaagatcatttaatggaataaagatcacaacacca

SEQ ID NO: 186867 - DNA, 1707 bp, Artificial Sequence
  derived and/or modified sequence
atgagaaccgccggcagagaccccgtgagcgccggcctgcagttccccaaggacggcagcacccagagacccgccaacagagccagattcgtgcccgccagaaccagacccagccccctgcacccctgctgcttctgcttcgagggcggcggcagcatgctgagcccccagagagtggccgccgccgccagcagaggcgccgacgacgccatggagagcagcaacatcctgctgcaggaccacatcagagacctggacgtggtggtggtgagcgtggccggcgccttcagaaagggcaagagcttcatcctggacttcatgctgagatacctgtacagccagaaggagagcggccacagcaactggctgggcgaccccgaggagcccctgaccggcttcagctggagaggcggcagcgaccccgagaccaccggcatccagatctggagcgaggtgttcaccgtggagaagcccggcggcaagaaggtggccgtggtgctgatggacacccagggcgccttcgacagccagagcaccgtgaaggactgcgccaccatcttcgccctgagcaccatgaccagcagcgtgcagatctacaacctgagccagaacatccaggaggacgacctgcagcagctgcagctgttcaccgagtacggcagactggccatggacgagatcttccagaagcccttccagaccctgatgttcctggtgagagactggagcttcccctacgagtacagctacggcctgcagggcggcatggccttcctggacaagagactgcaggtgaaggagcaccagcacgaggagatccagaacgtgagaaaccacatccacagctgcttcagcgacgtgacctgcttcctgctgccccaccccggcctgcaggtggccaccagccccgacttcgacggcaagctgaaggacatcgccggcgagttcaaggagcagctgcaggccctgatcccctacgtgctgaaccccagcaagctgatggagaaggagatcaacggcagcaaggtgacctgcagaggcctgctggagtacttcaaggcctacatcaagatctaccagggcgaggacctgccccaccccaagagcatgctgcaggccaccgccgaggccaacaacctggccgccgccgccagcgccaaggacatctactacaacaacatggaggaggtgtgcggcggcgagaagccctacctgagccccgacatcctggaggagaagcactgcgagttcaagcagctggccctggaccacttcaagaagaccaagaagatgggcggcaaggacttcagcttcagataccagcaggagctggaggaggagatcaaggagctgtacgagaacttctgcaagcacaacggcagcaagaacgtgttcagcaccttcagaacccccgccgtgctgttcaccggcatcgtggccctgtacatcgccagcggcctgaccggcttcatcggcctggaggtggtggcccagctgttcaactgcatggtgggcctgctgctgatcgccctgctgacctggggctacatcagatacagcggccagtacagagagctgggcggcgccatcgacttcggcgccgcctacgtgctggagcaggccagcagccacatcggcaacagcacccaggccaccgtgagagacgccgtggtgggcagacccagcatggacaagaaggcccagtag

SEQ ID NO: 186868 - DNA, 1626 bp, Artificial Sequence
  derived and/or modified sequence
atgctgagcccccagagagtggccgccgccgccagcagaggcgccgacgacgccatggagagcagcaagcccggccccgtgcaggtggtgctggtgcagaaggaccagcacagcttcgagctggacgagaaggccctggccagcatcctgctgcaggaccacatcagagacctggacgtggtggtggtgagcgtggccggcgccttcagaaagggcaagagcttcatcctggacttcatgctgagatacctgtacagccagaaggagagcggccacagcaactggctgggcgaccccgaggagcccctgaccggcttcagctggagaggcggcagcgaccccgagaccaccggcatccagatctggagcgaggtgttcaccgtggagaagcccggcggcaagaaggtggccgtggtgctgatggacacccagggcgccttcgacagccagagcaccgtgaaggactgcgccaccatcttcgccctgagcaccatgaccagcagcgtgcagatctacaacctgagccagaacatccaggaggacgacctgcagcagctgcagctgttcaccgagtacggcagactggccatggacgagatcttccagaagcccttccagaccctgatgttcctggtgagagactggagcttcccctacgagtacagctacggcctgcagggcggcatggccttcctggacaagagactgcaggtgaaggagcaccagcacgaggagatccagaacgtgagaaaccacatccacagctgcttcagcgacgtgacctgcttcctgctgccccaccccggcctgcaggtggccaccagccccgacttcgacggcaagctgaaggacatcgccggcgagttcaaggagcagctgcaggccctgatcccctacgtgctgaaccccagcaagctgatggagaaggagatcaacggcagcaaggtgacctgcagaggcctgctggagtacttcaaggcctacatcaagatctaccagggcgaggacctgccccaccccaagagcatgctgcaggccaccgccgaggccaacaacctggccgccgccgccagcgccaaggacatctactacaacaacatggaggaggtgtgcggcggcgagaagccctacctgagccccgacatcctggaggagaagcactgcgagttcaagcagctggccctggaccacttcaagaagaccaagaagatgggcggcaaggacttcagcttcagataccagcaggagctggaggaggagatcaaggagctgtacgagaacttctgcaagcacaacggcagcaagaacgtgttcagcaccttcagaacccccgccgtgctgttcaccggcatcgtggccctgtacatcgccagcggcctgaccggcttcatcggcctggaggtggtggcccagctgttcaactgcatggtgggcctgctgctgatcgccctgctgacctggggctacatcagatacagcggccagtacagagagctgggcggcgccatcgacttcggcgccgcctacgtgctggagcaggccagcagccacatcggcaacagcacccaggccaccgtgagagacgccgtggtgggcagacccagcatggacaagaaggcccagtag

SEQ ID NO: 186869 - protein, 1311 aa, Artificial Sequence
  derived and/or modified sequence
MSRRKQAKPRSLKDPNCKLEDKTEDGEALDCKKRPEDGEELEDEAVHSCDSCLQVFESLSDITEHKINQCQLTDGVDVEDDPTCSWPASSPSSKDQTSPSHGEGCDFGEEEGGPGLPYPCQFCDKSFSRLSYLKHHEQSHSDKLPFKCTYCSRLFKHKRSRDRHIKLHTGDKKYHCSECDAAFSRSDHLKIHLKTHTSNKPYKCAICRRGFLSSSSLHGHMQVHERNKDGSQSGSRMEDWKMKDTQKCSQCEEGFDFPEDLQKHIAECHPECSPNEDRAALQCVYCHELFVEETSLMNHMEQVHSGEKKNSCSICSESFHTVEELYSHMDSHQQPESCNHSNSPSLVTVGYTSVSSTTPDSNLSVDSSTMVEAAPPIPKSRGRKRAAQQTPDMTGPSSKQAKVTYSCIYCNKQLFSSLAVLQIHLKTMHLDKPEQAHICQYCLEVLPSLYNLNEHLKQVHEAQDPGLIVSAMPAIVYQCNFCSEVVNDLNTLQEHIRCSHGFANPAAKDSNAFFCPHCYMGFLTDSSLEEHIRQVHCDLSGSRFGSPVLGTPKEPVVEVYSCSYCTNSPIFNSVLKLNKHIKENHKNIPLALNYIHNGKKSRALSPLSPVAIEQTSLKMMQAVGGAPARPTGEYICNQCGAKYTSLDSFQTHLKTHLDTVLPKLTCPQCNKEFPNQESLLKHVTIHFMITSTYYICESCDKQFTSVDDLQKHLLDMHTFVFFRCTLCQEVFDSKVSIQLHLAVKHSNEKKVYRCTSCNWDFRNETDLQLHVKHNHLENQGKVHKCIFCGESFGTEVELQCHITTHSKKYNCKFCSKAFHAIILLEKHLREKHCVFETKTPNCGTNGASEQVQKEEVELQTLLTNSQESHNSHDGSEEDVDTSEPMYGCDICGAAYTMETLLQNHQLRDHNIRPGESAIVKKKAELIKGNYKCNVCSRTFFSENGLREHMQTHLGPVKHYMCPICGERFPSLLTLTEHKVTHSKSLDTGNCRICKMPLQSEEEFLEHCQMHPDLRNSLTGFRCVVCMQTVTSTLELKIHGTFHMQKTGNGSAVQTTGRGQHVQKLYKCASCLKEFRSKQDLVKLDINGLPYGLCAGCVNLSKSASPGINVPPGTNRPGLGQNENLSAIEGKGKVGGLKTRCSSCNVKFESESELQNHIQTIHRELVPDSNSTQLKTPQVSPMPRISPSQSDEKKTYQCIKCQMVFYNEWDIQVHVANHMIDEGLNHECKLCSQTFDSPAKLQCHLIEHSFEGMGGTFKCPVCFTVFVQANKLQQHIFSAHGQEDKIYDCTQCPQKFFFQTELQNHTMTQHSS

SEQ ID NO: 186870 - protein, 1311 aa, Artificial Sequence
  derived and/or modified sequence
ISRAQKAQTRRLNDPNCKLEDKTEDGEALDCKKRPEDGEELEDEAVHSCDSCLQVFESLSDITEHKINQCQLTDGVDVEDDPTCSWPASSPSSKDQTSPSHGEGCDFGEEEGGPGLPYPCQFCDKSFSRLSYLKHHEQSHSDKLPFKCTYCSRLFKHKRSRDRHIKLHTGDKKYHCSECDAAFSRSDHLKIHLKTHTSNKPYKCAICRRGFLSSSSLHGHMQVHERNKDGSQSGSRMEDWKMKDTQKCSQCEEGFDFPEDLQKHIAECHPECSPNEDRAALQCVYCHELFVEETSLMNHMEQVHSGEKKNSCSICSESFHTVEELYSHMDSHQQPESCNHSNSPSLVTVGYTSVSSTTPDSNLSVDSSTMVEAAPPIPKSRGRKRAAQQTPDMTGPSSKQAKVTYSCIYCNKQLFSSLAVLQIHLKTMHLDKPEQAHICQYCLEVLPSLYNLNEHLKQVHEAQDPGLIVSAMPAIVYQCNFCSEVVNDLNTLQEHIRCSHGFANPAAKDSNAFFCPHCYMGFLTDSSLEEHIRQVHCDLSGSRFGSPVLGTPKEPVVEVYSCSYCTNSPIFNSVLKLNKHIKENHKNIPLALNYIHNGKKSRALSPLSPVAIEQTSLKMMQAVGGAPARPTGEYICNQCGAKYTSLDSFQTHLKTHLDTVLPKLTCPQCNKEFPNQESLLKHVTIHFMITSTYYICESCDKQFTSVDDLQKHLLDMHTFVFFRCTLCQEVFDSKVSIQLHLAVKHSNEKKVYRCTSCNWDFRNETDLQLHVKHNHLENQGKVHKCIFCGESFGTEVELQCHITTHSKKYNCKFCSKAFHAIILLEKHLREKHCVFETKTPNCGTNGASEQVQKEEVELQTLLTNSQESHNSHDGSEEDVDTSEPMYGCDICGAAYTMETLLQNHQLRDHNIRPGESAIVKKKAELIKGNYKCNVCSRTFFSENGLREHMQTHLGPVKHYMCPICGERFPSLLTLTEHKVTHSKSLDTGNCRICKMPLQSEEEFLEHCQMHPDLRNSLTGFRCVVCMQTVTSTLELKIHGTFHMQKTGNGSAVQTTGRGQHVQKLYKCASCLKEFRSKQDLVKLDINGLPYGLCAGCVNLSKSASPGINVPPGTNRPGLGQNENLSAIEGKGKVGGLKTRCSSCNVKFESESELQNHIQTIHRELVPDSNSTQLKTPQVSPMPRISPSQSDEKKTYQCIKCQMVFYNEWDIQVHVANHMIDEGLNHECKLCSQTFDSPAKLQCHLIEHSFEGMGGTFKCPVCFTVFVQANKLQQHIFSAHGQEDKIYDCTQCPQKFFFQTELQVHTATPRQS

SEQ ID NO: 186871 - protein, 1345 aa, Artificial Sequence
  derived and/or modified sequence
FLSDYVQSESLRVRGPLWSHPDGFGGLASIFHYYVDYRSDSAVQDLADPNCKLEDKTEDGEALDCKKRPEDGEELEDEAVHSCDSCLQVFESLSDITEHKINQCQLTDGVDVEDDPTCSWPASSPSSKDQTSPSHGEGCDFGEEEGGPGLPYPCQFCDKSFSRLSYLKHHEQSHSDKLPFKCTYCSRLFKHKRSRDRHIKLHTGDKKYHCSECDAAFSRSDHLKIHLKTHTSNKPYKCAICRRGFLSSSSLHGHMQVHERNKDGSQSGSRMEDWKMKDTQKCSQCEEGFDFPEDLQKHIAECHPECSPNEDRAALQCVYCHELFVEETSLMNHMEQVHSGEKKNSCSICSESFHTVEELYSHMDSHQQPESCNHSNSPSLVTVGYTSVSSTTPDSNLSVDSSTMVEAAPPIPKSRGRKRAAQQTPDMTGPSSKQAKVTYSCIYCNKQLFSSLAVLQIHLKTMHLDKPEQAHICQYCLEVLPSLYNLNEHLKQVHEAQDPGLIVSAMPAIVYQCNFCSEVVNDLNTLQEHIRCSHGFANPAAKDSNAFFCPHCYMGFLTDSSLEEHIRQVHCDLSGSRFGSPVLGTPKEPVVEVYSCSYCTNSPIFNSVLKLNKHIKENHKNIPLALNYIHNGKKSRALSPLSPVAIEQTSLKMMQAVGGAPARPTGEYICNQCGAKYTSLDSFQTHLKTHLDTVLPKLTCPQCNKEFPNQESLLKHVTIHFMITSTYYICESCDKQFTSVDDLQKHLLDMHTFVFFRCTLCQEVFDSKVSIQLHLAVKHSNEKKVYRCTSCNWDFRNETDLQLHVKHNHLENQGKVHKCIFCGESFGTEVELQCHITTHSKKYNCKFCSKAFHAIILLEKHLREKHCVFETKTPNCGTNGASEQVQKEEVELQTLLTNSQESHNSHDGSEEDVDTSEPMYGCDICGAAYTMETLLQNHQLRDHNIRPGESAIVKKKAELIKGNYKCNVCSRTFFSENGLREHMQTHLGPVKHYMCPICGERFPSLLTLTEHKVTHSKSLDTGNCRICKMPLQSEEEFLEHCQMHPDLRNSLTGFRCVVCMQTVTSTLELKIHGTFHMQKTGNGSAVQTTGRGQHVQKLYKCASCLKEFRSKQDLVKLDINGLPYGLCAGCVNLSKSASPGINVPPGTNRPGLGQNENLSAIEGKGKVGGLKTRCSSCNVKFESESELQNHIQTIHRELVPDSNSTQLKTPQVSPMPRISPSQSDEKKTYQCIKCQMVFYNEWDIQVHVANHMIDEGLNHECKLCSQTFDSPAKLQCHLIEHSFEGMGGTFKCPVCFTVFVQANKLQQHIFSAHGQEDKIYDCTQCPQKFFFQTELQVHTATPRQS

SEQ ID NO: 186872 - DNA, 4985 bp, Artificial Sequence
  derived and/or modified sequence
agtccgggtcttggcgggccccctcctccctcccgctccccgcgctctcgccttttaatcatgcccctctgtctgtgtgtgagtgcaggcaggctgacaatgatttcctcagtgattacgtacagagcgagtccctgcgggttaggggccccctctggagccatcctgatggctttgggggccttgcttccattttccattattatgtggactaccggagcgacagcgcagtccaagaccttgcaggatgtctcgccgcaagcaagcgaaaccgagatccctcaaagaccccaactgtaaacttgaagacaagactgaagatggagaggcactagattgtaagaagaggccggaagacggggaggagttggaagacgaagctgtgcacagctgtgacagctgcctccaggtgtttgaatcgctgagcgatatcacagaacacaagattaatcaatgtcaactgacagatggagtggatgttgaagatgatccgacttgctcttggccagcttcctcaccttctagcaaggatcagacttcccctagccatggagaaggttgcgattttggagaggaagaaggtggccctgggcttccatacccgtgtcaattctgtgacaagtcgtttagccgcctcagctacctaaagcaccatgagcagagtcacagtgacaaactgcctttcaaatgcacctactgcagtaggctgttcaaacacaagcgcagccgagatcgccacataaaactccacaccggggacaagaagtaccactgcagtgaatgtgatgctgcgttttccagaagtgatcacttgaagatccacttaaagactcacacgtccaacaagccatataaatgtgccatttgtcgccgtgggtttctgtcctctagttccttacacggacacatgcaggttcatgagaggaacaaggacggctctcagtccggttccaggatggaggactggaagatgaaggacactcagaagtgcagtcagtgtgaggaaggctttgacttcccggaagacctccaaaaacacattgcagagtgccaccccgaatgctccccaaatgaggaccgagcggccctccagtgtgtctactgccacgagctcttcgtagaggagacctccctcatgaaccacatggagcaggtgcatagcggggagaagaagaactcatgcagcatttgttctgagagtttccacacagttgaggaactgtacagccacatggacagtcaccagcaaccggagtcatgcaatcacagcaacagcccttccctggtcacggtgggctatacctccgtgtccagtacgactccagattccaacctctcagtggacagctcaaccatggtggaagctgccccgccaatcccaaagagtcgagggaggaagagggccgctcaacaaacccctgacatgactggtccctcgagtaaacaagcaaaagttacctacagctgtatttactgcaacaaacaattattttcaagtcttgcagttctgcagattcacctgaaaactatgcacttagataagccagaacaggcccatatttgtcagtattgcttggaggtcctgccctcactctataacctaaatgaacatcttaagcaagtgcatgaagctcaggacccaggtctgattgtttctgccatgcctgccattgtctaccagtgtaacttctgttccgaagttgtcaacgacctcaacactcttcaggaacacatccgatgttctcatggatttgcaaaccctgcagctaaagatagtaatgcattcttttgtccccattgctatatggggtttctcactgactcttccctggaagagcatattagacaggttcattgtgacctcagtggctcccgatttgggtctccagtgcttgggactcccaaagaaccagtagtagaagtctattcttgttcctattgtacaaattcgccaatattcaacagcgttcttaaactgaacaagcatatcaaagagaatcataaaaacattcccttggccctgaattatatccacaatgggaagaaatccagggccttaagccccctatctcctgtggccatagagcagacatctcttaagatgatgcaggcagtaggaggtgcacctgcacgtcccactggagaatatatctgtaatcaatgtggtgctaagtacacatccctagacagctttcagactcacctaaaaactcatctcgacactgtgcttccaaaattgacctgtcctcagtgcaacaaggaattccccaaccaagaatccttgctgaagcatgttaccattcactttatgatcacttcaacgtattacatctgtgagagttgtgacaagcaattcacatcagtggatgaccttcagaaacacctgctggacatgcacacctttgtcttctttcgctgcaccctctgccaggaagtttttgactcaaaagtctccattcagctccacttggctgtgaagcacagtaacgaaaagaaagtctataggtgcacatcttgcaactgggacttccgcaacgaaactgacttgcagctccatgtgaaacacaaccacctggaaaaccaagggaaagtgcataagtgcattttctgcggtgagtcctttggcaccgaggtggagctgcaatgccacatcaccactcacagtaagaagtacaactgcaagttctgtagcaaagccttccatgcgatcattttgttagaaaaacacttgcgagaaaaacactgtgtattcgaaaccaagacacccaactgtggaacaaatggagcttccgagcaagtgcagaaagaggaagtggagctgcagactttgctgaccaacagccaggagtcccacaacagtcacgatgggagcgaagaagacgttgacacctctgagcctatgtacggctgcgacatttgtggggcagcctacactatggaaactttgctgcagaatcaccagctccgagaccacaacatcagacctggagaaagtgccatcgtgaaaaagaaagctgagctcattaaagggaattacaagtgcaacgtgtgctctcgaaccttcttctccgaaaatggcctccgggaacatatgcagacccacctaggccctgtcaaacactacatgtgccctatttgcggagagcggtttccctcccttttaactcttactgaacacaaagtcacgcatagtaagagtcttgatactggaaactgccggatttgcaagatgcctctccagagtgaagaggagtttttagagcattgccaaatgcaccctgacttgaggaattccctgacaggctttcgctgcgtggtgtgcatgcagacagtgacctccaccttggaactcaaaatccatgggacgttccacatgcaaaagacagggaatgggtctgcagttcagaccacagggcggggccagcacgtccaaaaactgtataagtgcgcatcttgcctcaaagaattccgttccaagcaagatctggtgaaacttgatatcaatggcctgccatatggtctgtgtgccggctgcgtgaatctcagtaagagcgccagcccaggcattaacgtccctcccggcacgaatagaccaggcttgggccagaatgagaatctgagtgccattgaggggaaaggcaaggtggggggactgaagacacgctgctctagctgcaacgttaagtttgagtctgaaagtgaactccagaaccacatccaaaccatccaccgagagctcgtgccagacagcaacagcacacagttgaaaacgccccaagtatcaccaatgcccagaatcagtccctcccagtcggatgagaagaagacctatcaatgcatcaagtgtcagatggttttctacaatgaatgggatattcaggttcatgttgcaaatcacatgattgatgaaggactgaaccatgaatgcaaactctgcagccagacctttgactctcctgccaaactccagtgccacctgatagagcacagcttcgaagggatgggaggcaccttcaagtgtccagtctgctttacagtatttgttcaagcaaacaagttgcagcagcatattttctctgcccatggacaagaagacaagatctatgactgtacacaatgtccacagaagtttttcttccaaacagagctgcagaatcatacaatgacccaacacagcagttagtgcaagtacagtctctcaaggagaattgattttgtggcacaaaaagggaacatgttttactctttgcacgaaactttcattgttaatgtatattattcagaaacattgtattgtaccataaaacttgtattatcaaactgttggatgttcatgtgtttgaacttttgcgcaccggatagaccccttgtatataaagtgttgcacatgtattatgtcgtctgatactaaaatggtcttataaagacaagtggacttgggccctattcaggcaagattaaaaaaaaaaaaagactatgaccaaaatggcttaagataaagtatttttaaggaagaaagattaaaaacaactgttatacatgagactatggttggacttccttttctttacacttaagcctagaatttctctttaggtatatcagcgcttaaatccaagactattttttattgctgaagattcttgcaaaccatgaagagatgttctcacagaacagaaccccacagctggataaggcccgtatatatatatttgtaagccttgcaatgtgacaggtagcatcactatatatgcaatagttgttatgtagactgtcaaagaatttttttttccctggatacatttgaagctttgagtgttcaaggttttccttaatgatttcacgcagccaaattcttgaatcagttgaactaacctgtatgttactgttattaatgtttactctgcagtctgaacctggagattactggaattgttttccaagaggaaataaattcagtttaccattaggaaaaaaaaaaaaaa

SEQ ID NO: 186873 - DNA, 3936 bp, Artificial Sequence
  derived and/or modified sequence
atgagcagaagaaagcaggccaagcccagaagcctgaaggaccccaactgcaagctggaggacaagaccgaggacggcgaggccctggactgcaagaagagacccgaggacggcgaggagctggaggacgaggccgtgcacagctgcgacagctgcctgcaggtgttcgagagcctgagcgacatcaccgagcacaagatcaaccagtgccagctgaccgacggcgtggacgtggaggacgaccccacctgcagctggcccgccagcagccccagcagcaaggaccagaccagccccagccacggcgagggctgcgacttcggcgaggaggagggcggccccggcctgccctacccctgccagttctgcgacaagagcttcagcagactgagctacctgaagcaccacgagcagagccacagcgacaagctgcccttcaagtgcacctactgcagcagactgttcaagcacaagagaagcagagacagacacatcaagctgcacaccggcgacaagaagtaccactgcagcgagtgcgacgccgccttcagcagaagcgaccacctgaagatccacctgaagacccacaccagcaacaagccctacaagtgcgccatctgcagaagaggcttcctgagcagcagcagcctgcacggccacatgcaggtgcacgagagaaacaaggacggcagccagagcggcagcagaatggaggactggaagatgaaggacacccagaagtgcagccagtgcgaggagggcttcgacttccccgaggacctgcagaagcacatcgccgagtgccaccccgagtgcagccccaacgaggacagagccgccctgcagtgcgtgtactgccacgagctgttcgtggaggagaccagcctgatgaaccacatggagcaggtgcacagcggcgagaagaagaacagctgcagcatctgcagcgagagcttccacaccgtggaggagctgtacagccacatggacagccaccagcagcccgagagctgcaaccacagcaacagccccagcctggtgaccgtgggctacaccagcgtgagcagcaccacccccgacagcaacctgagcgtggacagcagcaccatggtggaggccgccccccccatccccaagagcagaggcagaaagagagccgcccagcagacccccgacatgaccggccccagcagcaagcaggccaaggtgacctacagctgcatctactgcaacaagcagctgttcagcagcctggccgtgctgcagatccacctgaagaccatgcacctggacaagcccgagcaggcccacatctgccagtactgcctggaggtgctgcccagcctgtacaacctgaacgagcacctgaagcaggtgcacgaggcccaggaccccggcctgatcgtgagcgccatgcccgccatcgtgtaccagtgcaacttctgcagcgaggtggtgaacgacctgaacaccctgcaggagcacatcagatgcagccacggcttcgccaaccccgccgccaaggacagcaacgccttcttctgcccccactgctacatgggcttcctgaccgacagcagcctggaggagcacatcagacaggtgcactgcgacctgagcggcagcagattcggcagccccgtgctgggcacccccaaggagcccgtggtggaggtgtacagctgcagctactgcaccaacagccccatcttcaacagcgtgctgaagctgaacaagcacatcaaggagaaccacaagaacatccccctggccctgaactacatccacaacggcaagaagagcagagccctgagccccctgagccccgtggccatcgagcagaccagcctgaagatgatgcaggccgtgggcggcgcccccgccagacccaccggcgagtacatctgcaaccagtgcggcgccaagtacaccagcctggacagcttccagacccacctgaagacccacctggacaccgtgctgcccaagctgacctgcccccagtgcaacaaggagttccccaaccaggagagcctgctgaagcacgtgaccatccacttcatgatcaccagcacctactacatctgcgagagctgcgacaagcagttcaccagcgtggacgacctgcagaagcacctgctggacatgcacaccttcgtgttcttcagatgcaccctgtgccaggaggtgttcgacagcaaggtgagcatccagctgcacctggccgtgaagcacagcaacgagaagaaggtgtacagatgcaccagctgcaactgggacttcagaaacgagaccgacctgcagctgcacgtgaagcacaaccacctggagaaccagggcaaggtgcacaagtgcatcttctgcggcgagagcttcggcaccgaggtggagctgcagtgccacatcaccacccacagcaagaagtacaactgcaagttctgcagcaaggccttccacgccatcatcctgctggagaagcacctgagagagaagcactgcgtgttcgagaccaagacccccaactgcggcaccaacggcgccagcgagcaggtgcagaaggaggaggtggagctgcagaccctgctgaccaacagccaggagagccacaacagccacgacggcagcgaggaggacgtggacaccagcgagcccatgtacggctgcgacatctgcggcgccgcctacaccatggagaccctgctgcagaaccaccagctgagagaccacaacatcagacccggcgagagcgccatcgtgaagaagaaggccgagctgatcaagggcaactacaagtgcaacgtgtgcagcagaaccttcttcagcgagaacggcctgagagagcacatgcagacccacctgggccccgtgaagcactacatgtgccccatctgcggcgagagattccccagcctgctgaccctgaccgagcacaaggtgacccacagcaagagcctggacaccggcaactgcagaatctgcaagatgcccctgcagagcgaggaggagttcctggagcactgccagatgcaccccgacctgagaaacagcctgaccggcttcagatgcgtggtgtgcatgcagaccgtgaccagcaccctggagctgaagatccacggcaccttccacatgcagaagaccggcaacggcagcgccgtgcagaccaccggcagaggccagcacgtgcagaagctgtacaagtgcgccagctgcctgaaggagttcagaagcaagcaggacctggtgaagctggacatcaacggcctgccctacggcctgtgcgccggctgcgtgaacctgagcaagagcgccagccccggcatcaacgtgccccccggcaccaacagacccggcctgggccagaacgagaacctgagcgccatcgagggcaagggcaaggtgggcggcctgaagaccagatgcagcagctgcaacgtgaagttcgagagcgagagcgagctgcagaaccacatccagaccatccacagagagctggtgcccgacagcaacagcacccagctgaagaccccccaggtgagccccatgcccagaatcagccccagccagagcgacgagaagaagacctaccagtgcatcaagtgccagatggtgttctacaacgagtgggacatccaggtgcacgtggccaaccacatgatcgacgagggcctgaaccacgagtgcaagctgtgcagccagaccttcgacagccccgccaagctgcagtgccacctgatcgagcacagcttcgagggcatgggcggcaccttcaagtgccccgtgtgcttcaccgtgttcgtgcaggccaacaagctgcagcagcacatcttcagcgcccacggccaggaggacaagatctacgactgcacccagtgcccccagaagttcttcttccagaccgagctgcagaaccacaccatgacccagcacagcagctag

SEQ ID NO: 186874 - DNA, 3936 bp, Artificial Sequence
  derived and/or modified sequence
atcagcagagcccagaaggcccagaccagaagactgaacgaccccaactgcaagctggaggacaagaccgaggacggcgaggccctggactgcaagaagagacccgaggacggcgaggagctggaggacgaggccgtgcacagctgcgacagctgcctgcaggtgttcgagagcctgagcgacatcaccgagcacaagatcaaccagtgccagctgaccgacggcgtggacgtggaggacgaccccacctgcagctggcccgccagcagccccagcagcaaggaccagaccagccccagccacggcgagggctgcgacttcggcgaggaggagggcggccccggcctgccctacccctgccagttctgcgacaagagcttcagcagactgagctacctgaagcaccacgagcagagccacagcgacaagctgcccttcaagtgcacctactgcagcagactgttcaagcacaagagaagcagagacagacacatcaagctgcacaccggcgacaagaagtaccactgcagcgagtgcgacgccgccttcagcagaagcgaccacctgaagatccacctgaagacccacaccagcaacaagccctacaagtgcgccatctgcagaagaggcttcctgagcagcagcagcctgcacggccacatgcaggtgcacgagagaaacaaggacggcagccagagcggcagcagaatggaggactggaagatgaaggacacccagaagtgcagccagtgcgaggagggcttcgacttccccgaggacctgcagaagcacatcgccgagtgccaccccgagtgcagccccaacgaggacagagccgccctgcagtgcgtgtactgccacgagctgttcgtggaggagaccagcctgatgaaccacatggagcaggtgcacagcggcgagaagaagaacagctgcagcatctgcagcgagagcttccacaccgtggaggagctgtacagccacatggacagccaccagcagcccgagagctgcaaccacagcaacagccccagcctggtgaccgtgggctacaccagcgtgagcagcaccacccccgacagcaacctgagcgtggacagcagcaccatggtggaggccgccccccccatccccaagagcagaggcagaaagagagccgcccagcagacccccgacatgaccggccccagcagcaagcaggccaaggtgacctacagctgcatctactgcaacaagcagctgttcagcagcctggccgtgctgcagatccacctgaagaccatgcacctggacaagcccgagcaggcccacatctgccagtactgcctggaggtgctgcccagcctgtacaacctgaacgagcacctgaagcaggtgcacgaggcccaggaccccggcctgatcgtgagcgccatgcccgccatcgtgtaccagtgcaacttctgcagcgaggtggtgaacgacctgaacaccctgcaggagcacatcagatgcagccacggcttcgccaaccccgccgccaaggacagcaacgccttcttctgcccccactgctacatgggcttcctgaccgacagcagcctggaggagcacatcagacaggtgcactgcgacctgagcggcagcagattcggcagccccgtgctgggcacccccaaggagcccgtggtggaggtgtacagctgcagctactgcaccaacagccccatcttcaacagcgtgctgaagctgaacaagcacatcaaggagaaccacaagaacatccccctggccctgaactacatccacaacggcaagaagagcagagccctgagccccctgagccccgtggccatcgagcagaccagcctgaagatgatgcaggccgtgggcggcgcccccgccagacccaccggcgagtacatctgcaaccagtgcggcgccaagtacaccagcctggacagcttccagacccacctgaagacccacctggacaccgtgctgcccaagctgacctgcccccagtgcaacaaggagttccccaaccaggagagcctgctgaagcacgtgaccatccacttcatgatcaccagcacctactacatctgcgagagctgcgacaagcagttcaccagcgtggacgacctgcagaagcacctgctggacatgcacaccttcgtgttcttcagatgcaccctgtgccaggaggtgttcgacagcaaggtgagcatccagctgcacctggccgtgaagcacagcaacgagaagaaggtgtacagatgcaccagctgcaactgggacttcagaaacgagaccgacctgcagctgcacgtgaagcacaaccacctggagaaccagggcaaggtgcacaagtgcatcttctgcggcgagagcttcggcaccgaggtggagctgcagtgccacatcaccacccacagcaagaagtacaactgcaagttctgcagcaaggccttccacgccatcatcctgctggagaagcacctgagagagaagcactgcgtgttcgagaccaagacccccaactgcggcaccaacggcgccagcgagcaggtgcagaaggaggaggtggagctgcagaccctgctgaccaacagccaggagagccacaacagccacgacggcagcgaggaggacgtggacaccagcgagcccatgtacggctgcgacatctgcggcgccgcctacaccatggagaccctgctgcagaaccaccagctgagagaccacaacatcagacccggcgagagcgccatcgtgaagaagaaggccgagctgatcaagggcaactacaagtgcaacgtgtgcagcagaaccttcttcagcgagaacggcctgagagagcacatgcagacccacctgggccccgtgaagcactacatgtgccccatctgcggcgagagattccccagcctgctgaccctgaccgagcacaaggtgacccacagcaagagcctggacaccggcaactgcagaatctgcaagatgcccctgcagagcgaggaggagttcctggagcactgccagatgcaccccgacctgagaaacagcctgaccggcttcagatgcgtggtgtgcatgcagaccgtgaccagcaccctggagctgaagatccacggcaccttccacatgcagaagaccggcaacggcagcgccgtgcagaccaccggcagaggccagcacgtgcagaagctgtacaagtgcgccagctgcctgaaggagttcagaagcaagcaggacctggtgaagctggacatcaacggcctgccctacggcctgtgcgccggctgcgtgaacctgagcaagagcgccagccccggcatcaacgtgccccccggcaccaacagacccggcctgggccagaacgagaacctgagcgccatcgagggcaagggcaaggtgggcggcctgaagaccagatgcagcagctgcaacgtgaagttcgagagcgagagcgagctgcagaaccacatccagaccatccacagagagctggtgcccgacagcaacagcacccagctgaagaccccccaggtgagccccatgcccagaatcagccccagccagagcgacgagaagaagacctaccagtgcatcaagtgccagatggtgttctacaacgagtgggacatccaggtgcacgtggccaaccacatgatcgacgagggcctgaaccacgagtgcaagctgtgcagccagaccttcgacagccccgccaagctgcagtgccacctgatcgagcacagcttcgagggcatgggcggcaccttcaagtgccccgtgtgcttcaccgtgttcgtgcaggccaacaagctgcagcagcacatcttcagcgcccacggccaggaggacaagatctacgactgcacccagtgcccccagaagttcttcttccagaccgagctgcaggtgcacaccgccacccccagacagagctag

SEQ ID NO: 186875 - DNA, 4038 bp, Artificial Sequence
  derived and/or modified sequence
ttcctgagcgactacgtgcagagcgagagcctgagagtgagaggccccctgtggagccaccccgacggcttcggcggcctggccagcatcttccactactacgtggactacagaagcgacagcgccgtgcaggacctggccgaccccaactgcaagctggaggacaagaccgaggacggcgaggccctggactgcaagaagagacccgaggacggcgaggagctggaggacgaggccgtgcacagctgcgacagctgcctgcaggtgttcgagagcctgagcgacatcaccgagcacaagatcaaccagtgccagctgaccgacggcgtggacgtggaggacgaccccacctgcagctggcccgccagcagccccagcagcaaggaccagaccagccccagccacggcgagggctgcgacttcggcgaggaggagggcggccccggcctgccctacccctgccagttctgcgacaagagcttcagcagactgagctacctgaagcaccacgagcagagccacagcgacaagctgcccttcaagtgcacctactgcagcagactgttcaagcacaagagaagcagagacagacacatcaagctgcacaccggcgacaagaagtaccactgcagcgagtgcgacgccgccttcagcagaagcgaccacctgaagatccacctgaagacccacaccagcaacaagccctacaagtgcgccatctgcagaagaggcttcctgagcagcagcagcctgcacggccacatgcaggtgcacgagagaaacaaggacggcagccagagcggcagcagaatggaggactggaagatgaaggacacccagaagtgcagccagtgcgaggagggcttcgacttccccgaggacctgcagaagcacatcgccgagtgccaccccgagtgcagccccaacgaggacagagccgccctgcagtgcgtgtactgccacgagctgttcgtggaggagaccagcctgatgaaccacatggagcaggtgcacagcggcgagaagaagaacagctgcagcatctgcagcgagagcttccacaccgtggaggagctgtacagccacatggacagccaccagcagcccgagagctgcaaccacagcaacagccccagcctggtgaccgtgggctacaccagcgtgagcagcaccacccccgacagcaacctgagcgtggacagcagcaccatggtggaggccgccccccccatccccaagagcagaggcagaaagagagccgcccagcagacccccgacatgaccggccccagcagcaagcaggccaaggtgacctacagctgcatctactgcaacaagcagctgttcagcagcctggccgtgctgcagatccacctgaagaccatgcacctggacaagcccgagcaggcccacatctgccagtactgcctggaggtgctgcccagcctgtacaacctgaacgagcacctgaagcaggtgcacgaggcccaggaccccggcctgatcgtgagcgccatgcccgccatcgtgtaccagtgcaacttctgcagcgaggtggtgaacgacctgaacaccctgcaggagcacatcagatgcagccacggcttcgccaaccccgccgccaaggacagcaacgccttcttctgcccccactgctacatgggcttcctgaccgacagcagcctggaggagcacatcagacaggtgcactgcgacctgagcggcagcagattcggcagccccgtgctgggcacccccaaggagcccgtggtggaggtgtacagctgcagctactgcaccaacagccccatcttcaacagcgtgctgaagctgaacaagcacatcaaggagaaccacaagaacatccccctggccctgaactacatccacaacggcaagaagagcagagccctgagccccctgagccccgtggccatcgagcagaccagcctgaagatgatgcaggccgtgggcggcgcccccgccagacccaccggcgagtacatctgcaaccagtgcggcgccaagtacaccagcctggacagcttccagacccacctgaagacccacctggacaccgtgctgcccaagctgacctgcccccagtgcaacaaggagttccccaaccaggagagcctgctgaagcacgtgaccatccacttcatgatcaccagcacctactacatctgcgagagctgcgacaagcagttcaccagcgtggacgacctgcagaagcacctgctggacatgcacaccttcgtgttcttcagatgcaccctgtgccaggaggtgttcgacagcaaggtgagcatccagctgcacctggccgtgaagcacagcaacgagaagaaggtgtacagatgcaccagctgcaactgggacttcagaaacgagaccgacctgcagctgcacgtgaagcacaaccacctggagaaccagggcaaggtgcacaagtgcatcttctgcggcgagagcttcggcaccgaggtggagctgcagtgccacatcaccacccacagcaagaagtacaactgcaagttctgcagcaaggccttccacgccatcatcctgctggagaagcacctgagagagaagcactgcgtgttcgagaccaagacccccaactgcggcaccaacggcgccagcgagcaggtgcagaaggaggaggtggagctgcagaccctgctgaccaacagccaggagagccacaacagccacgacggcagcgaggaggacgtggacaccagcgagcccatgtacggctgcgacatctgcggcgccgcctacaccatggagaccctgctgcagaaccaccagctgagagaccacaacatcagacccggcgagagcgccatcgtgaagaagaaggccgagctgatcaagggcaactacaagtgcaacgtgtgcagcagaaccttcttcagcgagaacggcctgagagagcacatgcagacccacctgggccccgtgaagcactacatgtgccccatctgcggcgagagattccccagcctgctgaccctgaccgagcacaaggtgacccacagcaagagcctggacaccggcaactgcagaatctgcaagatgcccctgcagagcgaggaggagttcctggagcactgccagatgcaccccgacctgagaaacagcctgaccggcttcagatgcgtggtgtgcatgcagaccgtgaccagcaccctggagctgaagatccacggcaccttccacatgcagaagaccggcaacggcagcgccgtgcagaccaccggcagaggccagcacgtgcagaagctgtacaagtgcgccagctgcctgaaggagttcagaagcaagcaggacctggtgaagctggacatcaacggcctgccctacggcctgtgcgccggctgcgtgaacctgagcaagagcgccagccccggcatcaacgtgccccccggcaccaacagacccggcctgggccagaacgagaacctgagcgccatcgagggcaagggcaaggtgggcggcctgaagaccagatgcagcagctgcaacgtgaagttcgagagcgagagcgagctgcagaaccacatccagaccatccacagagagctggtgcccgacagcaacagcacccagctgaagaccccccaggtgagccccatgcccagaatcagccccagccagagcgacgagaagaagacctaccagtgcatcaagtgccagatggtgttctacaacgagtgggacatccaggtgcacgtggccaaccacatgatcgacgagggcctgaaccacgagtgcaagctgtgcagccagaccttcgacagccccgccaagctgcagtgccacctgatcgagcacagcttcgagggcatgggcggcaccttcaagtgccccgtgtgcttcaccgtgttcgtgcaggccaacaagctgcagcagcacatcttcagcgcccacggccaggaggacaagatctacgactgcacccagtgcccccagaagttcttcttccagaccgagctgcaggtgcacaccgccacccccagacagagctag

SEQ ID NO: 186876 - DNA, 3936 bp, Artificial Sequence
  derived and/or modified sequence
atgagtaggaggaagcaagccaaaccccgatcactgaaagacccaaattgcaagctcgaagataagacagaggacggagaagcactggattgcaaaaagcggcccgaggacggagaagaactcgaggacgaggctgttcacagttgcgactcctgtctgcaagtgttcgaaagcctctcagacataacagagcacaaaatcaatcagtgccaactcaccgatggggtggatgtggaagacgaccccacatgtagttggcccgcctcaagcccttcttctaaagaccagacctctccttctcatggagaaggctgtgatttcggcgaagaggagggaggacctggactgccttatccctgtcagttttgtgataagtctttctcccggctttcatacctcaagcaccacgaacagagccactccgacaagctgccattcaaatgcacatattgtagtcgactgttcaagcacaaacggtctcgggataggcacatcaaactccacaccggagataaaaagtaccattgttctgaatgtgatgctgctttcagccggtccgatcatcttaaaattcacctgaagacgcacaccagcaataaaccctataagtgcgccatctgcagaagggggttcctttccagctctagcctgcatggccacatgcaagtgcatgagagaaataaggatggcagccagtcaggtagcaggatggaggactggaagatgaaagacacgcaaaagtgttctcagtgcgaggagggcttcgactttcctgaagatcttcagaaacacatcgccgaatgtcaccctgagtgctctcctaacgaggatagagctgccctacagtgcgtctattgccatgaactatttgtggaggagacaagcctaatgaaccacatggaacaagtccacagcggggagaaaaaaaacagttgctctatttgcagcgagtcattccacaccgtcgaggagctctatagtcacatggattctcatcaacagcccgaatcctgtaaccatagtaatagcccctctttggtaacagtgggatacacatctgtgtcatctaccacccctgacagcaacctaagcgtggactcatctactatggtggaggccgccccaccaattcctaaaagccgaggccggaagcgggcagctcagcagactcccgacatgacgggtccatcctccaagcaggctaaggtgacttactcttgtatttactgcaataaacagctttttagctccctcgccgtgctgcaaatccatttgaagaccatgcatctggacaaaccagagcaggcccatatctgccagtattgtctcgaggtgcttccatcattgtacaatttgaatgagcatctgaagcaggttcatgaggctcaggacccaggcctcattgtgtcagccatgcccgccatcgtctaccaatgcaacttttgctcggaagtagtgaatgatctgaacaccttgcaggaacacatcaggtgcagtcatgggttcgctaatccagccgcgaaagactctaatgcattcttctgtcctcactgttatatgggatttctgaccgacagcagtctcgaagaacatatacgtcaagtgcattgcgatctcagtggtagtcggtttggcagccctgtcctggggacacccaaggagcccgttgtcgaagtctattcttgttcgtattgtactaatagcccaattttcaactccgtactcaagctgaataaacacattaaggagaaccacaaaaacattcctctggctctgaactatattcacaatgggaaaaagagtagggctctaagcccccttagccctgtagctatcgaacaaactagtctcaagatgatgcaggcagtgggtggcgcccctgctcgtcccacgggagaatatatatgcaatcaatgcggtgccaaatacacctccttggactcctttcaaacacacttaaagactcatctggacaccgtccttcccaagcttacatgtccccaatgtaacaaagagttcccgaatcaggagtccctgcttaagcatgtgacaatccacttcatgatcacatccacctactatatctgcgagtcttgcgacaagcaattcacctccgtggacgacctccagaaacacctcctggacatgcacacattcgtgttcttccggtgtaccctgtgtcaggaggtgttcgattcaaaagtcagtatccagctccatctggcggtgaaacactcgaatgaaaagaaggtttacagatgtacatcctgcaactgggactttcgcaacgagactgatctccagctgcacgttaagcacaatcacctcgagaaccaaggcaaggtccacaaatgtattttttgtggcgagagcttcggaacagaggtggaactgcagtgtcatatcaccacgcactccaaaaaatataattgtaagttttgctctaaggccttccacgcaattatcttgctggaaaagcacttacgggagaagcactgcgtctttgaaactaagacacctaactgtggaacaaatggagccagcgagcaggtgcagaaggaggaggtcgagctacagactttactgacaaactctcaagagtcacataattcccacgatggcagcgaggaggacgtggacactagtgaaccgatgtatgggtgtgacatctgcggcgcagcctacactatggagactctgctccagaatcaccagctgcgagatcacaatataaggccaggagagagcgccatcgttaaaaaaaaagccgaactcattaagggcaattataagtgcaacgtatgttcccggacgtttttcagtgagaatggtttgcgggagcacatgcagacccatctgggccctgttaagcactacatgtgtccaatctgcggggagcgctttccctctttactcactctgaccgagcacaaggtcacgcatagcaagtccctggataccgggaattgcagaatttgtaaaatgcccttgcagtccgaagaagagttcttagagcactgtcagatgcacccagacttgcggaactcactaacgggctttcgctgcgtggtctgcatgcagaccgtcacaagtacgcttgagcttaaaatccacggcacgtttcacatgcagaagaccgggaacggtagcgccgtgcagactaccggaagaggacagcatgtccaaaagctgtacaaatgcgcttcctgtctgaaagagtttcgcagcaagcaggatttggtgaagctggacatcaacgggctcccttatggcctttgcgcaggctgtgtgaacttgagtaagagcgccagtcctggcatcaacgttccacctgggactaaccgccctggactcggtcagaatgaaaatctcagtgccatcgaaggaaaaggaaaagttggtggtctcaaaaccagatgctcctcttgcaatgtgaaatttgagagtgaatctgaattgcagaaccacatccagaccatccatagggaacttgtccctgattcaaattctacccagctgaaaacacctcaggtgtcacctatgcctagaatttctccaagccagagtgacgagaagaagacatatcagtgtatcaaatgtcagatggtgttctacaatgagtgggatatccaggtgcacgtggcaaatcatatgatcgatgaggggctgaaccatgagtgtaaactgtgttctcagacatttgacagtcccgctaagctgcagtgtcatttaattgagcacagctttgagggaatgggcgggacctttaagtgccctgtctgtttcactgtgttcgtgcaggcgaacaaactacagcagcacatcttttcggctcacggacaggaagacaagatatacgactgcacgcagtgtcctcaaaaatttttcttccagaccgagctgcagaatcacaccatgacacaacactctagctag

SEQ ID NO: 186877 - DNA, 3936 bp, Artificial Sequence
  derived and/or modified sequence
atatctagagctcagaaagcacagactcggcggctcaatgatcccaactgtaaattggaggacaagaccgaagacggtgaagcccttgactgcaaaaagaggccggaagatggtgaggaattggaggacgaagccgttcacagctgtgacagctgcctccaggtgttcgaatctttaagcgacattacagagcacaagatcaaccaatgtcagctgaccgatggggttgatgttgaggatgaccccacctgcagctggcctgcatcgtcacctagttctaaggatcaaacttcaccctcacatggcgaggggtgtgatttcggggaggaggaaggcggccccggtttgccctacccttgccagttttgtgacaaatccttcagccggctgagctacctgaaacaccacgagcagtcacattctgataagctgcctttcaaatgtacctattgcagtaggctattcaagcacaagagatccagagacaggcatattaagctgcataccggagataagaagtaccactgttcagagtgtgacgcggctttctccaggagcgaccacctgaaaattcacctcaaaacccacacatccaacaagccgtacaagtgtgctatatgcaggcgaggctttctctcatcctcctcactgcacggacatatgcaagtgcacgagagaaacaaagatggctcgcagagcggatcaagaatggaagattggaagatgaaggatacacagaaatgttcccagtgtgaggagggcttcgactttccagaggatctgcaaaagcatattgctgagtgccaccccgagtgtagccctaatgaagatcgcgcggcgttacagtgcgtctattgccacgaactgttcgtcgaggaaacaagtctgatgaatcacatggagcaggttcactctggggagaaaaagaatagttgctcaatatgttccgaatcgtttcacaccgtggaggaactgtattcacatatggatagtcaccagcagcccgagagctgtaaccatagcaactccccctcactggtcaccgttggttatacaagcgtgtccagcactaccccggacagtaacctctcagttgacagttcaacaatggtcgaggccgctcccccaatacctaagagtcgaggacgaaagagggcagctcagcaaactccagatatgacaggtcctagtagcaagcaggctaaggttacctattcttgcatctactgcaataaacaattgttttcttctctcgccgtgctgcagatacaccttaagaccatgcacttggacaagcccgagcaagcccatatttgccagtactgccttgaggtgctgccgtccctatacaacttgaacgagcacctgaaacaggtacatgaagcgcaggatccaggattgattgtgagtgctatgcccgccatagtgtaccagtgcaacttttgttcagaggtggtgaacgatcttaatacgttacaggagcacattcgatgctctcatggatttgcaaatccagctgcaaaggactccaatgcctttttctgcccccactgttatatgggctttttgactgatagtagtctcgaggagcatattcgccaggttcactgtgatctatccgggtcaaggttcggcagcccagtattagggacacccaaagagcctgtggttgaagtatattcctgttcctactgtacaaacagcccaatttttaactccgtcctcaagctgaacaagcacattaaggaaaatcataagaacataccactggctctgaactatattcacaacggtaaaaagagcagagcactgtccccactgtctccagtggcgatagaacagacgagcctgaaaatgatgcaggcggtcggtggtgctcccgctaggccgactggtgagtacatttgcaaccagtgcggggcaaagtacacgtccctggatagttttcagacccatttgaaaacccacctagatacagtcctgcctaaattgacctgcccacagtgcaacaaggaattcccaaaccaagaaagcctgctgaagcatgtgaccatacatttcatgatcacatccacttactacatctgtgaaagctgcgataaacagttcacctccgttgatgatttgcaaaaacacctcttggatatgcatacatttgtattcttcaggtgcaccttgtgccaagaggtgttcgattcgaaagtgagcattcaactacacctggcagtgaagcacagcaatgagaaaaaggtgtaccgctgtacaagctgtaattgggatttccgtaacgagactgatttgcagctgcacgtcaagcacaaccatctcgagaatcagggaaaagtccacaagtgtattttctgcggggaatcttttggaactgaagtcgagctgcagtgtcatatcaccactcatagcaagaaatacaattgtaagttttgttcaaaagcttttcacgctattattcttctggaaaagcacctcagagaaaagcactgcgtatttgaaacaaagacacctaactgcggaaccaatggagccagcgaacaggtgcagaaagaggaggtcgagctgcagactttgctgacaaactctcaggagtcacataatagccacgatgggagcgaagaagatgtggataccagcgagccaatgtacggctgtgatatttgcggcgccgcctatactatggagactctcctacagaatcaccagttgcgagaccacaacatccgccctggagagtccgccatagtgaaaaagaaagctgagctgatcaaggggaactacaagtgcaacgtctgctcgcgcacctttttttccgagaatggcctccgcgagcacatgcaaacgcacctcggcccagtgaaacactatatgtgtccaatttgcggagagcggttcccatcactcctgacactgacagagcacaaagtgactcacagtaaaagcttggacaccggcaattgtcgcatctgcaagatgcccctgcagtccgaagaggagtttctggagcattgccagatgcatcccgacctgcggaattcactgacaggattcaggtgcgtggtgtgcatgcagacagtcacaagcacgcttgagctaaaaattcacggaacatttcatatgcaaaaaacaggcaacggtagtgccgtccagaccacaggtcgcggacagcacgtgcagaaactttataaatgcgcctcttgcctcaaggagttccggagtaagcaggatttagtgaaactggacattaacggccttccttacggtctgtgtgccggatgtgtgaatttaagcaaatcagcttctccaggtataaatgttcccccggggaccaatcgcccaggactggggcagaatgagaacctgtccgccatcgaggggaaggggaaggtgggaggcctgaagacaagatgctccagttgtaatgtcaaattcgaatctgaatccgaattgcagaatcacattcagacgattcaccgcgagctcgtgcccgactctaatagtacacaactgaagacacctcaggtgtcacctatgcctaggatatcccccagccaatctgatgagaaaaaaacttatcaatgcatcaaatgtcaaatggtgttctataacgaatgggatatacaagtccacgtcgccaatcacatgattgatgagggcctcaatcacgagtgtaagctttgcagccagaccttcgacagccccgctaagctgcaatgtcatctgattgagcacagtttcgagggtatgggcggtacgtttaagtgccctgtgtgtttcacagtcttcgtccaggccaacaagctgcagcagcacattttctctgctcacggccaggaagacaagatctacgactgcacccagtgtcctcaaaagtttttttttcagaccgaactgcaggtgcatacagccaccccccgtcagtcttag

SEQ ID NO: 186878 - DNA, 4038 bp, Artificial Sequence
  derived and/or modified sequence
ttcctgagcgactacgttcagagtgaatcactgagggtaagaggaccactgtggtctcatcccgatggattcggcgggttggcatctattttccactactacgttgattataggtctgatagcgctgtgcaggatctggccgatcccaactgcaaactggaagacaagacagaggatggagaggcccttgattgtaaaaaaaggccagaggacggagaggaactggaagatgaggccgtccactcctgtgacagttgtcttcaagtctttgaatctctctccgacatcacggagcacaagataaaccaatgtcagttaacagatggtgtcgacgtagaagatgaccccacttgttcttggcctgctagtagccccagttctaaggaccagacttccccaagccatggggaagggtgcgactttggggaagaggaggggggccccggactgccatacccatgccagttctgtgataagtcattctctagactctcttatctgaaacaccatgagcagtctcacagcgataaactacctttcaagtgcacatattgttctcgtttgttcaaacataaacgctcacgtgaccgacacatcaagctccacacaggcgacaagaaatatcattgctcagaatgtgatgcggctttttcacggtcagaccacctgaagatccacctgaaaactcataccagtaataaaccttacaaatgcgctatttgtcgaaggggctttctctcatcgtccagcttgcacgggcatatgcaggttcatgaaaggaacaaagatggctcgcagtcaggatcccgaatggaggattggaagatgaaagacacgcagaaatgctcacaatgtgaggagggcttcgatttccccgaggatcttcaaaaacacattgccgagtgtcacccagagtgttcccctaatgaggaccgtgccgcactgcagtgtgtatactgccacgaactgtttgtggaggaaacctccttgatgaaccacatggaacaggtacactccggtgaaaagaaaaacagttgctctatttgctctgagtctttccatactgtcgaggaactgtactcccatatggactctcaccaacagcccgagtcatgcaaccactcaaactccccgagcctcgtgaccgttgggtacacaagcgtttcctctactacacctgactcaaacctctcagtggatagctccacgatggtggaggctgccccacctatacctaagtcacgtggtcgcaagcgggctgcacagcagaccccggatatgaccggcccttcttccaaacaggccaaagtgacttatagctgtatctactgtaacaaacagctgtttagctccctggccgtgcttcaaattcatcttaagacaatgcaccttgataagccagaacaggcgcacatttgccaatattgcctcgaggtcctcccaagtctatacaacctaaacgagcatcttaaacaggtacacgaggcgcaggatcctggtcttattgtgtccgcgatgccagctatcgtctaccagtgcaacttttgttcagaggtcgttaacgatctgaatactctccaagaacatattcggtgttcccatggatttgccaatcccgcagcgaaggactccaatgcttttttttgcccacattgctacatgggttttttgacggattcaagtttagaagagcatatcagacaagttcactgcgatctgtccgggtcacgctttggttcccccgtactcgggacacccaaagagccagtggtagaggtgtacagttgcagctattgtacaaattcacctattttcaattctgtactcaaactgaataagcacattaaggagaaccataagaatatacctttggccttgaactacattcacaacggcaaaaaaagccgagccctgagccccctgtccccggttgcaatcgaacagaccagtctcaagatgatgcaggcagtcgggggagctcctgcgcgtcctaccggcgaatacatctgcaaccagtgtggcgccaagtacacaagcctggactcatttcagacccatttaaagacacatcttgataccgtgctcccaaagctgacatgcccgcagtgcaataaggagttcccgaaccaagaatctctgctcaagcatgtgacaattcattttatgatcacatcaacctattacatctgcgagagctgtgataagcagttcacaagcgtggatgacctgcagaaacatctgctggacatgcacacctttgtcttcttccgctgtaccctgtgccaggaggtgtttgactctaaggtaagcatccaacttcacttggcagtgaaacatagtaatgagaagaaagtttacagatgcacgagctgtaactgggactttaggaacgagaccgacctgcagctgcatgtcaagcataaccatcttgagaaccagggtaaggtgcacaaatgtattttctgtggggagagttttgggaccgaagtggagctccaatgtcacattacaacccacagtaagaagtacaactgcaagttttgttcaaaagctttccacgctatcatcctgctggagaagcacctgcgggagaaacactgcgtctttgagacaaaaacgccaaattgcggaactaacggagctagcgagcaagtgcagaaggaagaggtggagctgcaaaccctgctgacaaatagtcaggaaagccataatagccatgacgggagtgaggaagacgtcgatacatcagagcccatgtatggctgtgatatctgtggcgcagcctacactatggaaaccctgctgcagaatcatcagctgcgggaccacaacatccggccaggcgaaagcgcgattgtaaagaaaaaagcggagcttattaagggcaattacaaatgcaacgtgtgctctcggactttcttctctgagaacggcctccgcgagcacatgcagactcatcttggaccagtgaaacactacatgtgcccgatttgcggcgagcgcttcccgagcctgctgactttgacagagcacaaggtgacgcacagcaaaagcctcgatacaggtaactgtagaatatgcaaaatgcctttgcagagtgaggaggagtttctggagcattgtcaaatgcaccccgatctccgcaattctcttaccggattccgctgcgttgtctgcatgcagacagtgacttccactctggaactgaagatccacggaacttttcacatgcagaaaacgggaaacggaagtgcagtgcagacaactggaaggggccagcacgtgcagaagctctataaatgcgcctcctgcctgaaagagttccgcagcaaacaagatctggtcaagttggatatcaacggtcttccctacggcctttgtgcgggctgcgtgaacctgtccaagagcgcctctcccggcattaatgtgccacctggcaccaacagacccggactcggccagaacgaaaacctgtcagctatcgagggtaaaggcaaggttggagggctcaaaacccgctgtagctcttgtaacgtcaaatttgaaagcgagagcgagctgcagaaccacatccaaactattcatagggaactggtgcccgactcaaacagcacccagctcaagactccccaggtgtcaccaatgcctcgtatctccccatcacaaagcgatgaaaaaaagacttaccagtgcatcaaatgccagatggttttttacaacgagtgggatattcaggtgcacgtggctaatcatatgatagatgagggcttgaatcacgaatgtaagctgtgtagccagaccttcgactctcctgccaagctccaatgtcacctgatcgagcactcattcgagggaatgggcgggaccttcaagtgccctgtctgtttcacggtctttgtgcaggcaaataaactacagcagcatatcttttctgctcacgggcaggaggataaaatatacgactgtacccagtgccctcagaagttcttttttcagacagagttacaggtgcataccgccactcctcgtcaatcatag

SEQ ID NO: 186879 - DNA, 3936 bp, Artificial Sequence
  derived and/or modified sequence
atgagcaggaggaagcaggccaagcccaggagcctgaaggaccccaactgcaagctggaggacaagacagaagatggagaggccctggactgcaagaagaggccagaagatggagaggagctggaggatgaagctgtgcacagctgtgacagctgcctgcaggtgtttgagagcctgagtgacatcacagagcacaagatcaaccagtgccagctgacagatggagtggatgtggaggatgaccccacctgctcctggccagccagcagccccagcagcaaggaccagaccagccccagccatggagagggctgtgactttggagaggaggagggcggccctggcctgccctacccctgccagttctgtgacaagagcttcagccggctgagctacctgaagcaccacgagcagagccacagcgacaagctgcccttcaagtgcacctactgcagccgcctcttcaagcacaagaggagccgggacagacacatcaagctgcacactggagacaagaagtaccactgcagtgaatgtgatgctgccttcagcagaagtgaccacctgaagatccacctgaagacccacaccagcaacaagccctacaagtgtgccatctgccggcggggcttcctgagcagcagcagcctgcacggccacatgcaggtgcatgagaggaacaaggatggcagccagagcggcagcaggatggaggactggaagatgaaggacacccagaagtgcagccagtgtgaggagggctttgacttccctgaggacctgcagaagcacatcgccgagtgccacccagaatgtagccccaatgaagatagagctgccctgcagtgtgtgtactgccacgagctgtttgtggaggagaccagcctgatgaaccacatggagcaggtgcacagcggggagaagaagaacagctgcagcatctgcagcgagagcttccacacagtggaggagctgtacagccacatggacagccaccagcagcctgagagctgcaaccacagcaacagccccagcctggtgacagtgggctacacctctgtgagcagcaccaccccagacagcaacctgtctgtggacagcagcaccatggtggaggccgccccacccatccccaagagccggggcaggaagagagctgcccagcagaccccagacatgacaggccccagcagcaagcaggccaaggtgacctacagctgcatctactgcaacaagcagctgttcagcagcctggccgtgctgcagatccacctgaagaccatgcacctggacaagccagagcaggcccacatctgccagtactgcctggaggtgctgcccagcctgtacaacctgaatgagcacctgaagcaggtgcatgaggcccaggaccccggcctcatcgtgtctgccatgcctgccatcgtgtaccagtgcaacttctgcagcgaggtggtgaatgacctgaacaccctgcaggagcacatccgctgcagccacggctttgccaacccagctgccaaggacagcaatgccttcttctgcccccactgctacatgggcttcctgacagacagcagcctggaggagcacatccggcaggtgcactgtgacctgagcggcagccgcttcggcagccctgtgctgggcacccccaaggagcctgtggtggaggtgtacagctgcagctactgcaccaacagccccatcttcaacagcgtgctgaagctgaacaagcacatcaaggagaaccacaagaacatccccctggccctgaactacatccacaacgggaagaagagccgggccctgagccccctgagccctgtggccatcgagcagaccagcctgaagatgatgcaggccgtgggcggggccccagcccggcccactggagagtacatctgcaaccagtgtggggccaagtacaccagcctggacagcttccagacccacctgaagacccacctggacacagtgctgcccaagctgacctgcccccagtgcaacaaggagttccccaaccaggagagcctgctgaagcacgtgaccatccacttcatgatcaccagcacctactacatctgtgagagctgtgacaagcagttcacctctgtggatgacctgcagaagcacctgctggacatgcacacctttgtgttcttccgctgcaccctgtgccaggaggtgtttgacagcaaggtgtccatccagctgcacctggccgtgaagcacagcaatgagaagaaggtgtaccgctgcaccagctgcaactgggacttcagaaatgaaacagacctgcagctgcacgtgaagcacaaccacctggagaaccagggcaaggtgcacaagtgcatcttctgtggggagagctttggaacagaggtggagctgcagtgccacatcaccacccacagcaagaagtacaactgcaagttctgcagcaaggccttccacgccatcatcctgctggagaagcacctgcgggagaagcactgtgtgtttgagaccaagacccccaactgtggcaccaatggagccagcgagcaggtgcagaaggaggaggtggagctgcagaccctgctgaccaacagccaggagagccacaacagccatgatggctctgaagaagatgtggacaccagcgagcccatgtatggctgtgacatctgtggggccgcctacaccatggagaccctgctgcagaaccaccagctgcgggaccacaacatccggcctggagagagcgccatcgtgaagaagaaggccgagctgatcaagggcaactacaagtgcaatgtgtgcagcaggaccttcttctctgaaaatggcctgcgggagcacatgcagacccacctgggccctgtgaagcactacatgtgccccatctgtggggagcgcttccccagcctgctgaccctgacagagcacaaggtgacccacagcaagagcctggacaccggcaactgccgcatctgcaagatgcccctgcagagcgaggaggagttcctggagcactgccagatgcacccagacctgaggaacagcctgaccggcttccgctgtgtggtgtgcatgcagacagtgaccagcaccctggagctgaagatccacggcaccttccacatgcagaagacaggaaatggcagcgctgtgcagaccaccggccggggccagcacgtgcagaagctgtacaagtgtgccagctgcctgaaggagttccgcagcaagcaggacctggtgaagctggacatcaatggcctgccctacggcctgtgtgccggctgtgtgaacctgagcaagagcgccagccctggcatcaacgtgcccccaggcaccaaccggcccggcctgggccagaatgaaaacctgagcgccatcgagggcaagggcaaggtgggcggcctgaagacccgctgcagcagctgcaatgtgaagtttgaaagtgaaagtgagctgcagaaccacatccagaccatccaccgggagctggtgcctgacagcaacagcacccagctgaagaccccccaggtgagccccatgccccgcatcagccccagccagagtgatgagaagaagacctaccagtgcatcaagtgccagatggtgttctacaatgagtgggacatccaggtgcacgtggccaaccacatgattgatgagggcctgaaccacgagtgcaagctgtgcagccagacctttgacagccctgccaagctgcagtgccacctgattgagcacagctttgagggcatgggcggcaccttcaagtgccctgtgtgcttcaccgtgtttgtgcaggccaacaagctgcagcagcacatcttcagcgcccacggccaggaggacaagatctatgactgcacccagtgcccccagaagttcttcttccagacagagctgcagaaccacaccatgacccagcacagcagctag

SEQ ID NO: 186880 - DNA, 3936 bp, Artificial Sequence
  derived and/or modified sequence
atcagccgggcccagaaggcccagacccggcggctgaatgaccccaactgcaagctggaggacaagacagaagatggagaggccctggactgcaagaagaggccagaagatggagaggagctggaggatgaagctgtgcacagctgtgacagctgcctgcaggtgtttgagagcctgagtgacatcacagagcacaagatcaaccagtgccagctgacagatggagtggatgtggaggatgaccccacctgctcctggccagccagcagccccagcagcaaggaccagaccagccccagccatggagagggctgtgactttggagaggaggagggcggccctggcctgccctacccctgccagttctgtgacaagagcttcagccggctgagctacctgaagcaccacgagcagagccacagcgacaagctgcccttcaagtgcacctactgcagccgcctcttcaagcacaagaggagccgggacagacacatcaagctgcacactggagacaagaagtaccactgcagtgaatgtgatgctgccttcagcagaagtgaccacctgaagatccacctgaagacccacaccagcaacaagccctacaagtgtgccatctgccggcggggcttcctgagcagcagcagcctgcacggccacatgcaggtgcatgagaggaacaaggatggcagccagagcggcagcaggatggaggactggaagatgaaggacacccagaagtgcagccagtgtgaggagggctttgacttccctgaggacctgcagaagcacatcgccgagtgccacccagaatgtagccccaatgaagatagagctgccctgcagtgtgtgtactgccacgagctgtttgtggaggagaccagcctgatgaaccacatggagcaggtgcacagcggggagaagaagaacagctgcagcatctgcagcgagagcttccacacagtggaggagctgtacagccacatggacagccaccagcagcctgagagctgcaaccacagcaacagccccagcctggtgacagtgggctacacctctgtgagcagcaccaccccagacagcaacctgtctgtggacagcagcaccatggtggaggccgccccacccatccccaagagccggggcaggaagagagctgcccagcagaccccagacatgacaggccccagcagcaagcaggccaaggtgacctacagctgcatctactgcaacaagcagctgttcagcagcctggccgtgctgcagatccacctgaagaccatgcacctggacaagccagagcaggcccacatctgccagtactgcctggaggtgctgcccagcctgtacaacctgaatgagcacctgaagcaggtgcatgaggcccaggaccccggcctcatcgtgtctgccatgcctgccatcgtgtaccagtgcaacttctgcagcgaggtggtgaatgacctgaacaccctgcaggagcacatccgctgcagccacggctttgccaacccagctgccaaggacagcaatgccttcttctgcccccactgctacatgggcttcctgacagacagcagcctggaggagcacatccggcaggtgcactgtgacctgagcggcagccgcttcggcagccctgtgctgggcacccccaaggagcctgtggtggaggtgtacagctgcagctactgcaccaacagccccatcttcaacagcgtgctgaagctgaacaagcacatcaaggagaaccacaagaacatccccctggccctgaactacatccacaacgggaagaagagccgggccctgagccccctgagccctgtggccatcgagcagaccagcctgaagatgatgcaggccgtgggcggggccccagcccggcccactggagagtacatctgcaaccagtgtggggccaagtacaccagcctggacagcttccagacccacctgaagacccacctggacacagtgctgcccaagctgacctgcccccagtgcaacaaggagttccccaaccaggagagcctgctgaagcacgtgaccatccacttcatgatcaccagcacctactacatctgtgagagctgtgacaagcagttcacctctgtggatgacctgcagaagcacctgctggacatgcacacctttgtgttcttccgctgcaccctgtgccaggaggtgtttgacagcaaggtgtccatccagctgcacctggccgtgaagcacagcaatgagaagaaggtgtaccgctgcaccagctgcaactgggacttcagaaatgaaacagacctgcagctgcacgtgaagcacaaccacctggagaaccagggcaaggtgcacaagtgcatcttctgtggggagagctttggaacagaggtggagctgcagtgccacatcaccacccacagcaagaagtacaactgcaagttctgcagcaaggccttccacgccatcatcctgctggagaagcacctgcgggagaagcactgtgtgtttgagaccaagacccccaactgtggcaccaatggagccagcgagcaggtgcagaaggaggaggtggagctgcagaccctgctgaccaacagccaggagagccacaacagccatgatggctctgaagaagatgtggacaccagcgagcccatgtatggctgtgacatctgtggggccgcctacaccatggagaccctgctgcagaaccaccagctgcgggaccacaacatccggcctggagagagcgccatcgtgaagaagaaggccgagctgatcaagggcaactacaagtgcaatgtgtgcagcaggaccttcttctctgaaaatggcctgcgggagcacatgcagacccacctgggccctgtgaagcactacatgtgccccatctgtggggagcgcttccccagcctgctgaccctgacagagcacaaggtgacccacagcaagagcctggacaccggcaactgccgcatctgcaagatgcccctgcagagcgaggaggagttcctggagcactgccagatgcacccagacctgaggaacagcctgaccggcttccgctgtgtggtgtgcatgcagacagtgaccagcaccctggagctgaagatccacggcaccttccacatgcagaagacaggaaatggcagcgctgtgcagaccaccggccggggccagcacgtgcagaagctgtacaagtgtgccagctgcctgaaggagttccgcagcaagcaggacctggtgaagctggacatcaatggcctgccctacggcctgtgtgccggctgtgtgaacctgagcaagagcgccagccctggcatcaacgtgcccccaggcaccaaccggcccggcctgggccagaatgaaaacctgagcgccatcgagggcaagggcaaggtgggcggcctgaagacccgctgcagcagctgcaatgtgaagtttgaaagtgaaagtgagctgcagaaccacatccagaccatccaccgggagctggtgcctgacagcaacagcacccagctgaagaccccccaggtgagccccatgccccgcatcagccccagccagagtgatgagaagaagacctaccagtgcatcaagtgccagatggtgttctacaatgagtgggacatccaggtgcacgtggccaaccacatgattgatgagggcctgaaccacgagtgcaagctgtgcagccagacctttgacagccctgccaagctgcagtgccacctgattgagcacagctttgagggcatgggcggcaccttcaagtgccctgtgtgcttcaccgtgtttgtgcaggccaacaagctgcagcagcacatcttcagcgcccacggccaggaggacaagatctatgactgcacccagtgcccccagaagttcttcttccagacagagctgcaggtgcacacagccaccccccggcagagctag

SEQ ID NO: 186881 - DNA, 4038 bp, Artificial Sequence
  derived and/or modified sequence
ttcctgagtgactatgtgcagagcgagagcctgcgggtgcggggccccctgtggagccacccagatggctttggaggcctggccagcatcttccactactacgtggactacagaagtgacagcgctgtgcaggacctggccgaccccaactgcaagctggaggacaagacagaagatggagaggccctggactgcaagaagaggccagaagatggagaggagctggaggatgaagctgtgcacagctgtgacagctgcctgcaggtgtttgagagcctgagtgacatcacagagcacaagatcaaccagtgccagctgacagatggagtggatgtggaggatgaccccacctgctcctggccagccagcagccccagcagcaaggaccagaccagccccagccatggagagggctgtgactttggagaggaggagggcggccctggcctgccctacccctgccagttctgtgacaagagcttcagccggctgagctacctgaagcaccacgagcagagccacagcgacaagctgcccttcaagtgcacctactgcagccgcctcttcaagcacaagaggagccgggacagacacatcaagctgcacactggagacaagaagtaccactgcagtgaatgtgatgctgccttcagcagaagtgaccacctgaagatccacctgaagacccacaccagcaacaagccctacaagtgtgccatctgccggcggggcttcctgagcagcagcagcctgcacggccacatgcaggtgcatgagaggaacaaggatggcagccagagcggcagcaggatggaggactggaagatgaaggacacccagaagtgcagccagtgtgaggagggctttgacttccctgaggacctgcagaagcacatcgccgagtgccacccagaatgtagccccaatgaagatagagctgccctgcagtgtgtgtactgccacgagctgtttgtggaggagaccagcctgatgaaccacatggagcaggtgcacagcggggagaagaagaacagctgcagcatctgcagcgagagcttccacacagtggaggagctgtacagccacatggacagccaccagcagcctgagagctgcaaccacagcaacagccccagcctggtgacagtgggctacacctctgtgagcagcaccaccccagacagcaacctgtctgtggacagcagcaccatggtggaggccgccccacccatccccaagagccggggcaggaagagagctgcccagcagaccccagacatgacaggccccagcagcaagcaggccaaggtgacctacagctgcatctactgcaacaagcagctgttcagcagcctggccgtgctgcagatccacctgaagaccatgcacctggacaagccagagcaggcccacatctgccagtactgcctggaggtgctgcccagcctgtacaacctgaatgagcacctgaagcaggtgcatgaggcccaggaccccggcctcatcgtgtctgccatgcctgccatcgtgtaccagtgcaacttctgcagcgaggtggtgaatgacctgaacaccctgcaggagcacatccgctgcagccacggctttgccaacccagctgccaaggacagcaatgccttcttctgcccccactgctacatgggcttcctgacagacagcagcctggaggagcacatccggcaggtgcactgtgacctgagcggcagccgcttcggcagccctgtgctgggcacccccaaggagcctgtggtggaggtgtacagctgcagctactgcaccaacagccccatcttcaacagcgtgctgaagctgaacaagcacatcaaggagaaccacaagaacatccccctggccctgaactacatccacaacgggaagaagagccgggccctgagccccctgagccctgtggccatcgagcagaccagcctgaagatgatgcaggccgtgggcggggccccagcccggcccactggagagtacatctgcaaccagtgtggggccaagtacaccagcctggacagcttccagacccacctgaagacccacctggacacagtgctgcccaagctgacctgcccccagtgcaacaaggagttccccaaccaggagagcctgctgaagcacgtgaccatccacttcatgatcaccagcacctactacatctgtgagagctgtgacaagcagttcacctctgtggatgacctgcagaagcacctgctggacatgcacacctttgtgttcttccgctgcaccctgtgccaggaggtgtttgacagcaaggtgtccatccagctgcacctggccgtgaagcacagcaatgagaagaaggtgtaccgctgcaccagctgcaactgggacttcagaaatgaaacagacctgcagctgcacgtgaagcacaaccacctggagaaccagggcaaggtgcacaagtgcatcttctgtggggagagctttggaacagaggtggagctgcagtgccacatcaccacccacagcaagaagtacaactgcaagttctgcagcaaggccttccacgccatcatcctgctggagaagcacctgcgggagaagcactgtgtgtttgagaccaagacccccaactgtggcaccaatggagccagcgagcaggtgcagaaggaggaggtggagctgcagaccctgctgaccaacagccaggagagccacaacagccatgatggctctgaagaagatgtggacaccagcgagcccatgtatggctgtgacatctgtggggccgcctacaccatggagaccctgctgcagaaccaccagctgcgggaccacaacatccggcctggagagagcgccatcgtgaagaagaaggccgagctgatcaagggcaactacaagtgcaatgtgtgcagcaggaccttcttctctgaaaatggcctgcgggagcacatgcagacccacctgggccctgtgaagcactacatgtgccccatctgtggggagcgcttccccagcctgctgaccctgacagagcacaaggtgacccacagcaagagcctggacaccggcaactgccgcatctgcaagatgcccctgcagagcgaggaggagttcctggagcactgccagatgcacccagacctgaggaacagcctgaccggcttccgctgtgtggtgtgcatgcagacagtgaccagcaccctggagctgaagatccacggcaccttccacatgcagaagacaggaaatggcagcgctgtgcagaccaccggccggggccagcacgtgcagaagctgtacaagtgtgccagctgcctgaaggagttccgcagcaagcaggacctggtgaagctggacatcaatggcctgccctacggcctgtgtgccggctgtgtgaacctgagcaagagcgccagccctggcatcaacgtgcccccaggcaccaaccggcccggcctgggccagaatgaaaacctgagcgccatcgagggcaagggcaaggtgggcggcctgaagacccgctgcagcagctgcaatgtgaagtttgaaagtgaaagtgagctgcagaaccacatccagaccatccaccgggagctggtgcctgacagcaacagcacccagctgaagaccccccaggtgagccccatgccccgcatcagccccagccagagtgatgagaagaagacctaccagtgcatcaagtgccagatggtgttctacaatgagtgggacatccaggtgcacgtggccaaccacatgattgatgagggcctgaaccacgagtgcaagctgtgcagccagacctttgacagccctgccaagctgcagtgccacctgattgagcacagctttgagggcatgggcggcaccttcaagtgccctgtgtgcttcaccgtgtttgtgcaggccaacaagctgcagcagcacatcttcagcgcccacggccaggaggacaagatctatgactgcacccagtgcccccagaagttcttcttccagacagagctgcaggtgcacacagccaccccccggcagagctag

SEQ ID NO: 186882 - DNA, 3936 bp, Artificial Sequence
  derived and/or modified sequence
atgagccggcggaagcaggccaagccccggagcctgaaggaccccaactgcaagctggaggataaaactgaagacggcgaggccctggactgtaagaaaagaccggaggacggggaagaactggaggatgaagctgtccacagctgcgactcatgtcttcaggtatttgagagtctctcagatattacagagcacaaaattaaccagtgccagttaaccgacggggtcgatgtcgaggatgatcctacttgctcgtggcccgcctcatcaccctcttctaaagaccaaacctcgccttctcatggagagggctgtgattttggggaggaagaaggcggccccgggctcccttatccgtgtcagttttgtgacaagtccttttctcgcctctcatatctaaaacaccatgaacaatcacatagtgataagttgccattcaaatgcacgtattgtagtcgactgtttaagcataaacgaagccgcgatagacacattaagcttcacaccggggataaaaaatatcattgcagtgagtgtgacgcagccttctctaggagcgatcacctcaaaatccacctgaaaactcacaccagtaacaaaccctacaagtgcgccatttgccgccggggattcctaagctcgtcatcattgcacggccacatgcaggtccacgaacggaacaaagatggttctcagagcggctctcgtatggaagactggaagatgaaggatacccagaagtgctctcagtgcgaggagggctttgacttccccgaggatctgcagaagcacattgcagagtgtcaccccgagtgttcaccgaacgaagatcgagccgcactgcagtgcgtgtactgtcacgagttgttcgtggaggagacctccctcatgaaccatatggaacaggttcattccggggagaagaaaaacagctgctcaatctgttccgagtcctttcacacagtggaggagctctatagccatatggattctcatcagcagccggaatcatgtaatcactctaatagcccatcactggttacagtgggttacacaagcgtgagcagtacaacacctgattctaaccttagcgtcgacagctccaccatggtcgaggccgccccgcctataccaaaaagcagggggaggaagcgcgcagctcagcagacacctgacatgacaggtccgtcctcaaagcaagccaaggttacatacagctgtatttactgtaacaaacagctattctcaagcttggcggtccttcagattcatctgaaaaccatgcatttagacaagcctgaacaagcccatatctgccaatactgccttgaagttctgccgtcactgtacaatctgaacgagcatctgaaacaggtgcacgaagctcaggacccaggcctcatcgtgtccgccatgcccgctatcgtctatcaatgcaacttctgctccgaagtcgtcaatgaccttaacacattgcaggagcatatccggtgctcccatggctttgcaaatcctgcggctaaggattccaacgcctttttctgtcctcactgttatatgggcttcttgaccgactcctcactggaggagcatatcagacaggttcattgcgacctgagcggcagcaggtttggtagtccagtgcttgggacgccaaaggaacccgtcgtcgaagtatactcttgttcatactgtaccaacagccctatcttcaattctgtcctcaagcttaataaacacattaaagaaaaccacaagaatatccctttggccctgaattacatccacaacgggaaaaaaagccgtgctctgagccccctgtctccagtcgcgatcgagcagacaagcctgaaaatgatgcaagctgtgggaggagcaccagcaaggccgaccggtgaatacatttgtaatcagtgtggtgccaagtatacttctctggattcctttcaaacacacctgaagacacatttagacacagttcttcctaagctgacctgcccacagtgcaacaaggaatttcctaatcaggagagtctcctcaaacacgtgaccattcacttcatgataacaagcacatactacatctgcgagagctgcgacaagcagtttaccagtgtggacgatctgcagaagcacttactcgacatgcataccttcgttttctttcgctgtactctctgccaagaggtattcgactctaaggtgagcatccagctgcatttagccgtgaagcactctaacgagaagaaagtgtaccgctgcacaagttgcaactgggactttaggaatgagaccgatttacagctgcacgtgaaacacaaccaccttgaaaatcagggaaaggtccataagtgcatcttttgcggggaatcatttggcaccgaggtggagctgcagtgccatataactacacactcaaagaaatacaattgtaaattttgctccaaagcttttcatgcaatcatattactcgaaaagcacttgagggagaagcattgcgttttcgagacaaaaactccaaactgcggaaccaacggcgcttccgaacaggtgcaaaaagaagaggtggaactgcaaaccctcctgactaacagtcaggagagtcataattcccacgatgggtccgaggaggatgtggatacctcggaaccaatgtatggctgcgacatctgcggcgccgcatataccatggaaaccctcctgcagaatcaccagcttcgtgatcacaacatacggcccggagagtcagccatcgtgaagaagaaagccgaacttatcaaggggaactataagtgtaacgtctgcagccggaccttctttagcgagaacggactgcgcgagcacatgcagacccacctgggcccagttaaacactacatgtgccccatctgtggggaaaggtttccgtcgttgctgacattaaccgagcacaaggttacccattctaagtcactggacactggcaactgtcgtatctgtaagatgccactgcagtcggaagaagagttcctcgagcattgccaaatgcatcctgatttaaggaatagcctgacggggtttcgctgcgtcgtgtgtatgcagacagtgacaagcactctggaacttaagatccacgggactttccatatgcagaagactggcaacgggtccgctgtgcaaacgactggcaggggccagcatgtgcaaaagttatataagtgcgcctcctgtttaaaagaattccgatccaaacaggacttagttaaattagatatcaatggtctcccatacggattatgtgctgggtgtgtgaatctaagcaaatcagcctcacccgggatcaatgtccctcccggcaccaatcgcccaggcctgggtcagaacgaaaacttgtcggccatcgaagggaaggggaaggtgggaggcttgaaaactagatgtagcagctgcaatgtcaagttcgaatcagaaagcgaactgcagaatcacatccagaccattcaccgtgagctagtgccagattctaactctacacagctgaagactcctcaagtgagcccaatgcctcgcatctcaccgtcccagagtgatgagaaaaaaacataccagtgcatcaaatgccaaatggtcttctacaacgagtgggatatccaggttcatgtagccaatcatatgatcgatgaggggctgaatcacgagtgtaaactctgcagccagaccttcgacagccctgccaaactacagtgtcatctgatcgaacattctttcgagggaatgggcggaacattcaaatgtcctgtctgtttcacagttttcgtccaagcaaataagctccagcagcacatcttctccgcccatggccaggaggacaagatctatgattgcacccaatgtccacaaaaattctttttccagacggaacttcaaaaccatacaatgactcagcacagctcgtag

SEQ ID NO: 186883 - DNA, 3936 bp, Artificial Sequence
  derived and/or modified sequence
atcagccgggcccagaaggcccagacccggcggctgaacgaccccaattgtaagttggaagacaaaacggaagacggagaagcccttgattgtaaaaaaagacccgaggacggcgaggagctggaggatgaggccgttcactcctgcgactcatgcctgcaggtgtttgagagcttgtccgacattaccgagcacaagattaatcagtgtcaactaaccgacggcgtggacgtggaggatgaccccacctgtagctggcctgcctcttctccttcgtctaaagatcagacctctccttcacatggagagggctgtgacttcggtgaggaggaaggaggcccggggcttccatacccctgccagttttgcgacaaaagcttctctcgtctgtcctatttgaagcaccatgaacaaagtcattcagataagctgcccttcaaatgcacatattgttccagactgttcaagcacaagaggtcaagagataggcatattaaactgcataccggagacaaaaaataccattgttcagagtgtgatgcagctttcagcaggtccgatcacttaaaaatccatctgaagactcacacctccaataaaccctataaatgtgctatatgccggcgcggatttctgagtagttcatcactgcacggccacatgcaagtgcatgaaagaaacaaagacgggtctcagtctggtagtagaatggaggactggaaaatgaaggatacacaaaaatgctcacagtgcgaagagggattcgacttccccgaggatttgcagaaacacatagccgaatgtcaccccgaatgctcccccaatgaagacagggccgccctgcagtgtgtttattgccacgaactgtttgtggaagagacaagtttgatgaaccatatggaacaggttcactccggggagaaaaagaattcttgcagtatatgttccgaatcctttcatactgtggaagaactgtactcgcacatggactcccaccagcaaccagaatcctgcaaccattctaacagcccaagcttggtgacggtggggtatacatctgtatccagcaccacgcctgattctaatcttagcgttgactcttcaacaatggttgaggcagctcctcctatccccaagtcaagaggaaggaagcgggccgctcagcaaactccagacatgacgggcccaagctcgaaacaagccaaagttacatacagctgcatctattgtaataagcagcttttcagcagcctggcagtcctccagatccatctaaagactatgcatctagacaaacctgagcaggctcatatctgccagtactgccttgaagtgctgcctagcctctataacctcaacgagcatttgaaacaggtgcacgaggcccaggatccaggccttatagtgtccgcaatgcctgccatagtgtaccaatgcaatttttgctcagaggtggttaatgacctgaacactctccaggagcacataaggtgttctcacggatttgcaaatccagctgctaaagacagcaacgccttcttctgcccccactgctacatgggcttcctgaccgatagctcattggaagagcacataagacaggtgcactgcgaccttagtgggagtaggtttggatcgcctgtattgggtacccccaaagagccagtagtggaagtgtactcctgcagctattgtactaattcgccgatctttaattcagtcctgaagctgaacaagcatattaaagaaaatcataagaatattcctctggctcttaattatatccacaatggaaaaaagtctcgggctctgagcccgctttcgcccgtagcaatcgagcagactagcttgaagatgatgcaggctgttgggggcgctcccgcccgccccaccggagagtatatttgtaaccagtgtggtgccaaatatactagcctggatagtttccaaacacatttgaagacccacctggacacggtgttgcctaagttgacgtgtccacagtgtaataaggaattcccaaaccaggaaagtctgctgaagcatgttactattcattttatgataacctctacctactatatctgcgaatcctgcgataaacaatttacatctgtggacgacctccaaaagcaccttctggacatgcacacttttgtgtttttcaggtgcaccctgtgtcaggaggtgttcgattcaaaggtgtccatccagctccatctcgcggtgaaacacagtaatgaaaagaaggtataccggtgcaccagctgcaactgggatttccgcaatgagacagacctgcagctgcacgtcaaacacaatcatctagagaatcagggaaaggtgcataagtgcatcttttgtggagaaagctttggcaccgaggtggagctgcagtgtcacatcacaacccatagcaagaagtacaactgcaagttttgctcaaaggcgttccacgctatcattttgctggagaaacatctgcgcgagaagcattgcgtcttcgaaacgaaaacaccaaactgcggaacgaatggcgcatcagaacaggtgcagaaggaagaagtggagctgcagacccttctgactaacagtcaggaaagtcataatagccacgacggaagcgaggaggatgtagatacatctgaacctatgtacggatgcgacatctgtggtgcggcctatacaatggagaccctattgcaaaaccatcaacttcgcgaccataacattaggccaggagagagtgccatagtgaaaaagaaggcggaattgattaaggggaactataagtgcaatgtatgctctcgaactttcttttcggaaaacggcctgcgtgaacacatgcagactcacctcggacccgtgaagcattacatgtgtcctatctgcggggagaggttcccatcactgctgactttgacagaacacaaagtgacccacagcaagagtctcgatacggggaattgtcgtatctgtaagatgccactacaaagcgaagaagaatttctggaacactgccagatgcaccctgacttgagaaatagcctgaccggattcagatgcgtcgtgtgcatgcagacggttacctccacgcttgaactaaagattcacggcacctttcacatgcagaagaccggcaacggtagcgctgttcagaccacaggccgtggccagcatgtgcagaaactatataagtgtgcctcatgcctaaaggagttccgatctaaacaggacttggtgaagcttgacatcaacggactcccatatggactctgcgcgggctgtgtcaatttatccaaaagtgctagtcctggtattaacgttccacctggtacaaatcgccccggactgggtcagaatgaaaatttgagtgcaattgagggcaagggaaaagttgggggccttaaaactaggtgttctagttgtaatgtcaagtttgagtcagagagtgagctccaaaaccacattcagacgatacatagggagttagtccccgattcgaatagcactcagctgaaaacacctcaagtgtcccccatgcctcgaatcagcccatcacaaagtgatgagaagaagacttaccagtgcataaaatgccagatggttttctacaatgagtgggatatacaggtccatgtcgcaaaccacatgattgacgagggcctcaatcatgaatgcaagctgtgttcccaaacctttgatagtcctgccaagctccagtgccatctgattgagcattcatttgaagggatggggggcactttcaaatgtcccgtttgcttcaccgtgtttgtgcaggcaaataagttgcaacaacatatctttagcgcccatggacaggaagataagatttatgactgcacccaatgcccacagaagtttttcttccaaacagaactgcaggtgcacaccgccaccccccgacagtcttag

SEQ ID NO: 186884 - DNA, 4038 bp, Artificial Sequence
  derived and/or modified sequence
ttcctgagcgactacgtgcagagcgagagcctgcgggtgcggggccctctgtggtctcatcccgatggttttggcgggctggccagcatcttccactattatgtcgattatagaagcgactctgccgtgcaggacctggccgacccaaattgtaaactggaggataaaactgaagacggggaggctctggactgcaagaagcgaccagaagacggtgaagagctggaggatgaggcagttcattcttgcgatagctgcttacaggtgttcgaaagtctatcagatatcaccgagcacaagatcaatcaatgccagctgaccgatggtgtcgatgtcgaagatgatcctacctgctcctggccagcttcttccccctcatccaaggatcagacatctccgtcacacggtgaaggttgtgactttggcgaagaagaaggcggacccgggcttccctacccctgtcagttctgcgacaaaagcttctctcggctgtcctaccttaagcatcacgagcagtcacattccgacaagttaccatttaagtgtacttactgctcaagactgtttaagcacaagaggagcagagaccggcacatcaagctgcacacaggcgacaagaaataccattgtagcgaatgcgatgcagcttttagccggtcagatcacctgaagatccacttgaaaacccacactagcaacaagccatacaagtgtgccatatgtcggcggggattcctgtcctcaagcagcttgcacggacacatgcaggtgcacgaacgcaataaggatggtagtcagtccggcagtcggatggaggactggaaaatgaaggatactcaaaaatgctctcagtgcgaggaggggttcgacttccctgaggacctgcagaaacatattgcagaatgccatccagaatgttccccaaatgaggatcgggcggccttgcagtgtgtgtattgtcatgagttgttcgtggaggaaacttctttaatgaaccacatggagcaggtccactcaggggagaaaaagaacagctgttctatatgttcggagagctttcacactgtagaggagctgtactctcatatggactcacaccagcagccggagtcttgtaaccattcaaactctccatctctggtgaccgtgggctacacatccgtctcatccactacacccgactctaatctatcagtagattcctcaacgatggtcgaggcagctccacccattccaaaaagtagaggcaggaagagagccgcccagcagacacccgacatgaccggcccaagctcgaaacaggctaaggtgacttacagctgtatttactgtaataaacagctgttcagctcactggccgtgctccagatccacctgaaaaccatgcacctggataaaccagaacaggctcacatatgccaatactgcctggaggttctcccatccctttataacctgaacgagcaccttaaacaggtccacgaagcccaagatccaggactgattgtgtcagctatgccagccatcgtgtaccaatgcaatttctgttcagaggtagttaacgacctgaatacactccaggagcacattcgctgtagtcacggtttcgctaacccagcagccaaggactcaaatgctttcttctgcccacactgttatatgggttttctcacagacagcagtcttgaagaacatatacgccaggtgcactgtgacttgagtggcagccgttttggttcacccgttctaggcacccccaaggaacctgtcgtggaggtttactcctgctcctattgtacaaattccccaatcttcaacagcgtactcaaattaaacaagcatatcaaagaaaaccacaaaaacattccacttgcactgaattacatccataatgggaagaaatctcgcgcactctctccactctccccggtcgctatcgaacagacatccctgaagatgatgcaggccgtaggaggcgcccctgccaggccaacaggcgagtatatttgtaaccagtgcggagccaaatataccagcctggatagttttcagacccacctcaaaacccaccttgacaccgtgctgcccaaactgacctgtccccagtgtaataaagagtttccaaaccaggagagccttttgaagcatgtgactatccactttatgattacatccacttattacatttgtgaaagctgtgataagcagtttacttctgtggatgacttgcagaagcacctgttggatatgcacacctttgtgttcttccggtgtactctgtgccaggaggtcttcgactccaaagtctcgatccagttacatttggctgtgaaacactccaatgaaaaaaaagtatacaggtgtactagctgtaattgggatttccggaacgaaaccgacctgcagttacatgtgaaacataaccatctagaaaaccagggtaaggttcacaaatgcatcttttgcggagagagttttggtactgaggtcgaactgcagtgccatattacgacccattccaagaaatataactgcaagttttgttctaaggcctttcacgccatcatcctgctcgagaagcacctccgggagaaacactgcgtgttcgagacaaagactccgaattgtgggactaacggtgcctccgaacaggtccaaaaggaggaagtggaattacagaccctgcttactaattcccaggagagtcacaactcgcatgatgggagcgaggaagatgtggataccagcgaaccaatgtatgggtgtgatatctgcggggcagcatacacaatggagactctgctgcaaaatcaccagctgagggaccataatattcggcccggagagagcgctatagtgaaaaaaaaagcagaattgattaagggcaactacaagtgcaacgtctgtagtaggactttcttttctgagaatggcctgcgagaacacatgcagacacatcttggcccggtgaaacactatatgtgcccgatctgtggcgaacgtttcccgtctctcctcaccctgaccgagcataaggtcacgcattcgaaatccttggacactggcaactgccggatttgcaaaatgccactgcagagtgaggaagagtttctggagcactgccaaatgcatcccgacctccggaactctctgactgggtttagatgcgtcgtctgtatgcaaacagttacttccacactggaacttaaaatccacgggacttttcacatgcagaagaccggtaacgggagcgccgtgcagactaccgggagaggccaacatgttcagaagttgtataaatgcgcgtcatgcctcaaggagttcagaagcaagcaggatttggtcaaactggatatcaacgggctgccatacggtctttgtgcaggatgtgttaatctatctaagtccgccagccccggaattaatgtgccccccggtacaaaccgacctgggttgggtcagaacgaaaatctgagcgctatcgaaggtaagggaaaggtggggggcctaaaaactcggtgttcctcctgtaacgtgaagtttgaaagtgaatccgaactgcaaaaccatatccaaacaatccatcgcgagttggttcccgattctaactccactcagcttaaaacccctcaggtctcccctatgcctcgtatctccccctcacagtctgatgaaaagaaaacctaccaatgtattaaatgccagatggtgttctacaatgagtgggacattcaggtccatgtcgcgaaccacatgatcgatgaggggctgaaccacgagtgtaagttgtgttctcagactttcgattcccctgcgaagctgcagtgccatctcatcgaacactcattcgagggaatgggcggaacatttaaatgcccggtttgtttcacagtctttgtgcaggccaataagctacaacagcacatctttagtgctcacggacaggaagacaagatatacgattgcacccagtgtccacaaaaattctttttccagactgaactccaggttcatactgccacaccacgacagagctag

SEQ ID NO: 186885 - DNA, 3936 bp, Artificial Sequence
  derived and/or modified sequence
atgagtcgacgcaagcaggccaaacccagatccctgaaagacccaaactgtaagctggaagacaagactgaagacggagaggcactagactgcaagaagcgccctgaggacggcgaggagctggaagatgaggccgtccactcatgtgatagttgtctccaggtattcgaatcattgagcgatataactgagcataagattaatcagtgccagttaactgatggggtggacgttgaggacgatcccacgtgcagctggccggcaagctcacccagctcaaaggaccagacttccccctcacatggcgagggctgcgattttggggaagaggagggcggacctggccttccttacccctgccagttttgtgataagagcttcagccggctgagctacctgaaacaccacgaacagagccatagcgataagctgccttttaaatgcacctactgttcgcgcctgttcaaacacaaaagatcaagggatcggcacatcaagctgcataccggagataaaaagtatcactgctccgaatgtgacgccgctttctcccgctccgaccaccttaagattcatctcaagacacatacgtctaataagccttataaatgtgccatctgtaggcggggttttctgtcaagttccagcctgcatggccacatgcaggtgcacgaaagaaataaagatggatcacagagtggcagtaggatggaggattggaagatgaaggacacccagaagtgcagtcaatgcgaggaaggtttcgactttcccgaagatctgcagaaacacatagccgagtgccaccctgaatgttctccgaacgaagatagggccgcactacagtgtgtttattgtcatgagctgttcgtagaagagacgtctcttatgaatcacatggagcaggtccactccggcgagaaaaagaactcatgcagcatctgctcagaaagttttcacactgtggaagaactctactcccacatggacagtcaccaacagcccgagagctgcaatcactctaatagtccttccctagtgactgtggggtacacctctgtgtccagcactacgcccgatagcaatctgagcgtggactcttctactatggtggaagcggctccaccaatccccaagtccaggggcaggaagcgcgcagcccaacagacacccgatatgacaggacccagctccaaacaggctaaagtcacatatagctgcatttactgcaataagcaactctttagcagcctggcagttctgcagattcatctcaagactatgcatttagacaaaccggagcaggcccacatatgtcagtactgtctggaggtcctcccttcactttacaacctcaacgaacacctgaaacaggtgcacgaggcccaggacccaggactgatcgtgagcgctatgcctgccattgtctaccagtgtaacttctgttcggaagtggtgaacgacctgaacacactccaggagcacatacggtgtagtcacggttttgctaaccccgctgcaaaggattcaaacgcatttttttgtccgcattgctacatgggcttcctgaccgactcatcacttgaggagcatatcagacaggttcattgcgacttaagcgggtcgcgcttcggttcacctgtcctcggaacacctaaggagcctgtggtggaagtctattcatgcagttactgcacgaattcccctattttcaacagtgtcctgaagctgaacaagcacattaaagagaaccataagaacattcctctggcacttaattatattcacaatggcaaaaagtcaagagcattgtcgcctctgagccccgtggcaatcgagcagacttccctaaagatgatgcaggccgtgggaggagcccctgcaagacctacaggcgaatacatctgcaaccagtgtggtgctaagtacactagcctggactcattccagacccatttaaagactcaccttgacacggttctgccaaagttgacctgcccacagtgtaacaaggagttccccaaccaggagtccctgctaaaacacgtgacaattcatttcatgatcacatccacctattatatctgtgagtcctgtgataaacaattcacctcagtggatgatctgcagaaacaccttctggatatgcatactttcgtgttttttaggtgtacgttgtgtcaagaagtgtttgactccaaggtcagcatccaactgcatctcgcagtgaagcattccaatgagaagaaggtctacaggtgcaccagctgtaattgggatttcaggaacgagaccgacctccagctccatgtgaagcacaaccacctcgagaatcagggaaaggttcataaatgtatcttctgtggcgaatcattcggcaccgaggtggagctgcagtgccacatcactacccattctaagaagtacaactgcaaattctgcagtaaggcttttcacgccatcatcctactcgagaagcacctgcgcgaaaagcattgtgttttcgagaccaagacaccaaactgcggcaccaacggggctagtgagcaggtccaaaaagaggaggtggaactgcagacactgctcaccaactcacaggagagtcacaactctcatgatggatctgaggaagacgtggacactagtgaacctatgtacggctgcgatatttgcggtgccgcatacacaatggaaacactactgcaaaaccatcagctgcgagatcacaatatccgacctggggaatcagctattgttaagaagaaagcagagctgattaagggtaactataagtgcaatgtctgctctcggaccttctttagtgagaatgggctaagagagcacatgcagacccaccttggcccagttaaacattatatgtgtcctatctgcggtgaacgcttcccctcattattgacactcacagaacataaagtcacacacagtaagagtcttgatactggcaattgcaggatttgcaagatgcccctgcagtctgaggaggagtttttagaacactgccagatgcatcctgatctacgaaactccctgacgggtttcaggtgtgttgtgtgtatgcagacagttaccagcacacttgagcttaagattcacggaacgttccatatgcagaagacaggaaacggcagtgctgtgcagaccaccgggcgagggcagcacgtccagaagctgtacaagtgcgcgtcctgcctgaaggaattccgcagcaagcaggatctggtgaaactagatattaatgggcttccctatggactgtgcgccggttgtgtcaacctctccaagagtgcgtcaccagggatcaacgtgcccccaggcacaaacaggccaggattgggccagaatgagaacctgtccgccatagagggtaaggggaaggtgggtggactgaaaacgaggtgctcttcttgcaatgtcaagttcgagagcgagagcgagctgcagaaccatatacagactatacaccgtgagctggtcccggattctaattccacacagcttaaaacccctcaggtgagtcctatgcctaggatttccccatctcagagcgatgagaagaagacctatcaatgtataaagtgtcagatggtgttttataacgagtgggatattcaagtccacgtcgccaatcatatgattgacgagggcctcaaccacgaatgcaaactgtgctctcaaacatttgatagcccagccaaactgcagtgtcacctgatcgaacattcatttgagggaatggggggaacatttaagtgcccagtgtgctttacggtgttcgtgcaggccaacaaattgcagcagcacatcttcagtgctcacgggcaggaggacaagatatatgattgcactcagtgtccgcagaagttctttttccagacagagttacagaaccatacgatgactcagcattcctcctag

SEQ ID NO: 186886 - DNA, 3936 bp, Artificial Sequence
  derived and/or modified sequence
atctcacgggctcagaaagcccagacacggagattgaacgaccccaactgtaagctcgaggataagactgaggacggagaagctttagactgcaagaaacgtcctgaggatggggaagagttggaagatgaagccgtgcactcctgtgactcctgcctgcaggtgttcgagtcactgtctgacattacggaacataagatcaatcagtgtcagctgacggacggagtcgatgttgaggatgatccaacatgttcctggcccgcatcctcaccctcatcaaaggaccagactagccctagccacggggaaggctgcgacttcggagaggaggaggggggacctggactgccctatccatgccagttctgtgataagtccttttcgcgactgagctacctgaagcaccacgagcagtctcattcagacaaactgccttttaaatgcacctactgtagccgcctgttcaaacacaagaggagtcgggacaggcacattaagctccacacaggtgataagaaataccattgtagtgagtgtgacgcggcattctccagaagtgaccatttaaaaatccacctaaagacccacacgtctaacaaaccttataaatgcgctatttgtcggagagggttcttatcctccagctctttacatggccatatgcaggtgcacgagcgcaacaaggacggttcccaaagcggcagccggatggaagactggaaaatgaaggacacccagaaatgcagtcagtgcgaagaagggtttgactttcctgaagatctacagaagcatattgctgagtgtcatcccgagtgcagccctaacgaagatcgcgcagccctccaatgcgtgtactgccacgaactgtttgttgaagaaacatccctgatgaatcatatggagcaggttcattctggtgagaagaagaacagctgttcaatttgctctgagtctttccacacagtggaggaattgtattctcatatggactcccaccaacaaccggagagctgcaaccattcaaactctccttcacttgtgactgttggctacactagcgtgtccagcacaacccctgatagcaacctgtctgttgactccagcactatggtggaggctgccccacccatccctaaatctcgtggcaggaagagagcggctcagcagactcctgacatgacaggtccgtcctctaaacaggctaaggtgacatattcttgcatctactgtaacaaacagttgttttcctcactggcagtattgcaaatccatcttaagacaatgcatttggataaacccgagcaggcccacatttgccagtactgcctggaagtgctgcccagtctctacaatctcaatgaacatctgaaacaggtccatgaagcccaggaccccggtttgatcgtaagcgctatgccagctattgtttaccagtgcaacttctgtagtgaagtagtaaacgatttaaacactctccaggaacacataaggtgtagtcacggatttgctaatccagccgcaaaggactccaacgccttcttttgcccacactgttatatgggctttctgactgattcctccctagaagagcatatccgtcaggtgcattgtgacctgtctgggagtcgcttcggctcgccagtgctaggcacccccaaagaaccagtagtggaagtgtattcctgttcatactgcaccaactcacccatttttaactctgtgttgaagctgaataaacacatcaaagagaatcataagaatatcccacttgcactaaactatatacataatgggaagaaatcaagagccttatcccctctgagccccgttgccatagaacagacgtcactgaagatgatgcaggccgtggggggtgcccctgcacggcctaccggcgagtatatctgcaatcagtgtggcgcaaaatatacatcattggatagcttccaaacccatctcaagacacacctagacaccgtgctacccaaacttacatgccctcagtgtaacaaggaatttccaaatcaagagtctcttctgaagcatgtcaccatccatttcatgattacctctacgtactacatatgcgagtcatgtgacaagcagtttacttcagtggacgatttgcagaagcatctgctagacatgcatacatttgtttttttccgctgcacactgtgccaggaggtctttgacagtaaagtgtcaattcagctgcacttagccgtaaaacattctaacgaaaaaaaggtgtaccggtgtacatcttgcaactgggatttccgcaacgagacagacctgcagcttcacgtcaagcacaatcacctggagaatcaaggcaaggtgcacaaatgtatattttgtggagagtcgttcgggaccgaggtggagctgcaatgtcatatcactacacactccaagaaatacaactgcaagttctgttcaaaagcgttccacgcaattatactgctcgaaaaacatctgcgggaaaagcactgcgttttcgagactaagacacctaattgcggcactaacggagctagtgaacaggtgcaaaaggaggaagtggagcttcagacgttgctgacaaactcacaggagtcccacaactcacacgatggtagcgaagaggacgtggatacttccgagccaatgtacggctgcgacatttgcggagctgcatatacaatggagacgctgctccagaatcatcaactgagagatcataatataagacccggagagagcgcgatcgtgaaaaagaaagcggaactgatcaaaggcaattacaaatgcaatgtgtgtagccgcacctttttttcagagaacggcttgagagagcacatgcagacacatctgggccctgtaaaacactacatgtgccctatatgtggtgagcggttccccagtttactgacactcacagagcataaagttacccactcgaagagcctggataccggaaattgccggatttgcaaaatgcctcttcaatcagaagaggagtttctggagcactgccagatgcacccggacttaagaaatagtctaactggcttccgctgtgtagtatgtatgcagaccgtgacatccaccttggagctgaagatacacggaacctttcacatgcagaagacgggcaacggttccgctgtgcagacgacaggccgtggacaacacgttcagaagctttacaagtgcgcatcctgtcttaaggaattccggtcaaaacaggatttagtgaaactggacatcaacggacttccctacggcctttgcgctggatgtgtcaatttatcaaagagcgcatctccagggatcaacgtcccgcctgggacaaaccgacctggattgggtcagaacgaaaacctctctgccatcgagggaaaaggcaaggtcggagggctgaaaactcgatgctcatcctgtaacgtcaaattcgagtcagaaagtgaactacaaaaccacatccaaactatccacagagaactggtgcctgactcaaacagtactcaattgaagacgcctcaggtgagtccaatgccccgaatctctccttctcagtctgatgagaaaaagacgtaccagtgtattaaatgtcagatggtcttctacaatgaatgggatatccaagtgcatgtggccaaccacatgattgacgaggggctaaatcacgaatgtaagctttgcagccagacctttgactcacctgccaaactgcaatgtcacctgatcgaacactccttcgaagggatggggggtacctttaagtgtccggtttgctttacggtttttgtgcaagctaacaaactgcaacagcacattttttcagcacatggtcaagaagacaaaatttacgattgcacccagtgcccgcagaaattctttttccagaccgagttacaagtccacaccgccactccgagacagagctag

SEQ ID NO: 186887 - DNA, 4038 bp, Artificial Sequence
  derived and/or modified sequence
ttcctctctgactacgtgcagtcagaatcactaagagttcgaggccctttatggagtcacccggacggatttgggggtctggcttccatctttcattactatgtcgattataggtcagactcagctgtgcaggacctcgccgatccaaattgtaaactggaagataagaccgaagatggcgaagccctggactgcaagaagcggccagaggatggtgaagaacttgaggatgaagccgtgcacagttgtgattcatgcttgcaggtgtttgaatctctgagtgatattaccgaacacaagattaaccaatgtcaactcacagatggagtcgatgtggaagatgaccctacatgctcatggccagcttccagcccctctagtaaggaccagacaagcccttcccacggcgaaggatgcgatttcggggaagaggagggcggaccaggtctgccatacccctgccagttctgtgacaagagcttctcacgcctgtcatatcttaagcaccatgagcagtcccatagcgacaagttgccatttaagtgcacctactgctcaagactattcaaacataagcgttccagggacaggcatattaagctccatacaggagataagaaataccattgcagtgaatgtgatgcggcatttagccgttccgatcacctcaagatccacctcaagacgcatacttccaataagccctataaatgcgccatatgtagaaggggcttcctctcatcttctagcctgcatgggcacatgcaggtccacgaaaggaacaaagatggcagccagtctggttccaggatggaggattggaagatgaaggacacccagaagtgttcccagtgcgaggaaggctttgactttcccgaagacctgcagaagcacatcgcagagtgccatcccgaatgttcccccaacgaggacagggccgctctgcagtgtgtctattgccatgagctgttcgtagaggagacatcattgatgaaccatatggaacaggtgcactccggagaaaaaaaaaattcctgctccatctgttcagagtcttttcacaccgttgaagagctttacagccacatggacagccaccagcagccagaatcctgcaatcattccaacagtcccagcctggtcaccgtaggctacacgagcgtgtccagcaccactcccgactccaacctcagtgttgattcttctacgatggtcgaggcagcacccccaattcctaagtctagaggcagaaaacgagctgcccagcagactcctgatatgaccgggccatcctccaaacaggcaaaagtgacctatagttgtatttactgcaataagcagctttttagctctttggcggttctccagatccatttgaaaactatgcacctggacaaacccgaacaagcgcacatttgccagtattgcctggaagtgctaccctccctgtataatctcaacgagcaccttaaacaggtgcacgaggcccaagaccccggactcattgtcagcgctatgcctgctatcgtgtatcagtgcaacttctgttccgaagttgtgaacgatcttaacacactccaagagcacatcagatgcagccatggcttcgccaatcctgccgcaaaggactctaacgcttttttttgccctcactgttacatgggcttcttgacagatagcagccttgaagagcacatcagacaggtccattgtgacttatcaggaagccggttcggaagtcccgtcctgggcaccccaaaggagcccgtcgtcgaagtgtattcatgctcttattgtaccaacagccccatatttaattccgtcctcaagctgaacaagcatataaaagaaaaccacaagaacatcccgctcgctcttaactacatccacaacggcaagaagagcagagcgctttcccccctctcacctgtggccatcgagcagacatctttgaaaatgatgcaggcagtgggaggggcaccggctagacctaccggcgagtacatctgtaaccagtgcggcgcaaaatatactagcctggattcttttcaaactcaccttaagacccaccttgatacggtactgcctaaactgacctgtcctcagtgtaacaaagagtttcccaaccaagagtcgctgctgaagcatgtgactattcactttatgataacatcaacatactacatctgtgaatcgtgcgacaaacaattcacaagtgtcgacgacctgcaaaaacatcttctggacatgcacacttttgtgtttttcaggtgcacgctgtgtcaggaagtctttgactccaaggtgtccattcagctgcatctcgctgtgaagcactcaaatgagaagaaggtgtataggtgtacctcttgcaactgggatttccggaacgaaactgatctgcagctgcacgtcaagcataatcacctggagaatcagggaaaggttcacaaatgtattttttgtggcgaatccttcggtaccgaggtggagctgcagtgtcacattactacccactcgaaaaaatacaattgtaagttctgttccaaggcctttcatgccatcatcttgctggagaagcatctgcgagagaagcattgcgtattcgagacaaagactcctaactgcggcacgaacggagcgtccgaacaggtgcaaaaggaggaagtcgagcttcaaaccctgttgaccaattctcaggaaagccacaactcccacgatggatctgaggaggacgtagacactagcgaacccatgtatggctgtgacatttgtggtgctgcgtataccatggagacattgctgcagaatcatcagcttagagatcataacatcagaccgggagagtccgctattgttaagaaaaaagccgaattgatcaaaggaaactataaatgcaatgtgtgctcacggacttttttcagcgagaacggactgcgtgaacacatgcagacccacttgggtcctgttaagcactacatgtgcccaatctgtggggaacggttccccagtctgctgactctgaccgagcacaaagtcacccactccaaaagtctggacaccggcaactgtcggatctgcaagatgccccttcagtcagaagaagagttcctcgagcattgtcagatgcatcccgacctgaggaatagtctgacaggcttccgttgtgtcgtgtgtatgcagaccgtgacttccacgctcgaattaaagattcatggaacttttcacatgcaaaagactggaaacggatcggcagtccaaacaaccggccgaggacagcatgtgcaaaaactgtataagtgcgcctcctgcttaaaggagttcagaagcaagcaggatctcgtaaagctcgacatcaatggcctgccatacggcctatgtgccggatgtgtgaacctcagcaagagcgcctctcccggaatcaacgtcccgcctggtacgaataggccaggcctgggccagaatgaaaatctttcggcgatagaggggaagggcaaagtgggtggtttgaagactagatgtagttcttgcaatgtcaaattcgaatctgaatcagagttgcaaaatcacattcagaccattcacagagaattagtgccggactcaaactctacacagctgaaaacgcctcaagtttcaccgatgccccgaatctctccaagccaatctgatgagaagaaaacctatcagtgtatcaaatgccagatggtcttttataatgagtgggatatccaggtacacgtggccaaccatatgatcgacgagggacttaatcatgagtgcaagttatgttcccagacgttcgattcacccgctaagctgcagtgtcacctgatcgaacattcgttcgagggcatgggcggtacattcaaatgtccagtgtgtttcacggtctttgtccaggcaaacaaattgcagcaacatattttcagtgcgcatggccaggaggataagatctatgactgtactcaatgcccacagaaattcttcttccagactgagttacaggttcacaccgcgactcctaggcagagttag

SEQ ID NO: 186888 - DNA, 4971 bp, Artificial Sequence
  derived and/or modified sequence
agtccgggtcttggcgggccccctcctccctcccgctccccgcgctctcgccttttaatcatgcccctctgtctgtgtgtgagtgcaggcaggctgacaatgatttcctcagtgattacgtacagagcgagtccctgcgggttaggggccccctctggagccatcctgatggctttgggggccttgcttccattttccattattatgtggactaccggagcgacagcgcagtccaagaccttgcaggatgtctcgccgcaagcaagcgaaaccgagatccctcaaagaccccaactgtaaacttgaagacaagactgaagatggagaggcactagattgtaagaagaggccggaagacggggaggagttggaagacgaagctgtgcacagctgtgacagctgcctccaggtgtttgaatcgctgagcgatatcacagaacacaagattaatcaatgtcaactgacagatggagtggatgttgaagatgatccgacttgctcttggccagcttcctcaccttctagcaaggatcagacttcccctagccatggagaaggttgcgattttggagaggaagaaggtggccctgggcttccatacccgtgtcaattctgtgacaagtcgtttagccgcctcagctacctaaagcaccatgagcagagtcacagtgacaaactgcctttcaaatgcacctactgcagtaggctgttcaaacacaagcgcagccgagatcgccacataaaactccacaccggggacaagaagtaccactgcagtgaatgtgatgctgcgttttccagaagtgatcacttgaagatccacttaaagactcacacgtccaacaagccatataaatgtgccatttgtcgccgtgggtttctgtcctctagttccttacacggacacatgcaggttcatgagaggaacaaggacggctctcagtccggttccaggatggaggactggaagatgaaggacactcagaagtgcagtcagtgtgaggaaggctttgacttcccggaagacctccaaaaacacattgcagagtgccaccccgaatgctccccaaatgaggaccgagcggccctccagtgtgtctactgccacgagctcttcgtagaggagacctccctcatgaaccacatggagcaggtgcatagcggggagaagaagaactcatgcagcatttgttctgagagtttccacacagttgaggaactgtacagccacatggacagtcaccagcaaccggagtcatgcaatcacagcaacagcccttccctggtcacggtgggctatacctccgtgtccagtacgactccagattccaacctctcagtggacagctcaaccatggtggaagctgccccgccaatcccaaagagtcgagggaggaagagggccgctcaacaaacccctgacatgactggtccctcgagtaaacaagcaaaagttacctacagctgtatttactgcaacaaacaattattttcaagtcttgcagttctgcagattcacctgaaaactatgcacttagataagccagaacaggcccatatttgtcagtattgcttggaggtcctgccctcactctataacctaaatgaacatcttaagcaagtgcatgaagctcaggacccaggtctgattgtttctgccatgcctgccattgtctaccagtgtaacttctgttccgaagttgtcaacgacctcaacactcttcaggaacacatccgatgttctcatggatttgcaaaccctgcagctaaagatagtaatgcattcttttgtccccattgctatatggggtttctcactgactcttccctggaagagcatattagacaggttcattgtgacctcagtggctcccgatttgggtctccagtgcttgggactcccaaagaaccagtagtagaagtctattcttgttcctattgtacaaattcgccaatattcaacagcgttcttaaactgaacaagcatatcaaagagaatcataaaaacattcccttggccctgaattatatccacaatgggaagaaatccagggccttaagccccctatctcctgtggccatagagcagacatctcttaagatgatgcaggcagtaggaggtgcacctgcacgtcccactggagaatatatctgtaatcaatgtggtgctaagtacacatccctagacagctttcagactcacctaaaaactcatctcgacactgtgcttccaaaattgacctgtcctcagtgcaacaaggaattccccaaccaagaatccttgctgaagcatgttaccattcactttatgatcacttcaacgtattacatctgtgagagttgtgacaagcaattcacatcagtggatgaccttcagaaacacctgctggacatgcacacctttgtcttctttcgctgcaccctctgccaggaagtttttgactcaaaagtctccattcagctccacttggctgtgaagcacagtaacgaaaagaaagtctataggtgcacatcttgcaactgggacttccgcaacgaaactgacttgcagctccatgtgaaacacaaccacctggaaaaccaagggaaagtgcataagtgcattttctgcggtgagtcctttggcaccgaggtggagctgcaatgccacatcaccactcacagtaagaagtacaactgcaagttctgtagcaaagccttccatgcgatcattttgttagaaaaacacttgcgagaaaaacactgtgtattcgaaaccaagacacccaactgtggaacaaatggagcttccgagcaagtgcagaaagaggaagtggagctgcagactttgctgaccaacagccaggagtcccacaacagtcacgatgggagcgaagaagacgttgacacctctgagcctatgtacggctgcgacatttgtggggcagcctacactatggaaactttgctgcagaatcaccagctccgagaccacaacatcagacctggagaaagtgccatcgtgaaaaagaaagctgagctcattaaagggaattacaagtgcaacgtgtgctctcgaaccttcttctccgaaaatggcctccgggaacatatgcagacccacctaggccctgtcaaacactacatgtgccctatttgcggagagcggtttccctcccttttaactcttactgaacacaaagtcacgcatagtaagagtcttgatactggaaactgccggatttgcaagatgcctctccagagtgaagaggagtttttagagcattgccaaatgcaccctgacttgaggaattccctgacaggctttcgctgcgtggtgtgcatgcagacagtgacctccaccttggaactcaaaatccatgggacgttccacatgcaaaagacagggaatgggtctgcagttcagaccacagggcggggccagcacgtccaaaaactgtataagtgcgcatcttgcctcaaagaattccgttccaagcaagatctggtgaaacttgatatcaatggcctgccatatggtctgtgtgccggctgcgtgaatctcagtaagagcgccagcccaggcattaacgtccctcccggcacgaatagaccaggcttgggccagaatgagaatctgagtgccattgaggggaaaggcaaggtggggggactgaagacacgctgctctagctgcaacgttaagtttgagtctgaaagtgaactccagaaccacatccaaaccatccaccgagagctcgtgccagacagcaacagcacacagttgaaaacgccccaagtatcaccaatgcccagaatcagtccctcccagtcggatgagaagaagacctatcaatgcatcaagtgtcagatggttttctacaatgaatgggatattcaggttcatgttgcaaatcacatgattgatgaaggactgaaccatgaatgcaaactctgcagccagacctttgactctcctgccaaactccagtgccacctgatagagcacagcttcgaagggatgggaggcaccttcaagtgtccagtctgctttacagtatttgttcaagcaaacaagttgcagcagcatattttctctgcccatggacaagaagacaagatctatgactgtacacaatgtccacagaagtttttcttccaaacagagctgcagaatcatacaatgacccaacacagcagttagtgcaagtacagtctctcaaggagaattgattttgtggcacaaaaagggaacatgttttactctttgcacgaaactttcattgttaatgtatattattcagaaacattgtattgtaccataaaacttgtattatcaaactgttggatgttcatgtgtttgaacttttgcgcaccggatagaccccttgtatataaagtgttgcacatgtattatgtcgtctgatactaaaatggtcttataaagacaagtggacttgggccctattcaggcaagattaaaaaaaaaaaaagactatgaccaaaatggcttaagataaagtatttttaaggaagaaagattaaaaacaactgttatacatgagactatggttggacttccttttctttacacttaagcctagaatttctctttaggtatatcagcgcttaaatccaagactattttttattgctgaagattcttgcaaaccatgaagagatgttctcacagaacagaaccccacagctggataaggcccgtatatatatatttgtaagccttgcaatgtgacaggtagcatcactatatatgcaatagttgttatgtagactgtcaaagaatttttttttccctggatacatttgaagctttgagtgttcaaggttttccttaatgatttcacgcagccaaattcttgaatcagttgaactaacctgtatgttactgttattaatgtttactctgcagtctgaacctggagattactggaattgttttccaagaggaaataaattcagtttaccattagg

SEQ ID NO: 186889 - DNA, 3933 bp, Artificial Sequence
  derived and/or modified sequence
atatctagagcccagaaagcacaaacaagaagattaaatgaccccaactgtaaacttgaagacaagactgaagatggagaggcactagattgtaagaagaggccggaagacggggaggagttggaagacgaagctgtgcacagctgtgacagctgcctccaggtgtttgaatcgctgagcgatatcacagaacacaagattaatcaatgtcaactgacagatggagtggatgttgaagatgatccgacttgctcttggccagcttcctcaccttctagcaaggatcagacttcccctagccatggagaaggttgcgattttggagaggaagaaggtggccctgggcttccatacccgtgtcaattctgtgacaagtcgtttagccgcctcagctacctaaagcaccatgagcagagtcacagtgacaaactgcctttcaaatgcacctactgcagtaggctgttcaaacacaagcgcagccgagatcgccacataaaactccacaccggggacaagaagtaccactgcagtgaatgtgatgctgcgttttccagaagtgatcacttgaagatccacttaaagactcacacgtccaacaagccatataaatgtgccatttgtcgccgtgggtttctgtcctctagttccttacacggacacatgcaggttcatgagaggaacaaggacggctctcagtccggttccaggatggaggactggaagatgaaggacactcagaagtgcagtcagtgtgaggaaggctttgacttcccggaagacctccaaaaacacattgcagagtgccaccccgaatgctccccaaatgaggaccgagcggccctccagtgtgtctactgccacgagctcttcgtagaggagacctccctcatgaaccacatggagcaggtgcatagcggggagaagaagaactcatgcagcatttgttctgagagtttccacacagttgaggaactgtacagccacatggacagtcaccagcaaccggagtcatgcaatcacagcaacagcccttccctggtcacggtgggctatacctccgtgtccagtacgactccagattccaacctctcagtggacagctcaaccatggtggaagctgccccgccaatcccaaagagtcgagggaggaagagggccgctcaacaaacccctgacatgactggtccctcgagtaaacaagcaaaagttacctacagctgtatttactgcaacaaacaattattttcaagtcttgcagttctgcagattcacctgaaaactatgcacttagataagccagaacaggcccatatttgtcagtattgcttggaggtcctgccctcactctataacctaaatgaacatcttaagcaagtgcatgaagctcaggacccaggtctgattgtttctgccatgcctgccattgtctaccagtgtaacttctgttccgaagttgtcaacgacctcaacactcttcaggaacacatccgatgttctcatggatttgcaaaccctgcagctaaagatagtaatgcattcttttgtccccattgctatatggggtttctcactgactcttccctggaagagcatattagacaggttcattgtgacctcagtggctcccgatttgggtctccagtgcttgggactcccaaagaaccagtagtagaagtctattcttgttcctattgtacaaattcgccaatattcaacagcgttcttaaactgaacaagcatatcaaagagaatcataaaaacattcccttggccctgaattatatccacaatgggaagaaatccagggccttaagccccctatctcctgtggccatagagcagacatctcttaagatgatgcaggcagtaggaggtgcacctgcacgtcccactggagaatatatctgtaatcaatgtggtgctaagtacacatccctagacagctttcagactcacctaaaaactcatctcgacactgtgcttccaaaattgacctgtcctcagtgcaacaaggaattccccaaccaagaatccttgctgaagcatgttaccattcactttatgatcacttcaacgtattacatctgtgagagttgtgacaagcaattcacatcagtggatgaccttcagaaacacctgctggacatgcacacctttgtcttctttcgctgcaccctctgccaggaagtttttgactcaaaagtctccattcagctccacttggctgtgaagcacagtaacgaaaagaaagtctataggtgcacatcttgcaactgggacttccgcaacgaaactgacttgcagctccatgtgaaacacaaccacctggaaaaccaagggaaagtgcataagtgcattttctgcggtgagtcctttggcaccgaggtggagctgcaatgccacatcaccactcacagtaagaagtacaactgcaagttctgtagcaaagccttccatgcgatcattttgttagaaaaacacttgcgagaaaaacactgtgtattcgaaaccaagacacccaactgtggaacaaatggagcttccgagcaagtgcagaaagaggaagtggagctgcagactttgctgaccaacagccaggagtcccacaacagtcacgatgggagcgaagaagacgttgacacctctgagcctatgtacggctgcgacatttgtggggcagcctacactatggaaactttgctgcagaatcaccagctccgagaccacaacatcagacctggagaaagtgccatcgtgaaaaagaaagctgagctcattaaagggaattacaagtgcaacgtgtgctctcgaaccttcttctccgaaaatggcctccgggaacatatgcagacccacctaggccctgtcaaacactacatgtgccctatttgcggagagcggtttccctcccttttaactcttactgaacacaaagtcacgcatagtaagagtcttgatactggaaactgccggatttgcaagatgcctctccagagtgaagaggagtttttagagcattgccaaatgcaccctgacttgaggaattccctgacaggctttcgctgcgtggtgtgcatgcagacagtgacctccaccttggaactcaaaatccatgggacgttccacatgcaaaagacagggaatgggtctgcagttcagaccacagggcggggccagcacgtccaaaaactgtataagtgcgcatcttgcctcaaagaattccgttccaagcaagatctggtgaaacttgatatcaatggcctgccatatggtctgtgtgccggctgcgtgaatctcagtaagagcgccagcccaggcattaacgtccctcccggcacgaatagaccaggcttgggccagaatgagaatctgagtgccattgaggggaaaggcaaggtggggggactgaagacacgctgctctagctgcaacgttaagtttgagtctgaaagtgaactccagaaccacatccaaaccatccaccgagagctcgtgccagacagcaacagcacacagttgaaaacgccccaagtatcaccaatgcccagaatcagtccctcccagtcggatgagaagaagacctatcaatgcatcaagtgtcagatggttttctacaatgaatgggatattcaggttcatgttgcaaatcacatgattgatgaaggactgaaccatgaatgcaaactctgcagccagacctttgactctcctgccaaactccagtgccacctgatagagcacagcttcgaagggatgggaggcaccttcaagtgtccagtctgctttacagtatttgttcaagcaaacaagttgcagcagcatattttctctgcccatggacaagaagacaagatctatgactgtacacaatgtccacagaagtttttcttccaaacagagctgcaggttcacactgccacacccaggcaatcc

SEQ ID NO: 186890 - DNA, 4139 bp, Artificial Sequence
  derived and/or modified sequence
agtccgggtcttggcgggccccctcctccctcccgctccccgcgctctcgccttttaatcatgcccctctgtctgtgtgtgagtgcaggcaggctgacaatgatttcctcagtgattacgtacagagcgagtccctgcgggttaggggccccctctggagccatcctgatggctttgggggccttgcttccattttccattattatgtggactaccggagcgacagcgcagtccaagaccttgcagaccccaactgtaaacttgaagacaagactgaagatggagaggcactagattgtaagaagaggccggaagacggggaggagttggaagacgaagctgtgcacagctgtgacagctgcctccaggtgtttgaatcgctgagcgatatcacagaacacaagattaatcaatgtcaactgacagatggagtggatgttgaagatgatccgacttgctcttggccagcttcctcaccttctagcaaggatcagacttcccctagccatggagaaggttgcgattttggagaggaagaaggtggccctgggcttccatacccgtgtcaattctgtgacaagtcgtttagccgcctcagctacctaaagcaccatgagcagagtcacagtgacaaactgcctttcaaatgcacctactgcagtaggctgttcaaacacaagcgcagccgagatcgccacataaaactccacaccggggacaagaagtaccactgcagtgaatgtgatgctgcgttttccagaagtgatcacttgaagatccacttaaagactcacacgtccaacaagccatataaatgtgccatttgtcgccgtgggtttctgtcctctagttccttacacggacacatgcaggttcatgagaggaacaaggacggctctcagtccggttccaggatggaggactggaagatgaaggacactcagaagtgcagtcagtgtgaggaaggctttgacttcccggaagacctccaaaaacacattgcagagtgccaccccgaatgctccccaaatgaggaccgagcggccctccagtgtgtctactgccacgagctcttcgtagaggagacctccctcatgaaccacatggagcaggtgcatagcggggagaagaagaactcatgcagcatttgttctgagagtttccacacagttgaggaactgtacagccacatggacagtcaccagcaaccggagtcatgcaatcacagcaacagcccttccctggtcacggtgggctatacctccgtgtccagtacgactccagattccaacctctcagtggacagctcaaccatggtggaagctgccccgccaatcccaaagagtcgagggaggaagagggccgctcaacaaacccctgacatgactggtccctcgagtaaacaagcaaaagttacctacagctgtatttactgcaacaaacaattattttcaagtcttgcagttctgcagattcacctgaaaactatgcacttagataagccagaacaggcccatatttgtcagtattgcttggaggtcctgccctcactctataacctaaatgaacatcttaagcaagtgcatgaagctcaggacccaggtctgattgtttctgccatgcctgccattgtctaccagtgtaacttctgttccgaagttgtcaacgacctcaacactcttcaggaacacatccgatgttctcatggatttgcaaaccctgcagctaaagatagtaatgcattcttttgtccccattgctatatggggtttctcactgactcttccctggaagagcatattagacaggttcattgtgacctcagtggctcccgatttgggtctccagtgcttgggactcccaaagaaccagtagtagaagtctattcttgttcctattgtacaaattcgccaatattcaacagcgttcttaaactgaacaagcatatcaaagagaatcataaaaacattcccttggccctgaattatatccacaatgggaagaaatccagggccttaagccccctatctcctgtggccatagagcagacatctcttaagatgatgcaggcagtaggaggtgcacctgcacgtcccactggagaatatatctgtaatcaatgtggtgctaagtacacatccctagacagctttcagactcacctaaaaactcatctcgacactgtgcttccaaaattgacctgtcctcagtgcaacaaggaattccccaaccaagaatccttgctgaagcatgttaccattcactttatgatcacttcaacgtattacatctgtgagagttgtgacaagcaattcacatcagtggatgaccttcagaaacacctgctggacatgcacacctttgtcttctttcgctgcaccctctgccaggaagtttttgactcaaaagtctccattcagctccacttggctgtgaagcacagtaacgaaaagaaagtctataggtgcacatcttgcaactgggacttccgcaacgaaactgacttgcagctccatgtgaaacacaaccacctggaaaaccaagggaaagtgcataagtgcattttctgcggtgagtcctttggcaccgaggtggagctgcaatgccacatcaccactcacagtaagaagtacaactgcaagttctgtagcaaagccttccatgcgatcattttgttagaaaaacacttgcgagaaaaacactgtgtattcgaaaccaagacacccaactgtggaacaaatggagcttccgagcaagtgcagaaagaggaagtggagctgcagactttgctgaccaacagccaggagtcccacaacagtcacgatgggagcgaagaagacgttgacacctctgagcctatgtacggctgcgacatttgtggggcagcctacactatggaaactttgctgcagaatcaccagctccgagaccacaacatcagacctggagaaagtgccatcgtgaaaaagaaagctgagctcattaaagggaattacaagtgcaacgtgtgctctcgaaccttcttctccgaaaatggcctccgggaacatatgcagacccacctaggccctgtcaaacactacatgtgccctatttgcggagagcggtttccctcccttttaactcttactgaacacaaagtcacgcatagtaagagtcttgatactggaaactgccggatttgcaagatgcctctccagagtgaagaggagtttttagagcattgccaaatgcaccctgacttgaggaattccctgacaggctttcgctgcgtggtgtgcatgcagacagtgacctccaccttggaactcaaaatccatgggacgttccacatgcaaaagacagggaatgggtctgcagttcagaccacagggcggggccagcacgtccaaaaactgtataagtgcgcatcttgcctcaaagaattccgttccaagcaagatctggtgaaacttgatatcaatggcctgccatatggtctgtgtgccggctgcgtgaatctcagtaagagcgccagcccaggcattaacgtccctcccggcacgaatagaccaggcttgggccagaatgagaatctgagtgccattgaggggaaaggcaaggtggggggactgaagacacgctgctctagctgcaacgttaagtttgagtctgaaagtgaactccagaaccacatccaaaccatccaccgagagctcgtgccagacagcaacagcacacagttgaaaacgccccaagtatcaccaatgcccagaatcagtccctcccagtcggatgagaagaagacctatcaatgcatcaagtgtcagatggttttctacaatgaatgggatattcaggttcatgttgcaaatcacatgattgatgaaggactgaaccatgaatgcaaactctgcagccagacctttgactctcctgccaaactccagtgccacctgatagagcacagcttcgaagggatgggaggcaccttcaagtgtccagtctgctttacagtatttgttcaagcaaacaagttgcagcagcatattttctctgcccatggacaagaagacaagatctatgactgtacacaatgtccacagaagtttttcttccaaacagagctgcaggttcacactgccacacccaggcaatcc

SEQ ID NO: 186891 - protein, 719 aa, Artificial Sequence
  derived and/or modified sequence
MAALEEEFTLSSVVLSAGPEGLLGVEQSDKTDQFLVTDSGRTVILYKVSDQKPLGSWSVKQGQIITCPAVCNFQTGEYVVVHDNKVLRIWNNEDVNLDKVFKATLSAEVYRILSVQGTEPLVLFKEGAVRGLEALLADPQQKIETVISDEEVIKWTKFFVVFRHPVLIFITEKHGNYFAYVQMFNSRILTKYTLLLGQDENSVIKSFTASVDRKFISLMSLSSDGCIYETLIPIRPADPEKNQSLVKSLLLKAVVSGNARNGVALTALDQDHVAVLGSPLAASKECLSVWNIKFQTLQTSKELPQGTSGQLWYYGEHLFMLHGKSLTVIPYKCEVSSLAGALGKLKHSQDPGTHVVSHFVNWETPQGCGLGFQNSEQSRRILRRRKIEVSLQPEVPPSKQLLSTIMKDSEKHIEVEVRKFLALKQTPDFHTVIGDTVTGLLERCKAEPSFYPRNCLMQLIQTHVLSYSLCPDLMEIALKKKDVQLLQLCLQQFPDIPESVTCACLKIFLSIGDDSLQETDVNMESVFDYSINSVHDEKMEEQTEILQNGFNPEEDKCNNCDQELNKKPQDETKESTSCPVVQKRAALLNAILHSAYSETFLLPHLKDIPAQHITLFLKYLYFLYLKCSENATMTLPGIHPPTLNQIMDWICLLLDANFTVVVMMPEAKRLLINLYKLVKSQISVYSELNKIEVSFRELQKLNQEKNNRGLYSIEVLELF

SEQ ID NO: 186892 - protein, 537 aa, Artificial Sequence
  derived and/or modified sequence
MFNSRILTKYTLLLGQDENSVIKSFTASVDRKFISLMSLSSDGCIYETLIPIRPADPEKNQSLVKSLLLKAVVSGNARNGVALTALDQDHVAVLGSPLAASKECLSVWNIKFQTLQTSKELPQGTSGQLWYYGEHLFMLHGKSLTVIPYKCEVSSLAGALGKLKHSQDPGTHVVSHFVNWETPQGCGLGFQNSEQSRRILRRRKIEVSLQPEVPPSKQLLSTIMKDSEKHIEVEVRKFLALKQTPDFHTVIGDTVTGLLERCKAEPSFYPRNCLMQLIQTHVLSYSLCPDLMEIALKKKDVQLLQLCLQQFPDIPESVTCACLKIFLSIGDDSLQETDVNMESVFDYSINSVHDEKMEEQTEILQNGFNPEEDKCNNCDQELNKKPQDETKESTSCPVVQKRAALLNAILHSAYSETFLLPHLKDIPAQHITLFLKYLYFLYLKCSENATMTLPGIHPPTLNQIMDWICLLLDANFTVVVMMPEAKRLLINLYKLVKSQISVYSELNKIEVSFRELQKLNQEKNNRGLYSIEVLELF

SEQ ID NO: 186893 - DNA, 2160 bp, Artificial Sequence
  derived and/or modified sequence
atggctgctttagaggaggaattcacactgagttccgtggtgctgtcagcaggaccagaaggattactcggcgtggagcagagcgacaagacggatcagttcttggtgaccgattcggggcggaccgttatactgtacaaagtaagcgatcaaaaaccgctgggctcatggagcgtgaaacaggggcagattataacatgccctgccgtgtgtaattttcagactggagagtacgtggtggtgcacgataataaagtcctgagaatatggaacaatgaagatgtaaacctggacaaagtctttaaggctaccctgagcgccgaagtttataggattctgtccgtacaaggcaccgagcctttggttctgtttaaggagggcgccgtccgaggactggaggccttgctcgcagacccccagcagaaaatcgaaaccgtgatctccgacgaggaagtgattaagtggaccaaattcttcgtagtttttaggcacccagtcttgatctttattactgagaaacacggtaattacttcgcttatgtccagatgtttaattctcgtattctgacaaagtacacactgttactcgggcaggacgagaacagtgtcatcaaaagctttacagctagcgtggacagaaagttcataagtctcatgagcctctcgtctgatggatgcatctacgaaacactgattcctatccggcccgctgatcctgagaagaatcagtccttggttaagagcttactactcaaggctgtggttagtggaaatgccaggaacggtgtcgccttgacagcattggatcaagatcacgttgctgttttgggcagccctctggccgcttctaaggagtgcctcagtgtgtggaatatcaaatttcagactctccagacgtcaaaggagttgcctcaaggtacttcaggccaactgtggtactacggagagcatctgttcatgctccacggcaaatccctgacagttatcccttacaagtgtgaggtaagttctttggctggggcactcggaaaactcaagcattcccaggaccccggcacacacgtggtcagtcactttgtgaactgggagaccccccagggatgtggcttgggattccagaacagcgaacagagtcgccgaattctacgcagacggaagattgaggtttccctccaacctgaagttcctcctagtaaacaactcctctcgaccataatgaaagatagtgaaaaacacatagaggttgaggtacgaaagttcctggctcttaaacaaactcccgattttcacaccgtcatcggcgatactgtcaccggtctgttggagaggtgcaaagccgagccctctttttacccaaggaattgtctgatgcagctcattcaaacacacgtgcttagctactcactgtgtcctgatttgatggagattgctctgaaaaagaaggacgtgcagctgctgcaactctgtctgcagcaatttcccgacattcccgagtccgtgacttgtgcctgtctcaagatcttcctatccatcggggatgactcactccaggaaactgacgtcaacatggagtcagtattcgactattctattaattctgtgcatgacgagaaaatggaggagcagaccgagatcttgcaaaatggattcaatcccgaggaggacaaatgcaataactgtgatcaggagttgaacaaaaaacctcaggacgagaccaaggaaagtacttcgtgtccagtcgttcagaagcgcgccgctttactcaacgctattctccatagcgcctactcagagacgttccttctcccacatctcaaggacatcccagcgcaacacattaccctcttcctcaagtatctctactttctgtatctcaaatgtagcgagaacgccactatgacgctgcccgggattcacccaccaacattgaatcaaataatggactggatatgtcttctgctggacgcaaattttaccgttgtagtcatgatgcctgaagcaaagcggttactgatcaacctatataagctggttaagtcacaaataagcgtgtatagcgaactgaataaaattgaggtctcattcagagaactgcaaaaattgaaccaggagaaaaataaccggggcctttacagcattgaagtgctggaattgttttag

SEQ ID NO: 186894 - DNA, 2506 bp, Artificial Sequence
  derived and/or modified sequence
aaaatggcagcgctggaggaagaattcacgttgtcttcggtagtcctgagcgccgggcctgaaggactcctaggcgtggagcagagcgacaaaacagaccagtttctagtgacagacagcggcaggacagtcatcctctataaggtttctgatcagaaacccttggggagctggtcagtgaaacaaggtcaaattataacatgtccagctgtgtgcaactttcaaactggagagtatgttgttgtacacgataataaggttttaagaatatggaataatgaagatgtaaacctggataaagtatttaaagctacattgtcagcagaagtatataggatactttcagtgcaagggacagaacccttggtgctcttcaaggaaggtgctgttcgtggtttagaggccttgcttgcagacccccagcagaaaattgaaactgttatctctgatgaagaagtgattaaatggacaaagtttttcgtagtattcagacatcctgttttaatttttattactgaaaaacatggaaattactttgcttacgtgcaaatgtttaactcacgtatcttaaccaaatatacactcttacttggacaagacgaaaactctgttataaagagttttactgcatctgtagatcggaaattcatctctttgatgtcattaagctctgatggttgtatatatgaaaccttgataccaatacgtccagctgacccagaaaaaaatcagagcttagttaaatcactgctgctcaaggctgttgtatctggtaacgctcgaaatggagttgcactcactgccctggatcaggatcacgtcgcagtcctaggaagtccactagcagcttctaaggaatgcctctctgtatggaacataaaatttcaaacactacagacttcaaaagagttaccacaagggaccagtggtcaactctggtattatggagaacatttgtttatgctacatggaaaatctctaactgtgattccatacaagtgtgaagtgtcatcattagcaggtgctcttggaaaactcaagcatagtcaagatccaggaactcatgtcgtgtcccattttgtaaactgggagacacctcaaggatgtggacttgggttccagaactcagagcagtcaagaagaattttaaggagacgaaaaattgaagtgagtttacagccagaggttccaccatccaaacaacttttgtcaaccataatgaaagattcagaaaaacacattgaagtagaagtacggaaatttttggctctgaagcagacacctgactttcatactgtcattggggacacagtaacaggacttctggaaaggtgtaaagcagaaccatcattttatccccggaactgtctgatgcagcttatccaaacgcatgtgctttcttacagtttgtgccccgacttaatggagattgccttaaaaaagaaagatgtacagttgttacaactctgtctacagcagttccctgacattcctgaatcagtcacctgtgcttgcttaaaaattttcttgagcattggtgatgacagtcttcaagaaacagatgttaatatggagtcagtttttgactatagtataaattctgtacatgatgagaaaatggaagagcaaactgaaattcttcaaaatggcttcaatcctgaagaagataaatgcaataactgtgatcaagagttaaataaaaagccccaggacgaaacaaaggagagcacttcatgccctgtggtacaaaaaagagcagctctacttaatgcaattcttcattcagcatatagcgagacatttcttctgcctcatttgaaagacatcccagcacagcatatcacgctgtttcttaagtatttgtatttcctgtacctgaagtgtagcgaaaatgctactatgactcttcctggaatacacccacctaccttgaaccagattatggattggatatgtctacttctggatgcaaattttactgttgttgtaatgatgccagaagcaaagaggctactgataaatctttacaagcttgtaaaatctcagatatctgtttattctgagctcaacaagattgaagtaagttttcgggagctacagaaattaaatcaagaaaagaataatagaggattatattcaattgaagtgctggagctcttctgatattatcaattctccttcatagacattttataaagctcttttatgtgaactcttgcttcatccaggcaagaacggtgttttgtttgcgaccatctcagtgtcaagagaaacgtgtcagtgagtacctggaccatcacttaactgatgctccggggtaggactgcaggtttcacatgaacctgttctaggctgtggacattggtgtggagaggttctgcaattttttaaaaatatgtaactgggttgattttaagtaaaattatttgtgtattgataaaagtctaatttcttatcatgtgttttgaattttttcttttaataaaaaatgaccattgaagcagtg

SEQ ID NO: 186895 - DNA, 2448 bp, Artificial Sequence
  derived and/or modified sequence
aaaatggcagcgctggaggaagaattcacgttgtcttcggtagtcctgagcgccgggcctgaaggactcctaggcgtggagcagagcgacaaaacagaccagtttctagtgacagacagcggcaggacagtcatcctctataaggtttctgatcagaaacccttggggagctggtcagtgaaacaaggtcaaattataacatgtccagctgtgtgcaactttcaaactggagagtatgttgttgtacacgataataaggttttaagaatatggaataatgaagatgtaaacctggataaagtatttaaagctacattgtcagcagaagtatataggatactttcagtgcaagggacagaacccttggtgctcttcaaggaaggtgctgttcgtggtttagaggccttgcttgcagacccccagcagaaaattgaaactgttatctctgatgaagaagtgattaacatggaaattactttgcttacgtgcaaatgtttaactcacgtatcttaaccaaatatacactcttacttggacaagacgaaaactctgttataaagagttttactgcatctgtagatcggaaattcatctctttgatgtcattaagctctgatggttgtatatatgaaaccttgataccaatacgtccagctgacccagaaaaaaatcagagcttagttaaatcactgctgctcaaggctgttgtatctggtaacgctcgaaatggagttgcactcactgccctggatcaggatcacgtcgcagtcctaggaagtccactagcagcttctaaggaatgcctctctgtatggaacataaaatttcaaacactacagacttcaaaagagttaccacaagggaccagtggtcaactctggtattatggagaacatttgtttatgctacatggaaaatctctaactgtgattccatacaagtgtgaagtgtcatcattagcaggtgctcttggaaaactcaagcatagtcaagatccaggaactcatgtcgtgtcccattttgtaaactgggagacacctcaaggatgtggacttgggttccagaactcagagcagtcaagaagaattttaaggagacgaaaaattgaagtgagtttacagccagaggttccaccatccaaacaacttttgtcaaccataatgaaagattcagaaaaacacattgaagtagaagtacggaaatttttggctctgaagcagacacctgactttcatactgtcattggggacacagtaacaggacttctggaaaggtgtaaagcagaaccatcattttatccccggaactgtctgatgcagcttatccaaacgcatgtgctttcttacagtttgtgccccgacttaatggagattgccttaaaaaagaaagatgtacagttgttacaactctgtctacagcagttccctgacattcctgaatcagtcacctgtgcttgcttaaaaattttcttgagcattggtgatgacagtcttcaagaaacagatgttaatatggagtcagtttttgactatagtataaattctgtacatgatgagaaaatggaagagcaaactgaaattcttcaaaatggcttcaatcctgaagaagataaatgcaataactgtgatcaagagttaaataaaaagccccaggacgaaacaaaggagagcacttcatgccctgtggtacaaaaaagagcagctctacttaatgcaattcttcattcagcatatagcgagacatttcttctgcctcatttgaaagacatcccagcacagcatatcacgctgtttcttaagtatttgtatttcctgtacctgaagtgtagcgaaaatgctactatgactcttcctggaatacacccacctaccttgaaccagattatggattggatatgtctacttctggatgcaaattttactgttgttgtaatgatgccagaagcaaagaggctactgataaatctttacaagcttgtaaaatctcagatatctgtttattctgagctcaacaagattgaagtaagttttcgggagctacagaaattaaatcaagaaaagaataatagaggattatattcaattgaagtgctggagctcttctgatattatcaattctccttcatagacattttataaagctcttttatgtgaactcttgcttcatccaggcaagaacggtgttttgtttgcgaccatctcagtgtcaagagaaacgtgtcagtgagtacctggaccatcacttaactgatgctccggggtaggactgcaggtttcacatgaacctgttctaggctgtggacattggtgtggagaggttctgcaattttttaaaaatatgtaactgggttgattttaagtaaaattatttgtgtattgataaaagtctaatttcttatcatgtgttttgaattttttcttttaataaaaaatgaccattgaagcagtg

SEQ ID NO: 186896 - DNA, 2160 bp, Artificial Sequence
  derived and/or modified sequence
atggccgccctggaggaggagttcaccctgagctctgtggtgctgtctgctggccctgagggcctgctgggcgtggagcagagcgacaagacagaccagttcctggtgacagattctggccgcaccgtcatcctgtacaaggtgtctgaccagaagcccctgggctcctggagcgtgaagcagggccagatcatcacctgcccagctgtgtgcaacttccagacaggagaatatgtggtggtgcatgacaacaaggtgctgcgcatctggaacaatgaagatgtgaacctggacaaggtgttcaaggccaccctgtctgctgaggtgtaccgcatcctgtctgtgcagggcacagagcccctggtgctcttcaaggagggcgctgtgcggggcctggaggccctgctggccgacccccagcagaagattgaaacagtcatcagtgatgaggaggtgatcaagtggaccaagttctttgtggtgttccgccaccctgtgctgatcttcatcacagagaagcacggcaactactttgcctacgtgcagatgttcaacagccgcatcctgaccaagtacaccctgctgctgggccaggatgagaacagcgtcatcaagagcttcaccgcctctgtggacaggaagttcatcagcctgatgagcctgagcagtgatggctgcatctatgagaccctcatccccatccggcctgctgaccctgagaagaaccagagcctggtgaagagcctgctgctgaaggctgtggtgtctggaaatgccagaaatggagtggccctgacagccctggaccaggaccacgtggccgtgctgggcagccccctggccgccagcaaagaatgtctgtctgtgtggaacatcaagttccagaccctgcagaccagcaaggagctgccccagggcaccagcggccagctgtggtactacggggagcacctgttcatgctgcacggcaagagcctgaccgtcatcccctacaagtgtgaggtgagcagcctggccggggccctgggcaagctgaagcacagccaggaccccggcacccacgtggtgagccactttgtgaactgggagaccccccagggctgcggcctgggcttccagaacagcgagcagagccgccgcatcctgcggcggaggaagattgaggtgtccctgcagcctgaggtgccccccagcaagcagctgctgagcaccatcatgaaggacagcgagaagcacatcgaggtggaggtgaggaagttcctggccctgaagcagaccccagacttccacacagtgattggagacacagtgacaggcctgctggagcgctgcaaggccgagcccagcttctaccccaggaactgcctgatgcagctgatccagacccacgtgctgagctacagcctgtgcccagacctgatggagatcgccctgaagaagaaggatgtgcagctgctgcagctgtgcctgcagcagttcccagacatccctgagagcgtgacctgtgcctgcctgaagatcttcctgagcattggagatgacagcctgcaggagacagatgtgaacatggagagcgtgtttgactacagcatcaacagcgtgcatgatgagaagatggaggagcagacagagatcctgcagaatggcttcaaccctgaggaggacaagtgcaacaactgtgaccaggagctgaacaagaagccccaggatgagaccaaggagagcaccagctgccctgtggtgcagaagagagctgccctgctgaatgccatcctgcacagcgcctacagcgagaccttcctgctgccccacctgaaggacatcccagcccagcacatcaccctcttcctgaagtacctgtacttcctgtacctgaagtgcagtgaaaatgccaccatgaccctgcccggcatccacccccccaccctgaaccagatcatggactggatctgcctgctgctggatgccaacttcaccgtggtggtgatgatgcctgaggccaagaggctgctgatcaacctgtacaagctggtgaagagccagatctctgtgtacagcgagctgaacaagattgaggtgtccttccgggagctgcagaagctgaaccaggagaagaacaacagaggcctgtacagcattgaggtgctggagctgttctag

SEQ ID NO: 186897 - DNA, 2160 bp, Artificial Sequence
  derived and/or modified sequence
atggccgccctggaggaggagttcaccctgagcagcgtggtgctgtctgcaggccctgagggtctgctgggagtggaacagtctgacaaaacagatcagttcctcgtcactgatagcgggcggacagtgatcctttacaaagtttcagatcagaagcctttgggctcttggtcagtgaagcaggggcagattattacctgcccagctgtgtgcaatttccagacgggggaatacgtggttgttcatgacaataaagtcctgcgcatctggaataacgaggatgttaatctggacaaggtcttcaaggccactctgtctgccgaggtgtaccgcatcctctcggtccagggcaccgaaccactcgtgctgttcaaggaaggagctgttagaggcctggaggccctgttggcagaccctcagcaaaaaatcgaaacagtgatctcagatgaagaggttattaagtggaccaagttctttgtggttttccggcaccctgtcctgattttcatcaccgaaaagcatggtaactacttcgcctacgttcagatgttcaacagcaggattctgaccaagtacaccttgctgcttggccaagatgagaattctgtgattaagtccttcacagccagcgtggatcgaaagttcattagcctgatgagtttgtcctcagacgggtgcatatatgaaaccctgattcccataagacccgcagatcctgaaaaaaaccagtccttggtaaaatcactgctgctaaaagctgtggtcagcggcaatgccagaaatggcgtggcactaaccgcactggaccaggaccacgtcgccgtactgggctctccgctggcggccagcaaggagtgcttgtctgtgtggaacataaaattccaaactttacagacttctaaagagctcccccagggaaccagtggtcaattgtggtactatggagaacatctgttcatgctgcatggcaagtcactgacagtcattccctataagtgtgaagtctcgtcccttgccggggctctgggaaaactgaagcactcccaggacccaggcacacacgtggtgagccacttcgtgaactgggaaacaccacaggggtgcggcctggggtttcagaatagcgagcaatccaggagaatcttgcgaagacggaagattgaagtgagcctgcaacctgaggtcccgcccagcaaacagctgctgtccacgataatgaaagactctgaaaagcatatagaagtggaggtgcggaagtttctcgctctaaagcagacccctgacttccacactgtgatcggcgatacggttactggcctccttgagcgatgtaaggccgaaccatccttttacccgcggaactgcctgatgcagctgatccagacacacgttctctcttacagcttgtgccctgatcttatggagatcgcactgaagaagaaagacgtccaactgctgcagttatgtctgcagcagtttcccgacattcccgagtcagtgacctgtgcgtgcctgaaaatcttcctttccattggggacgactctttgcaagaaaccgacgtgaatatggagagcgtctttgactattccattaatagcgtccacgatgagaaaatggaggagcaaaccgagatcctgcagaacggtttcaatccagaggaggataaatgtaacaattgtgaccaggagctcaataagaaaccccaggatgaaaccaaagaatctacttcctgtcccgtcgttcagaagcgtgccgccttgttaaatgcaatccttcatagcgcctatagtgagactttcctcttacctcatctcaaggacatccctgctcaacatatcacgctcttccttaaatatctatacttcttatacctaaaatgttccgagaacgctacgatgaccctccccgggatacatccaccaacgctcaatcaaataatggattggatttgcttgctgctagacgcaaatttcactgtggtggtgatgatgcctgaggctaaacgcctgcttataaacctgtacaaactggtgaagtcccagattagtgtctattccgagctgaacaagattgaggtatccttcagggagctccagaagctcaatcaggagaaaaacaatagaggtctctactccatcgaagtcctcgagctgttctag

SEQ ID NO: 186898 - DNA, 2160 bp, Artificial Sequence
  derived and/or modified sequence
atggcagccctcgaggaggagtttacactctcctctgtggtgctctctgccggacccgaggggttactcggggtggagcagtcagacaaaaccgatcagttcctcgtgaccgattctgggaggaccgtgatcctctataaggtgagtgaccagaagccccttggaagttggtccgtgaaacagggccagattatcacctgtcctgctgtttgtaatttccaaacaggcgaatatgtggtggtccatgataacaaggtcctcaggatttggaataatgaggatgtcaacctcgacaaggtgttcaaggcaaccttgtcagccgaagtgtaccggattctatccgtccagggtacagaaccgctagtcttgtttaaagaaggcgctgtgcgtgggttagaggctctcctggctgatcctcagcagaaaatcgaaaccgttatcagtgatgaagaggtcattaagtggaccaaatttttcgtcgtgtttagacatcctgtcctcatatttattaccgaaaagcatggaaactacttcgcttacgtccagatgtttaacagtcgaatccttacaaagtatacattgcttctcggccaggatgaaaactctgtgattaaaagttttactgcctccgtggatagaaaatttatcagcctcatgtccctgagcagcgacgggtgcatctatgaaactctcatccccatccggccagcagaccccgagaagaaccaaagcctggtaaaatctctactgctgaaagcagttgtctctggtaatgctcggaatggtgttgcactgaccgctctggaccaggaccatgtcgcggtgctgggtagccccctggctgcaagcaaggaatgcctgagcgtgtggaacattaaatttcagaccctgcagacgagtaaggagctacctcaggggacaagtggtcagttatggtattatggtgaacacctttttatgctgcacggcaaatcactgaccgtcattccatataagtgcgaggttagttcacttgccggtgcactcggcaagctaaaacacagccaggaccctggcacacatgtggtaagccacttcgtcaactgggagaccccacagggctgtgggctggggttccagaattccgagcagtctcgacggatccttcgcagaagaaagatcgaggtgagcctgcaacccgaggttcctccaagtaaacagctattgtctaccatcatgaaagacagcgagaagcacattgaggtggaagtgagaaaattcctggcactcaagcaaacccccgactttcacactgtcattggcgacactgtgacaggactactggagaggtgtaaggcggaaccctcgttctacccacggaactgcttaatgcagctcattcaaacgcatgtcctcagctacagcctgtgtcctgatttgatggaaatcgcactgaagaagaaggacgtacaactgctgcagctctgtctccagcaatttccagatattccagagagtgtcacttgtgcctgcctgaaaatcttcctatcaattggagacgactcattgcaagaaacggacgtgaacatggaatctgtctttgattattctattaattccgtccacgacgagaaaatggaagagcaaaccgagatcctgcagaatggatttaatcctgaagaggacaagtgcaataactgcgatcaggaactgaacaaaaaaccgcaggatgaaacaaaggagtccacctcgtgcccagtagtacaaaaaagggccgctctgctgaatgccattttacattccgcttacagcgaaacatttctacttccacacctcaaagatattccggctcaacacataactctttttttgaagtacctttattttctgtacttgaaatgttctgaaaacgccactatgaccctgcccggaatccacccacctaccttgaaccagattatggactggatctgtctcttactcgatgccaacttcacggtggttgtgatgatgcccgaggccaagcggcttctcatcaatttatacaaacttgtaaaaagccagattagtgtgtattcggagttgaacaagatcgaagtgtcctttcgggagcttcaaaagttaaatcaagaaaagaataaccgtgggctgtatagcattgaggttcttgagctattctag

SEQ ID NO: 186899 - DNA, 2160 bp, Artificial Sequence
  derived and/or modified sequence
atggccgccctggaggaggagttcaccctgagcagcgtggtgctgagcgccggccccgagggcctgctgggcgtggagcagagcgacaagaccgaccagttcctggtgaccgacagcggcagaaccgtgatcctgtacaaggtgagcgaccagaagcccctgggcagctggagcgtgaagcagggccagatcatcacctgccccgccgtgtgcaacttccagaccggcgagtacgtggtggtgcacgacaacaaggtgctgagaatctggaacaacgaggacgtgaacctggacaaggtgttcaaggccaccctgagcgccgaggtgtacagaatcctgagcgtgcagggcaccgagcccctggtgctgttcaaggagggcgccgtgagaggcctggaggccctgctggccgacccccagcagaagatcgagaccgtgatcagcgacgaggaggtgatcaagtggaccaagttcttcgtggtgttcagacaccccgtgctgatcttcatcaccgagaagcacggcaactacttcgcctacgtgcagatgttcaacagcagaatcctgaccaagtacaccctgctgctgggccaggacgagaacagcgtgatcaagagcttcaccgccagcgtggacagaaagttcatcagcctgatgagcctgagcagcgacggctgcatctacgagaccctgatccccatcagacccgccgaccccgagaagaaccagagcctggtgaagagcctgctgctgaaggccgtggtgagcggcaacgccagaaacggcgtggccctgaccgccctggaccaggaccacgtggccgtgctgggcagccccctggccgccagcaaggagtgcctgagcgtgtggaacatcaagttccagaccctgcagaccagcaaggagctgccccagggcaccagcggccagctgtggtactacggcgagcacctgttcatgctgcacggcaagagcctgaccgtgatcccctacaagtgcgaggtgagcagcctggccggcgccctgggcaagctgaagcacagccaggaccccggcacccacgtggtgagccacttcgtgaactgggagaccccccagggctgcggcctgggcttccagaacagcgagcagagcagaagaatcctgagaagaagaaagatcgaggtgagcctgcagcccgaggtgccccccagcaagcagctgctgagcaccatcatgaaggacagcgagaagcacatcgaggtggaggtgagaaagttcctggccctgaagcagacccccgacttccacaccgtgatcggcgacaccgtgaccggcctgctggagagatgcaaggccgagcccagcttctaccccagaaactgcctgatgcagctgatccagacccacgtgctgagctacagcctgtgccccgacctgatggagatcgccctgaagaagaaggacgtgcagctgctgcagctgtgcctgcagcagttccccgacatccccgagagcgtgacctgcgcctgcctgaagatcttcctgagcatcggcgacgacagcctgcaggagaccgacgtgaacatggagagcgtgttcgactacagcatcaacagcgtgcacgacgagaagatggaggagcagaccgagatcctgcagaacggcttcaaccccgaggaggacaagtgcaacaactgcgaccaggagctgaacaagaagccccaggacgagaccaaggagagcaccagctgccccgtggtgcagaagagagccgccctgctgaacgccatcctgcacagcgcctacagcgagaccttcctgctgccccacctgaaggacatccccgcccagcacatcaccctgttcctgaagtacctgtacttcctgtacctgaagtgcagcgagaacgccaccatgaccctgcccggcatccacccccccaccctgaaccagatcatggactggatctgcctgctgctggacgccaacttcaccgtggtggtgatgatgcccgaggccaagagactgctgatcaacctgtacaagctggtgaagagccagatcagcgtgtacagcgagctgaacaagatcgaggtgagcttcagagagctgcagaagctgaaccaggagaagaacaacagaggcctgtacagcatcgaggtgctggagctgttctag

SEQ ID NO: 186900 - protein, 164 aa, Artificial Sequence
  derived and/or modified sequence
MGDLPGLVRLSIALRIQPNDGPVFYKVDGQRFGQNRTIKLLTGSSYKVEVKIKPSTLQVENISIGGVLVPLELKSKEPDGDRVVYTGTYDTEGVTPTKSGERQPIQITMPFTDIGTFETVWQVKFYNYHKRDHCQWGSPFSVIEYECKPNETRSLMWVNKESFL

SEQ ID NO: 186901 - DNA, 495 bp, Artificial Sequence
  derived and/or modified sequence
atgggcgacctgcccggcctggtgagactgagcatcgccctgagaatccagcccaacgacggccccgtgttctacaaggtggacggccagagattcggccagaacagaaccatcaagctgctgaccggcagcagctacaaggtggaggtgaagatcaagcccagcaccctgcaggtggagaacatcagcatcggcggcgtgctggtgcccctggagctgaagagcaaggagcccgacggcgacagagtggtgtacaccggcacctacgacaccgagggcgtgacccccaccaagagcggcgagagacagcccatccagatcaccatgcccttcaccgacatcggcaccttcgagaccgtgtggcaggtgaagttctacaactaccacaagagagaccactgccagtggggcagccccttcagcgtgatcgagtacgagtgcaagcccaacgagaccagaagcctgatgtgggtgaacaaggagagcttcctgtag

SEQ ID NO: 186902 - DNA, 495 bp, Artificial Sequence
  derived and/or modified sequence
atgggagatctccccggcttggtgaggctgtcaattgcgctcaggattcagccgaacgacggtccagtattctacaaagtggatgggcagcgattcggccaaaatcgcacgatcaaactccttacgggctcgtcttacaaagttgaggtgaaaattaaaccatctactctgcaagtcgagaatatctcaattggcggagttctcgtgccgctcgaactgaaatccaaagagcccgatggagatagagtagtgtacacgggcacctacgacacggaaggcgtcactcccactaagtcaggcgaacgacaaccaatacagattacaatgccctttactgatattgggacgttcgagaccgtgtggcaggtaaaattctacaactatcacaagagggaccactgccagtggggatcacctttcagcgtaattgaatacgagtgcaagccgaacgaaaccagatctctgatgtgggtcaacaaggaatcatttctctag

SEQ ID NO: 186903 - DNA, 495 bp, Artificial Sequence
  derived and/or modified sequence
atgggagacctgcccggcctggtgcggctgagcatcgccctgcgcatccagcccaatgatggccctgtgttctacaaggtggatggccagcgcttcggccagaacagaaccatcaagctgctgaccggcagcagctacaaggtggaggtgaagatcaagcccagcaccctgcaggtggagaacatcagcatcggcggcgtgctggtgcccctggagctgaagagcaaggagccagatggagacagagtggtgtacacaggcacctatgacacagaaggagtgacccccaccaagtctggagagcggcagcccatccagatcaccatgcccttcacagacatcggcacctttgaaacagtgtggcaggtgaagttctacaactaccacaagagggaccactgccagtggggcagccccttctctgtgattgaatatgagtgcaagcccaatgagaccaggagcctgatgtgggtgaacaaggagagcttcctgtag

SEQ ID NO: 186904 - DNA, 495 bp, Artificial Sequence
  derived and/or modified sequence
atgggcgacctgcccggcctggtgcggctgagcatcgccctgcggatccagcctaacgatggccccgtcttctataaggtggacggccagcggtttgggcaaaaccgaacaattaaactgctaacgggatcctcatacaaggtcgaggttaagatcaagccatctactcttcaggtcgagaatatttcaattggcggggtgctggttccgttagaactcaagtccaaagagcccgatggggatcgtgtcgtgtacaccgggacgtacgacactgagggggtaacaccaactaaaagcggcgaacggcagcccatacagatcacaatgccattcaccgacattggcacctttgagacagtctggcaggttaaattttacaactaccacaagcgggatcactgtcagtggggttccccattttcggtgattgagtatgaatgtaagcccaacgaaaccagatccctgatgtgggtgaacaaagagtcctttttgtag

SEQ ID NO: 186905 - DNA, 495 bp, Artificial Sequence
  derived and/or modified sequence
atgggggacctgcctggtttggtgaggctctccattgccttgcgcatccagcccaatgacggacctgtcttctacaaggtagacggtcagcggtttggccagaatcgcactatcaaactactcaccggatcaagctacaaggtcgaagtgaaaatcaagccgagtacattgcaggtggaaaatattagcatcgggggagtcctggtcccactggagcttaagtccaaagagccggatggggatcgcgtagtgtacaccggcacttacgataccgagggggttacccctaccaaaagcggtgaaaggcaacctattcaaatcactatgccgttcactgacattggcacatttgagaccgtctggcaagtcaaattctataattatcacaagcgggaccactgtcagtggggatcgccgttcagcgtcatcgagtatgagtgcaagccaaatgagacccgctcactgatgtgggtcaacaaagagtcgtttctgtag

SEQ ID NO: 186906 - DNA, 1953 bp, Artificial Sequence
  derived and/or modified sequence
tccctttaccccccctcagcctcctcccgcctggctggcgccggatccgcgagcagcagtgtccacctcacgtagctggccgaggcggtatccagattccgggggtctcgctccttggcatagtggtcgcttaactccagcgccttcccagtgcctcccaaacctctcctcctcctgcccggggctgttctaggaggagcctaaatgtccgcttccccagctgaaggggattgtggtgcgtaaacaggattaactccctcgcccccagctgcgcggatctgcgcggcggcctgcgggccagagcgagccttcgggtgcgtggagggcgcagcactggagcgggggatggggaagcgcgcggccttggagccgtctcttgggcccgcttcctcgccgagtggggaggggggccacagcctaaggagctgctcctcaaaagcccgggcggacggcggcgacggcgcgggttcctagcggcagcctcagctccaccacctccctcaccctccccgcgcttcctctccgcccctcgcgctccagccactcggccgcagccggcgctgtcctccgccccccggagccgccgcgccagaccctcgcccagacatgggggacctgccgggcctcgtgcgcctctccatcgcgctgcgcatccagcctaatgacggcccggtcttttacaaggtggacgggcagcgcttcggccagaaccgcaccatcaagctgctcaccggctcctcctacaaggttgaggtgaagattaaacccagcacgctgcaggtcgagaatatttccattggtggtgtgcttgtcccactggaactgaagtctaaagagcctgatggggacagagttgtttatacgggtacatatgacacagaaggtgtgaccccaacgaagagtggagaacggcaacccatccagatcaccatgccgttcacagacattgggaccttcgagacagtgtggcaagtcaagttctacaattaccacaagcgggatcactgccagtggggaagccccttctctgtcattgagtatgaatgcaagcccaacgagacacgcagtctgatgtgggtgaacaaggagtccttcctctgaaagtggctctttctgatgctactggacaatcttttcagaaatctacttttagataaaccagcgcaggccttaaacaaggcatgccacaccattgctgttccccatctggtactaatgacctactagccctggttattttgaaagtgtaattcccctctgacacaatatccctcacatacaagatggtgatgtaccactcccgagaatattcccatctgtattttgtgctgatgttcctgcatccagttgttctcggtcatacttttgaccacttgtgactggagttcagtggccctggcaggcttgtcctgctcttgaccattccactgactaactttggtgttttgtttccaagttaagtgattcctccttttttttgttcaatgttaaatttaaaaataacaatgtgtatgggtcctcccatgtgtaatatggtaacatgtaacttgcagtgtttgccagctttcaaagcaggctttgtgaaaatgtaatacaaacagcagtgaatgggactcaaatgttgtgcttcctataaacagctccgctctttcagggaaggatggtaacaaactagaaggacaaatatgtacgtatttataacgtattaaaactcttttaagtagcttaaggtattgtgcaatggcctagcctagtagaaatgggggaaaagcattgctgtggaccattgttaaagtgacaggagttgtagggttacccctttgacaagcttccatagtcttcagacacgcacattgatggcatccctacagtcttcttcacttgaactttgtaaaactgcatatggacctgtaatcaacttttgatatttcttaataaaggcgttgaaaatca

SEQ ID NO: 186907 - protein, 206 aa, Artificial Sequence
  derived and/or modified sequence
MLPPAIHFYLLPLACILMKSCLAFKNDATEILYSHVVKPVPAHPSSNSTLNQARNGGRHFSNTGLDRNTRVQVGCRELRSTKYISDGQCTSISPLKELVCAGECLPLPVLPNWIGGGYGTKYWSRRSSQEWRCVNDKTRTQRIQLQCQDGSTRTYKITVVTACKCKRYTRQHNESSHNFESMSPAKPVQHHRERKRASKSSKHSMS

SEQ ID NO: 186908 - protein, 230 aa, Artificial Sequence
  derived and/or modified sequence
MLPPAIHFYLLPLACILMKSCLAFKNDATEILYSHVVKPVPAHPSSNSTLNQARNGGRHFSNTGLDRNRTESLTRQNYFWLFPGAFLRQLQEARVQVGCRELRSTKYISDGQCTSISPLKELVCAGECLPLPVLPNWIGGGYGTKYWSRRSSQEWRCVNDKTRTQRIQLQCQDGSTRTYKITVVTACKCKRYTRQHNESSHNFESMSPAKPVQHHRERKRASKSSKHSMS

SEQ ID NO: 186909 - DNA, 621 bp, Artificial Sequence
  derived and/or modified sequence
atgctgccccccgccatccacttctacctgctgcccctggcctgcatcctgatgaagagctgcctggccttcaagaacgacgccaccgagatcctgtacagccacgtggtgaagcccgtgcccgcccaccccagcagcaacagcaccctgaaccaggccagaaacggcggcagacacttcagcaacaccggcctggacagaaacaccagagtgcaggtgggctgcagagagctgagaagcaccaagtacatcagcgacggccagtgcaccagcatcagccccctgaaggagctggtgtgcgccggcgagtgcctgcccctgcccgtgctgcccaactggatcggcggcggctacggcaccaagtactggagcagaagaagcagccaggagtggagatgcgtgaacgacaagaccagaacccagagaatccagctgcagtgccaggacggcagcaccagaacctacaagatcaccgtggtgaccgcctgcaagtgcaagagatacaccagacagcacaacgagagcagccacaacttcgagagcatgagccccgccaagcccgtgcagcaccacagagagagaaagagagccagcaagagcagcaagcacagcatgagctag

SEQ ID NO: 186910 - DNA, 693 bp, Artificial Sequence
  derived and/or modified sequence
atgctgccccccgccatccacttctacctgctgcccctggcctgcatcctgatgaagagctgcctggccttcaagaacgacgccaccgagatcctgtacagccacgtggtgaagcccgtgcccgcccaccccagcagcaacagcaccctgaaccaggccagaaacggcggcagacacttcagcaacaccggcctggacagaaacagaaccgagagcctgaccagacagaactacttctggctgttccccggcgccttcctgagacagctgcaggaggccagagtgcaggtgggctgcagagagctgagaagcaccaagtacatcagcgacggccagtgcaccagcatcagccccctgaaggagctggtgtgcgccggcgagtgcctgcccctgcccgtgctgcccaactggatcggcggcggctacggcaccaagtactggagcagaagaagcagccaggagtggagatgcgtgaacgacaagaccagaacccagagaatccagctgcagtgccaggacggcagcaccagaacctacaagatcaccgtggtgaccgcctgcaagtgcaagagatacaccagacagcacaacgagagcagccacaacttcgagagcatgagccccgccaagcccgtgcagcaccacagagagagaaagagagccagcaagagcagcaagcacagcatgagctag

SEQ ID NO: 186911 - DNA, 621 bp, Artificial Sequence
  derived and/or modified sequence
atgctgccccctgctatccacttctaccttctgccactcgcctgtattttgatgaaatcgtgtctggcattcaagaacgatgcaactgaaatactgtacagccatgtcgttaagccagttccggctcacccttcttccaacagcacccttaatcaagcgagaaatgggggtcgacacttttcaaataccgggctggaccggaacacccgagtacaggtaggatgtagagagctccggagcacaaaatacattagcgatggacagtgcacgtcaattagccccctcaaggaactggtgtgcgcaggggagtgcctgcctcttccggttctgccaaactggataggcggtggttatggtaccaagtactggagcaggaggagttcacaggagtggcgatgcgtgaatgacaagacacgcacacagcgcatccagctgcaatgtcaagacggaagcacccgaacttataagatcactgtagtcaccgcgtgtaagtgcaagcgctatacccggcagcacaatgagtcgtcacacaattttgaatctatgagtccggccaaacctgtacagcatcacagggaaagaaagcgggcatcaaaatcctccaaacacagcatgtcatag

SEQ ID NO: 186912 - DNA, 693 bp, Artificial Sequence
  derived and/or modified sequence
atgctgccacccgcgattcacttctacctgctgcccttggcctgtattctcatgaaatcatgcttagctttcaagaacgacgcaaccgaaatcctctattcccacgtcgtgaagcccgtgcccgcacatccctctagtaattcaacactgaaccaggccaggaacggcgggcgccacttctccaatactggactcgatcgcaataggactgagtccctgaccaggcagaactatttttggctgtttcccggtgcctttttgagacagctacaggaagctagggtccaggttggctgtcgggaactgagatctactaaatatatctcagatgggcaatgtacctcaatttctcccttgaaggaactcgtttgtgctggagagtgcttgccccttcctgtgctgccaaattggattgggggaggttacggaactaaatattggagcagaagatcaagccaggagtggagatgcgtgaatgataagacaagaacccagaggattcagttgcagtgccaggatggtagcacacggacttataaaattacagtcgttactgcctgcaaatgcaaaaggtacactaggcagcacaacgagtctagtcacaatttcgagtctatgtctcctgctaagcctgtccagcaccatagggagcggaagcgcgctagcaagagtagtaagcactcaatgtcttag

SEQ ID NO: 186913 - DNA, 621 bp, Artificial Sequence
  derived and/or modified sequence
atgctgcccccagccatccacttctacctgctgcccctggcctgcatcctgatgaagagctgcctggccttcaagaatgatgccacagagatcctgtacagccacgtggtgaagcctgtgcctgcccaccccagcagcaacagcaccctgaaccaggccagaaatggaggccgccacttcagcaacacaggcctggacaggaacaccagggtgcaggtgggctgccgggagctgcggagcaccaagtacatcagtgatggccagtgcaccagcatcagccccctgaaggagctggtgtgtgctggagaatgtctgcccctgcctgtgctgcccaactggattggaggcggctacggcaccaagtactggagcagaagaagcagccaggagtggaggtgtgtgaatgacaagaccaggacccagaggatccagctgcagtgccaggacggcagcaccaggacctacaagatcaccgtggtgacagcctgcaagtgcaagcgctacacccggcagcacaatgaaagcagccacaactttgagagcatgagccctgccaagcctgtgcagcaccaccgggagaggaagagggccagcaagagcagcaagcacagcatgtcctag

SEQ ID NO: 186914 - DNA, 693 bp, Artificial Sequence
  derived and/or modified sequence
atgctgcccccagccatccacttctacctgctgcccctggcctgcatcctgatgaagagctgcctggccttcaagaatgatgccacagagatcctgtacagccacgtggtgaagcctgtgcctgcccaccccagcagcaacagcaccctgaaccaggccagaaatggaggccgccacttcagcaacacaggcctggacaggaacagaacagagagcctgacccggcagaactacttctggctgtttcctggggccttcctgcggcagctgcaggaggcccgggtgcaggtgggctgccgggagctgcggagcaccaagtacatcagtgatggccagtgcaccagcatcagccccctgaaggagctggtgtgtgctggagaatgtctgcccctgcctgtgctgcccaactggattggaggcggctacggcaccaagtactggagcagaagaagcagccaggagtggaggtgtgtgaatgacaagaccaggacccagaggatccagctgcagtgccaggacggcagcaccaggacctacaagatcaccgtggtgacagcctgcaagtgcaagcgctacacccggcagcacaatgaaagcagccacaactttgagagcatgagccctgccaagcctgtgcagcaccaccgggagaggaagagggccagcaagagcagcaagcacagcatgtcctag

SEQ ID NO: 186915 - DNA, 621 bp, Artificial Sequence
  derived and/or modified sequence
atgctgccccccgccatccacttctacctgctgcccctggcctgcattctgatgaaatcgtgtctcgcattcaaaaacgatgcgacagaaattctgtactcccatgttgtgaagcccgttcccgctcacccttctagcaactcaaccctaaatcaggcaagaaatggcggacgtcattttagcaatacgggtctggaccggaacacacgcgtacaagtagggtgcagggagctgagaagtacaaagtatatctcagacggacagtgcacttccattagtcccctgaaggaactggtgtgcgccggggagtgccttccactacctgtcctgccaaactggatcggaggcggctatggaaccaagtactggtctaggaggtcctcgcaggaatggcgatgtgtaaatgacaagacccggactcagaggattcagttgcagtgtcaggacggctccactaggacgtacaagataaccgtggtcaccgcatgcaagtgtaaacgctacactcggcaacacaacgaatcttcacataatttcgagtctatgagtcccgccaaacctgtgcagcaccacagggaaaggaagcgcgcgagtaaaagtagtaaacactccatgtcctag

SEQ ID NO: 186916 - DNA, 693 bp, Artificial Sequence
  derived and/or modified sequence
atgctgccccccgccatccacttctacctgctgcccctggcctgcattctaatgaagagctgtctggcgtttaaaaatgatgcaacggagatcctctatagccacgtcgttaagcccgttcctgcccatccatcttctaacagcaccctcaaccaggcccggaatggagggaggcactttagcaataccggcctggaccgcaatcggaccgaaagcctgactaggcaaaattatttttggttgttcccaggcgctttcctcagacagctgcaggaggccagagtacaagtaggatgtcgagagttgcgcagcaccaagtatatctcggatggacagtgtaccagcatcagtcctttgaaggagctcgtgtgtgccggggagtgcctgcctctgcctgttttgcccaactggatcggtggtggttatgggacaaagtactggagcagacggagtagccaggaatggcgttgtgtcaatgacaaaactagaacgcaaaggatacagctacaatgtcaggacggcagtaccaggacatacaaaatcaccgttgtgacagcttgtaagtgcaaaaggtatacacggcagcataacgagagtagtcataactttgagtctatgtccccagctaagcctgtccagcaccatcgcgagcgtaaaagggcatctaagagtagcaaacattcgatgagctag

SEQ ID NO: 186917 - DNA, 621 bp, Artificial Sequence
  derived and/or modified sequence
atgttgccccctgcaatacatttctatctactccccctggcctgtattctgatgaagagttgtttagcatttaaaaacgatgctacagagatcttgtacagccatgtagtcaaacctgtgccagcccatccctcttccaactctactctgaaccaggctcgaaacggcggacggcacttcagtaatactgggctggatcggaatacaagagtccaggtgggctgtcgggagctgcggtcaacaaaatacatctctgacgggcagtgtacgagcatttccccactaaaggagctggtctgtgcaggcgaatgcttgccactgcccgtgctccccaattggattgggggtggatacggaacaaaatattggtccagaaggagctcccaggagtggcggtgtgttaacgataagactaggacacagaggatccagctccaatgtcaagatgggtcaaccagaacttacaagatcacagtagtcacagcctgcaagtgcaagaggtatacaaggcagcataacgagagttcgcataattttgagtctatgtcacccgctaaaccggtccaacaccaccgggaacggaaacgtgcttctaagtcgagcaaacacagtatgagctag

SEQ ID NO: 186918 - DNA, 693 bp, Artificial Sequence
  derived and/or modified sequence
atgctgcctccagcaattcacttttacttacttccattggcatgtattttgatgaagtcgtgcctggcttttaagaatgacgccactgagatcctgtacagtcacgtagttaagcccgtacctgcacatccttcttctaattcaactctgaaccaggccagaaacgggggaagacactttagcaataccggtttggataggaaccgcacagagtccctcacacgccagaactacttctggttatttccaggggcttttttacgacagctgcaggaggccagagttcaggtaggttgccgggagttgaggtctaccaaatacatctctgatggccaatgtacatccatctcccctctcaaagagctggtgtgtgccggagagtgcctccctttaccagtgctgccgaattggattggcggaggctacggcaccaaatattggtctcgtcgctcttcccaggagtggaggtgtgtgaatgacaagacccggacgcagcggatccaacttcagtgccaggacggcagcacccggacctataagattactgttgtaacggcctgtaagtgcaaaagatatactagacagcataatgaatcttcacataacttcgagagcatgagtcctgccaagccggtgcagcaccatcgggaacggaaacgcgcttcaaagtctagcaaacattccatgagctag

SEQ ID NO: 186919 - DNA, 621 bp, Artificial Sequence
  derived and/or modified sequence
atgctgcctccagccattcacttctacctgctgcctcttgcatgtattctcatgaagagttgccttgccttcaaaaatgacgctactgagatcttgtattcacatgtggtcaaacccgttcccgctcacccttcaagcaactcgaccctcaaccaggccaggaacggaggccgccacttttcaaatactggtctggaccgaaacactcgcgtacaggttggctgtagagagctacggagcacaaagtatatttcggatggacagtgtacctcaatcagtcccctaaaggagctcgtctgtgccggagagtgcttaccactgcctgtgttacccaattggattggcggcggatatggaacaaaatattggtcccggaggagctctcaggaatggagatgcgtgaatgataagacaaggacccagcgcatccagttgcagtgccaggatggcagtacaagaacctataaaataactgtcgttacagcatgcaagtgcaagcggtatacgcgccagcataatgaatcttctcataactttgaaagcatgtctcccgcgaaacccgtgcagcatcacagggagaggaagcgcgcatccaaatccagcaagcatagtatgagttag

SEQ ID NO: 186920 - DNA, 693 bp, Artificial Sequence
  derived and/or modified sequence
atgctgcccccggcaatacacttctacctgctgcctctggcctgcattctcatgaagtcatgccttgcgtttaaaaacgacgccacagagatcctatattcacacgtggtgaaaccagttccagcgcatcccagctctaatagcaccctgaaccaggcccggaacggcggaagacacttttcgaataccggcctagacagaaacagaacagaatcccttacacgacagaattacttttggctatttcctggtgcctttctcaggcagttacaggaggcccgcgttcaggtcggatgtagggaactacgcagcaccaagtatatctccgacggccagtgtacatccatctcacctcttaaagagcttgtgtgtgccggcgagtgtcttcctttacccgtgctgccaaattggataggggggggatacggcacaaagtactggtcccgaagaagttcccaggaatggcgatgcgtgaatgacaaaacgcgcacccagaggatccaattacagtgccaagacggcagtacacgcacatacaaaatcaccgtggtcacagcttgtaaatgtaagcgatatacgcgccaacataatgaatcatcccacaattttgagtcaatgagtccagcgaagcccgttcagcatcaccgcgaaagaaaacgagccagcaagtcttctaaacactcaatgtcctag

SEQ ID NO: 186921 - DNA, 621 bp, Artificial Sequence
  derived and/or modified sequence
atgttaccccccgccatccacttctaccttctgccgcttgcctgcatcctgatgaagtcttgccttgcttttaaaaacgatgccacggagatactctattcccacgtagtgaaacccgtgcccgctcaccctagtagcaactccacacttaaccaggccagaaacggcggccgtcacttttctaatacgggccttgacagaaatactagagttcaggtcggctgtagggagctgcgcagcacaaaatatatctctgacggacagtgcacctcaatctcaccattaaaagagcttgtgtgcgccggcgaatgtctgcccctgcccgtgctgcctaattggatcggtggcgggtatggaacaaagtattggtctcggaggtcatcacaggaatggcgatgcgttaacgacaagacaaggacccagagaattcagctccagtgtcaagacggctcaacccgaacctacaagataaccgtcgtgactgcttgcaagtgtaagaggtatactcggcagcacaacgaaagtagtcacaattttgaatcaatgtcaccagcgaaacctgttcagcatcatcgcgaaagaaagagggctagtaagagtagtaagcacagcatgagttag

SEQ ID NO: 186922 - DNA, 693 bp, Artificial Sequence
  derived and/or modified sequence
atgttgcctccggctatacatttctatctcctcccactcgcatgtatattgatgaagagttgcctggcgtttaagaatgatgccacagagattctgtattctcacgttgttaaacctgttcccgcacacccaagctctaattctacactcaaccaggccaggaatggcggcaggcacttctcaaataccggtctagaccggaaccgtaccgaaagccttactcgacaaaattatttctggttatttcccggagcttttctccgccaactgcaggaggccagggtacaagttggttgcagagagctgaggtcaacgaaatatatctcggacggacaatgtactagtataagtccccttaaagagttggtttgtgcaggggagtgcctgccactcccggtcctgccgaactggataggaggaggttacgggacgaaatattggagccgccgaagcagtcaagagtggaggtgcgtcaacgataaaacgcgaacccaaagaatacagctccagtgccaagatggatctacaagaacctacaagataacagttgttactgcttgcaagtgcaaaagatacacacgtcaacataatgagagctcccacaattttgaatctatgtctccagctaaacccgtgcaacatcaccgcgagcgaaaacgcgcctctaagtcctccaaacattctatgtcctag

SEQ ID NO: 186923 - DNA, 1869 bp, Artificial Sequence
  derived and/or modified sequence
agggatcccaccccttctctgtgttttcactctgaagctctacacaactttacacctgaatgaacgccaaacctctatggatatataaagggaagcttgaggaggaatttcacagttacagtgcagaagcagaagcaaaagaattaaccagctcttcagtcaagcaaatcctctactcaccatgcttcctcctgccattcatttctatctccttccccttgcatgcatcctaatgaaaagctgtttggcttttaaaaatgatgccacagaaatcctttattcacatgtggttaaacctgttccagcacaccccagcagcaacagcacgttgaatcaagccagaaatggaggcaggcatttcagtaacactggactggatcggaacactcgggttcaagtgggttgccgggaactgcgttccaccaaatacatctctgatggccagtgcaccagcatcagccctctgaaggagctggtgtgtgctggcgagtgcttgcccctgccagtgctccctaactggattggaggaggctatggaacaaagtactggagcaggaggagctcccaggagtggcggtgtgtcaatgacaaaacccgtacccagagaatccagctgcagtgccaagatggcagcacacgcacctacaaaatcacagtagtcactgcctgcaagtgcaagaggtacacccggcagcacaacgagtccagtcacaactttgagagcatgtcacctgccaagccagtccagcatcacagagagcggaaaagagccagcaaatccagcaagcacagcatgagttagaactcagactcccataactagacttactagtaaccatctgctttacagatttgattgcttggaagactcaagcctgccactgctgttttctcacttgaaagtatatgctttctgctttgatcaaacccagcaagctgtcttaagtatcaggaccttctttgggaatagtttttccttttcaagtttttcaagatgtaggtatatccatgaatgcaatttgcatttaaattccacgtatcctgtagttttaattcctcattgttcttaaaagactgttgatactataaacatcagtgaatcattatattttaaaacagaaaagggcttctcagataccctccatctactggcccatcccctctcctaaacaaaactccttcaaaacaggttaaaaaaaatatgttgtcatgaatcttcacagtaacatttcagaaaggtgcttttttggtactcttcatgggaacagtttagcagccatgagtgatcttcctttgaaagagaatgaaagaccctgtgacatttcacttcaaaaataagccctgtagctctttacggtcgcatagtatgaaattataccctgcatgctgaccctcgcttggaatggaatgccagaaatgcatggcagcagctaataagtaaagctgattaactatttatttgtcaatgttattatttaatgagctttcacatgtgatttgtttcaaaactttaattttttaatgttttgaaactttttcatggacctaaatattttcctatatgatttgtggttgattagaaatatgaaatacatgttgtagatatgtaaaatgaatattttagtctccttattacatatatgttcatggtgaactttatcaatagtatggatctttttaaatcaataagatgctttgtaaagttgaaataagtaatactttcttgtttaatctgtgcaatcagaaggtgtcttgaccttcaattcaattggtttcttttaacaaaaataaacactgctaaaagttattgttgttgcctctaacatgtataaagggtgcaaaaattgtagaataaatgtataagggtaa

SEQ ID NO: 186924 - DNA, 2411 bp, Artificial Sequence
  derived and/or modified sequence
aaaatatagagaagtggtctgatggttaattttatatataaatttgactggactaggggatgcccagaagctggtaaaacattatttatgggtgtgtttctgaggatgtttttggaagagattagcattagtattagtggactgagtaaacaagatcaccctcgccaacaggggtggatattatccaatccactgagggccccaatagaacagaaaaacagaggaatgtgaattcatgcttgcttctggagttaggacatccatcttctgccttcagacatcagcattcctagttctcaggtctctgggcttggactaaactacattactggctctctcctgggctccagattgcagacagcagattgtgggacttctcagcctccgtaatcaatcctgtcttggaacctgcttcttagagggcctggactaacatactctggtagtgcatgaagcatctgtgatcacagcgtgacaagaaaatagcacaaacaaacctatgaggacttgagagaattcaaaagggtcatgtagggatcccaccccttctctgtgttttcactctgaagctctacacaactttacacctgaatgaacgccaaacctctatggatatataaagggaagcttgaggaggaatttcacagttacagtgcagaagcagaagcaaaagaattaaccagctcttcagtcaagcaaatcctctactcaccatgcttcctcctgccattcatttctatctccttccccttgcatgcatcctaatgaaaagctgtttggcttttaaaaatgatgccacagaaatcctttattcacatgtggttaaacctgttccagcacaccccagcagcaacagcacgttgaatcaagccagaaatggaggcaggcatttcagtaacactggactggatcggaacagaacagaaagcttgacgagacaaaattatttctggctatttccaggtgcattcctgaggcagctgcaggaagctcgggttcaagtgggttgccgggaactgcgttccaccaaatacatctctgatggccagtgcaccagcatcagccctctgaaggagctggtgtgtgctggcgagtgcttgcccctgccagtgctccctaactggattggaggaggctatggaacaaagtactggagcaggaggagctcccaggagtggcggtgtgtcaatgacaaaacccgtacccagagaatccagctgcagtgccaagatggcagcacacgcacctacaaaatcacagtagtcactgcctgcaagtgcaagaggtacacccggcagcacaacgagtccagtcacaactttgagagcatgtcacctgccaagccagtccagcatcacagagagcggaaaagagccagcaaatccagcaagcacagcatgagttagaactcagactcccataactagacttactagtaaccatctgctttacagatttgattgcttggaagactcaagcctgccactgctgttttctcacttgaaagtatatgctttctgctttgatcaaacccagcaagctgtcttaagtatcaggaccttctttgggaatagtttttccttttcaagtttttcaagatgtaggtatatccatgaatgcaatttgcatttaaattccacgtatcctgtagttttaattcctcattgttcttaaaagactgttgatactataaacatcagtgaatcattatattttaaaacagaaaagggcttctcagataccctccatctactggcccatcccctctcctaaacaaaactccttcaaaacaggttaaaaaaaatatgttgtcatgaatcttcacagtaacatttcagaaaggtgcttttttggtactcttcatgggaacagtttagcagccatgagtgatcttcctttgaaagagaatgaaagaccctgtgacatttcacttcaaaaataagccctgtagctctttacggtcgcatagtatgaaattataccctgcatgctgaccctcgcttggaatggaatgccagaaatgcatggcagcagctaataagtaaagctgattaactatttatttgtcaatgttattatttaatgagctttcacatgtgatttgtttcaaaactttaattttttaatgttttgaaactttttcatggacctaaatattttcctatatgatttgtggttgattagaaatatgaaatacatgttgtagatatgtaaaatgaatattttagtctccttattacatatatgttcatggtgaactttatcaatagtatggatctttttaaatcaataagatgctttgtaaagttgaaataagtaatactttcttgtttaatctgtgcaatcagaaggtgtcttgaccttcaattcaattggtttcttttaacaaaaataaacactgctaaaagtta

SEQ ID NO: 186925 - RNA, 621 nt, Artificial Sequence
  derived and/or modified sequence
augcugccuccagccauucacuucuaccugcugccucuugcauguauucucaugaagaguugccuugccuucaaaaaugacgcuacugagaucuuguauucacauguggucaaacccguucccgcucacccuucaagcaacucgacccucaaccaggccaggaacggaggccgccacuuuucaaauacuggucuggaccgaaacacucgcguacagguuggcuguagagagcuacggagcacaaaguauauuucggauggacaguguaccucaaucaguccccuaaaggagcucgucugugccggagagugcuuaccacugccuguguuacccaauuggauuggcggcggauauggaacaaaauauuggucccggaggagcucucaggaauggagaugcgugaaugauaagacaaggacccagcgcauccaguugcagugccaggauggcaguacaagaaccuauaaaauaacugucguuacagcaugcaagugcaagcgguauacgcgccagcauaaugaaucuucucauaacuuugaaagcaugucucccgcgaaacccgugcagcaucacagggagaggaagcgcgcauccaaauccagcaagcauaguaugaguuag

SEQ ID NO: 186926 - RNA, 693 nt, Artificial Sequence
  derived and/or modified sequence
augcugcccccggcaauacacuucuaccugcugccucuggccugcauucucaugaagucaugccuugcguuuaaaaacgacgccacagagauccuauauucacacguggugaaaccaguuccagcgcaucccagcucuaauagcacccugaaccaggcccggaacggcggaagacacuuuucgaauaccggccuagacagaaacagaacagaaucccuuacacgacagaauuacuuuuggcuauuuccuggugccuuucucaggcaguuacaggaggcccgcguucaggucggauguagggaacuacgcagcaccaaguauaucuccgacggccaguguacauccaucucaccucuuaaagagcuugugugugccggcgagugucuuccuuuacccgugcugccaaauuggauaggggggggauacggcacaaaguacuggucccgaagaaguucccaggaauggcgaugcgugaaugacaaaacgcgcacccagaggauccaauuacagugccaagacggcaguacacgcacauacaaaaucaccguggucacagcuuguaaauguaagcgauauacgcgccaacauaaugaaucaucccacaauuuugagucaaugaguccagcgaagcccguucagcaucaccgcgaaagaaaacgagccagcaagucuucuaaacacucaauguccuag

SEQ ID NO: 186927 - RNA, 621 nt, Artificial Sequence
  derived and/or modified sequence
auguuaccccccgccauccacuucuaccuucugccgcuugccugcauccugaugaagucuugccuugcuuuuaaaaacgaugccacggagauacucuauucccacguagugaaacccgugcccgcucacccuaguagcaacuccacacuuaaccaggccagaaacggcggccgucacuuuucuaauacgggccuugacagaaauacuagaguucaggucggcuguagggagcugcgcagcacaaaauauaucucugacggacagugcaccucaaucucaccauuaaaagagcuugugugcgccggcgaaugucugccccugcccgugcugccuaauuggaucgguggcggguauggaacaaaguauuggucucggaggucaucacaggaauggcgaugcguuaacgacaagacaaggacccagagaauucagcuccagugucaagacggcucaacccgaaccuacaagauaaccgucgugacugcuugcaaguguaagagguauacucggcagcacaacgaaaguagucacaauuuugaaucaaugucaccagcgaaaccuguucagcaucaucgcgaaagaaagagggcuaguaagaguaguaagcacagcaugaguuag

SEQ ID NO: 186928 - RNA, 693 nt, Artificial Sequence
  derived and/or modified sequence
auguugccuccggcuauacauuucuaucuccucccacucgcauguauauugaugaagaguugccuggcguuuaagaaugaugccacagagauucuguauucucacguuguuaaaccuguucccgcacacccaagcucuaauucuacacucaaccaggccaggaauggcggcaggcacuucucaaauaccggucuagaccggaaccguaccgaaagccuuacucgacaaaauuauuucugguuauuucccggagcuuuucuccgccaacugcaggaggccaggguacaaguugguugcagagagcugaggucaacgaaauauaucucggacggacaauguacuaguauaaguccccuuaaagaguugguuugugcaggggagugccugccacucccgguccugccgaacuggauaggaggagguuacgggacgaaauauuggagccgccgaagcagucaagaguggaggugcgucaacgauaaaacgcgaacccaaagaauacagcuccagugccaagauggaucuacaagaaccuacaagauaacaguuguuacugcuugcaagugcaaaagauacacacgucaacauaaugagagcucccacaauuuugaaucuaugucuccagcuaaacccgugcaacaucaccgcgagcgaaaacgcgccucuaaguccuccaaacauucuauguccuag

SEQ ID NO: 186929 - protein, 1636 aa, Artificial Sequence
  derived and/or modified sequence
MEAVPRMPMIWLDLKEAGDFHFQPAVKKFVLKNYGENPEAYNEELKKLELLRQNAVRVPRDFEGCSVLRKYLGQLHYLQSRVPMGSGQEAAVPVTWTEIFSGKSVAHEDIKYEQACILYNLGALHSMLGAMDKRVSEEGMKVSCTHFQCAAGAFAYLREHFPQAYSVDMSRQILTLNVNLMLGQAQECLLEKSMLDNRKSFLVARISAQVVDYYKEACRALENPDTASLLGRIQKDWKKLVQMKIYYFAAVAHLHMGKQAEEQQKFGERVAYFQSALDKLNEAIKLAKGQPDTVQDALRFTMDVIGGKYNSAKKDNDFIYHEAVPALDTLQPVKGAPLVKPLPVNPTDPAVTGPDIFAKLVPMAAHEASSLYSEEKAKLLREMMAKIEDKNEVLDQFMDSMQLDPETVDNLDAYSHIPPQLMEKCAALSVRPDTVRNLVQSMQVLSGVFTDVEASLKDIRDLLEEDELLEQKFQEAVGQAGAISITSKAELAEVRREWAKYMEVHEKASFTNSELHRAMNLHVGNLRLLSGPLDQVRAALPTPALSPEDKAVLQNLKRILAKVQEMRDQRVSLEQQLRELIQKDDITASLVTTDHSEMKKLFEEQLKKYDQLKVYLEQNLAAQDRVLCALTEANVQYAAVRRVLSDLDQKWNSTLQTLVASYEAYEDLMKKSQEGRDFYADLESKVAALLERTQSTCQAREAARQQLLDRELKKKPPPRPTAPKPLLPRREESEAVEAGDPPEELRSLPPDMVAGPRLPDTFLGSATPLHFPPSPFPSSTGPGPHYLSGPLPPGTYSGPTQLIQPRAPGPHAMPVAPGPALYPAPAYTPELGLVPRSSPQHGVVSSPYVGVGPAPPVAGLPSAPPPQFSGPELAMAVRPATTTVDSIQAPIPSHTAPRPNPTPAPPPPCFPVPPPQPLPTPYTYPAGAKQPIPAQHHFSSGIPAGFPAPRIGPQPQPHPQPHPSQAFGPQPPQQPLPLQHPHLFPPQAPGLLPPQSPYPYAPQPGVLGQPPPPLHTQLYPGPAQDPLPAHSGALPFPSPGPPQPPHPPLAYGPAPSTRPMGPQAAPLTIRGPSSAGQSTPSPHLVPSPAPSPGPGPVPPRPPAAEPPPCLRRGAAAADLLSSSPESQHGGTQSPGGGQPLLQPTKVDAAEGRRPQALRLIERDPYEHPERLRQLQQELEAFRGQLGDVGALDTVWRELQDAQEHDARGRSIAIARCYSLKNRHQDVMPYDSNRVVLRSGKDDYINASCVEGLSPYCPPLVATQAPLPGTAADFWLMVHEQKVSVIVMLVSEAEMEKQKVARYFPTERGQPMVHGALSLALSSVRSTETHVERVLSLQFRDQSLKRSLVHLHFPTWPELGLPDSPSNLLRFIQEVHAHYLHQRPLHTPIIVHCSSGVGRTGAFALLYAAVQEVEAGNGIPELPQLVRRMRQQRKHMLQEKLHLRFCYEAVVRHVEQVLQRHGVPPPCKPLASASISQKNHLPQDSQDLVLGGDVPISSIQATIAKLSIRPPGGLESPVASLPGPAEPPGLPPASLPESTPIPSSSPPPLSSPLPEAPQPKEEPPVPEAPSSGPPSSSLELLASLTPEAFSLDSSLRGKQRMSKHNFLQAHNGQGLRATRPSDDPLSLLDPLWTLNKT

SEQ ID NO: 186930 - DNA, 4911 bp, Artificial Sequence
  derived and/or modified sequence
atggaggcagttcctcgcatgcccatgatttggttagacctaaaagaggccggtgatttccactttcaacccgccgtgaagaaattcgtgctcaaaaactacggcgaaaatcctgaggcctataatgaggaactgaagaagctcgaactgttgaggcagaatgccgtgagggttccccgggacttcgagggctgtagcgttttgcggaaatacctgggccaacttcattacctccaatcaagggtgcccatggggagcgggcaggaagctgcagtccctgtgacatggacagagattttcagcggaaaaagcgtggcccacgaggatatcaagtatgaacaggcctgtatcctgtataatctgggcgccctgcacagtatgctgggcgctatggacaaaagagtttcagaggaaggcatgaaagtctcctgtacccacttccagtgtgccgcaggcgcatttgcgtatctcagagagcacttcccccaggcatactcagtcgatatgtcaagacagatcttgacactcaatgtgaacttaatgctggggcaggctcaagaatgcctccttgaaaaatccatgctcgataaccgcaagtccttccttgtcgccaggatctccgcccaggtggttgattattacaaagaggcctgtagagcactggaaaatcccgacactgcaagtctgctcgggagaattcagaaggattggaaaaagttggtgcagatgaagatttactatttcgcggctgtggctcacttgcacatgggaaagcaagccgaagagcaacagaaattcggggagagagtggcctacttccaatctgcattagacaagttaaatgaagctatcaagcttgccaaagggcagcctgacaccgtgcaagacgccctacggttcacgatggacgtcatcgggggaaagtataactctgccaagaaagataacgactttatctaccacgaagctgtgccggccctggataccttgcagcctgtcaaaggagctccactggtaaaaccgttgcccgtgaatcccacggatcccgcagtgactggcccagatatcttcgccaaattggtacctatggcagcccacgaagccagttccctgtactctgaggaaaaagcaaaactgcttagggaaatgatggcaaaaattgaggacaagaatgaggttttggatcagttcatggattccatgcaactcgacccagagaccgtggataacctggacgcctactcccacatcccaccccagctcatggaaaagtgcgctgccctgagtgtgcggccagacaccgtaaggaatctggtccagagcatgcaggtgctatcaggagtgttcactgacgtggaggcatccctgaaggatattcgagacttactcgaggaggatgagctactggagcagaaatttcaggaggccgtcgggcaagcaggagccatctccataacctctaaggcggaattagctgaagtgagaagggaatgggcgaaatatatggaggtgcatgagaaagcttcctttactaactctgaactacaccgcgcaatgaatttacatgttggcaacttgaggttgctttcaggtcctctggatcaggtgcgcgccgcactgccaacgcccgcactctccccagaagacaaggccgttctgcagaatctcaagcgcattctcgccaaagtgcaagagatgcgcgatcagcgggtttcccttgagcagcagctgagggagctcattcagaaggacgatatcactgcaagtctggttaccaccgatcacagtgagatgaaaaagctttttgaggaacagttaaagaagtacgaccagctgaaagtttacctcgaacagaaccttgcagctcaggatagggtgctgtgcgctctcaccgaagctaatgtgcagtacgcagcagtcaggcgggttctctctgacctagaccagaaatggaattctaccctgcagaccctggtcgcttcttacgaggcttacgaggatttaatgaagaagtcccaggaggggcgcgatttctatgcagatctggaatctaaagtcgccgccctcctcgaacggactcagagcacttgccaggcccgcgaggctgctaggcagcagctacttgacagggagctgaaaaaaaaaccgccccctagacctaccgcccctaagcccctgctgcctagacgcgaagaatctgaggcggtggaagctggggaccctccagaggagctgaggtccctccccccggatatggtggccggacctagactgcccgacacattcctcggctccgccaccccactgcactttccccccagtccttttccgtcttccaccgggccaggtcctcattaccttagtggcccattaccacccggaacgtattcaggacctacccagctgatccaaccgagagcccccggcccacacgctatgcccgtggctcctgggcctgcactctaccccgcccctgcttacactccagagcttggactggtgcctagaagctctccacaacatggggtcgtatccagcccttacgtgggcgtcgggccggcaccccccgtggccgggctgccatccgcgcctccacctcagttttctgggcccgagcttgccatggcggtccgacccgccacaacaaccgtggattctatacaagcaccaatcccctcccacacagcgcctagacccaatcctacaccagcccctcccccgccatgtttcccagttccacctccacagccccttccaaccccttatacgtaccctgccggggccaagcagccaattccggcccaacatcacttttccagtgggatcccagcaggtttcccagcccctaggatcggcccacagcctcagccccacccccaaccgcaccccagccaagcctttgggccacagcccccccaacagcctctgcccttgcaacacccccacctatttcccccacaggcgcccggcttacttcctcctcagtctccctacccttacgcgcctcagccaggtgttctcggacagcccccgcctccactgcacactcagctctatcccgggcctgcgcaggacccacttccagcacactctggcgcactgcccttcccctcgcctggacctccccaacctccacatccccctctcgcctatggacccgccccatcgacgcggccaatggggccacaggcagcacccctgacaatccggggcccatctagcgccggccagtcaacgccatcccctcatctagttcccagcccagccccatccccgggacctggtcccgtcccaccacgccccccagccgcggaaccccccccttgccttcgtcgcggtgccgcggctgcagatttactgtcttccagtccggaatcacaacacggcggtacccaatcccctggcggcgggcagcccttgctgcagccaacaaaggtcgatgccgcagaagggcgtagaccacaggcgctgcgtctaattgaaagagatccctatgagcaccctgagagactgcggcagcttcagcaggagctcgaggccttcagaggacaactgggagacgtgggggccttggacactgtgtggagggaacttcaagacgcccaagagcatgacgctagaggaaggtcgatcgccatagcgaggtgctactccctcaagaaccgccatcaagatgtgatgccgtacgactccaaccgggtggtcctgcgtagtgggaaggacgattacattaatgcctcatgtgtggaaggactatccccttactgccctcctctcgttgctactcaggctcccctgcctggcactgccgcagatttttggctgatggttcacgagcaaaaagtgtccgtgatagtcatgctggtgagtgaagccgagatggagaaacaaaaagttgcaaggtattttcccaccgagcgcggacagcctatggtgcatggtgctctcagtctagcgttgtcgtccgtgcgctcaactgaaacccatgtagagagggtactgagcctccagtttagagaccaatccctgaaaaggagtctggtgcacttgcactttccgacttggccagagctcggactccctgactccccatctaatctcctgcggtttatacaggaggtgcatgcccactacctgcatcagcggcccttgcacactccaatcatcgtccattgcagctcgggcgtcggccggactggcgcctttgccctgctgtacgccgctgtgcaagaagtggaggccggcaacggtattcctgagttgccacagctggttcgcaggatgcggcaacagcgcaagcacatgctgcaggagaagctacacctcagattttgctatgaagccgtggtaagacacgtagaacaagtgctgcagcgacatggcgtgcccccaccttgcaaacctctagcttccgccagtatctctcagaagaatcacctgccacaggacagccaggacctggtgttggggggggacgtgcctatttcctctatccaagcgacgatcgccaagctgagcattcggcctccgggaggactagagtccccggtggcctcactgcctgggccagcggagccgcccgggctcccaccagcctcgcttcccgagtctacgcctattcctagttctagtccccctccccttagctctccgctgcctgaggcccctcaacccaaggaagaaccaccagtgccagaggccccaagttccgggccaccctcaagctcactggagctcctagcatccttgacacctgaggcattttcacttgactcctcactgaggggcaagcagcgtatgtctaaacataacttcttgcaagctcataatggccagggactgcgggccacgcgtccttcagacgaccctctgtccttactggatcccctgtggaccttgaacaagacctag

SEQ ID NO: 186931 - DNA, 4911 bp, Artificial Sequence
  derived and/or modified sequence
atggaggccgtgcccaggatgcccatgatctggctggacctgaaggaggccggggacttccacttccagcctgctgtgaagaagtttgtgctgaagaactacggggagaaccctgaggcctacaatgaggagctgaagaagctggagctgctgcggcagaatgctgtgcgggtgccccgggactttgagggctgcagcgtgctgaggaagtacctgggccagctgcactacctgcagagccgggtgcccatgggcagcggccaggaggccgctgtgcctgtgacctggacagagatcttcagcggcaagtctgtggcccacgaggacatcaagtatgagcaggcctgcatcctgtacaacctgggcgccctgcacagcatgctgggcgccatggacaagagggtgtctgaggagggcatgaaggtgtcctgcacccacttccagtgtgccgccggggcctttgcctacctgcgggagcacttcccccaggcctacagcgtggacatgagccggcagatcctgaccctgaatgtgaacctgatgctgggccaggcccaggagtgcctgctggagaagtccatgctggacaacaggaagagcttcctggtggcccgcatcagcgcccaggtggtggactactacaaggaggcctgccgggccctggagaacccagacacagccagcctgctgggccgcatccagaaggactggaagaagctggtgcagatgaagatctactactttgctgctgtggcccacctgcacatgggcaagcaggccgaggagcagcagaagtttggagagcgggtggcctacttccagagcgccctggacaagctgaatgaggccatcaagctggccaagggccagcctgacacagtgcaggatgccctgcgcttcaccatggatgtgattggaggcaagtacaacagcgccaagaaggacaatgacttcatctaccatgaagctgtgcctgccctggacaccctgcagcctgtgaagggggcccccctggtgaagcccctgcctgtgaaccccacagatcctgctgtgacaggccctgacatctttgccaagctggtgcccatggccgcccacgaggccagcagcctgtacagcgaggagaaggccaagctgctgcgggagatgatggccaagattgaggacaagaatgaggtgctggaccagttcatggacagcatgcagctggaccctgagaccgtggacaacctggatgcctacagccacatccccccccagctgatggagaagtgtgccgccctgtctgtgcggccagacacagtgaggaacctggtgcagagcatgcaggtgctgagcggggtcttcacagatgtggaggccagcctgaaggacatccgggacctgctggaggaggatgagctgctggagcagaagttccaggaggccgtgggccaggccggggccatcagcatcaccagcaaggccgagctggccgaggtgagaagagagtgggccaagtacatggaggtgcatgagaaggccagcttcaccaacagcgagctgcaccgggccatgaacctgcacgtgggcaacctgcggctgctgagcggccccctggaccaggtgcgggccgccctgcccaccccagccctgagccctgaggacaaggctgtgctgcagaacctgaagaggatcctggccaaggtgcaggagatgagggaccagagggtgtccctggagcagcagctgcgggagctgatccagaaggatgacatcacagccagcctggtgaccacagaccacagcgagatgaagaagctgtttgaggagcagctgaagaagtatgaccagctgaaggtgtacctggagcagaacctggccgcccaggacagagtgctgtgtgccctgacagaggccaacgtgcagtatgctgctgtgagaagagtgctgagtgacctggaccagaagtggaacagcaccctgcagaccctggtggccagctatgaggcctatgaggacctgatgaagaagagccaggagggccgggacttctacgccgacctggagagcaaggtggccgccctgctggagaggacccagagcacctgccaggcccgggaggccgcccggcagcagctgctggaccgggagctgaagaagaagcccccaccccggcccacagcccccaagcccctgctgccccggcgggaggagagcgaggccgtggaggccggggaccccccagaggagctgcggagcctgcccccagacatggtggccggcccccggctgcctgacaccttcctgggcagcgccacccccctgcacttcccccccagccccttccccagcagcacaggccctggcccccactacctgagcggccccctgcccccaggcacctacagcggccccacccagctgatccagccccgggcccctggcccccacgccatgcctgtggcccctggccctgccctgtacccagccccagcctacaccccagagctgggcctggtgcccaggagcagcccccagcacggcgtggtgagcagcccctacgtgggcgtgggccctgcccctcctgtggccggcctgcccagcgcccccccaccccagttcagcggccctgagctggccatggctgtgcggcctgccaccaccaccgtggacagcatccaggcccccatccccagccacacagccccccggcccaaccccaccccagcccctcctccaccctgcttccctgtgcccccaccccagcccctgcccaccccctacacctacccagctggggccaagcagcccatcccagcccagcaccacttcagcagcggcatcccagctggcttccctgcccccagaattggcccccagccccagccccacccccagccccaccccagccaggccttcggcccccagcccccccagcagcccctgcccctgcagcacccccacctgtttcctccccaggcccctggcctgctgcccccccagagcccctacccctatgccccccagcccggggtgctgggccagcccccaccacccctgcacacccagctgtacccaggccctgcccaggaccccctgcctgcccacagcggggccctgcccttccccagccctggccccccccagcccccccacccccccctggcctacggccctgcccccagcacccggcccatgggcccccaggccgcccccctgaccatccggggccccagcagcgctggccagagcacccccagcccccacctggtgcccagccctgcccccagccctggccctggccctgtgccccccaggcctcctgctgctgagcccccaccctgcctgcggagaggagctgctgctgctgacctgctgagcagcagccctgagagccagcacggcggcacccagagccctgggggcggccagcccctgctgcagcccaccaaggtggatgctgctgagggccggcggccccaggccctgcggctcatcgagcgggacccctatgagcaccctgagcggctgcggcagctgcagcaggagctggaggccttccggggccagctgggagatgtgggcgccctggacacagtgtggagggagctgcaggatgcccaggagcatgatgcccggggccgcagcatcgccatcgcccgctgctacagcctgaagaacagacaccaggatgtgatgccctatgacagcaacagagtggtgctgcggagcggcaaggatgactacatcaatgccagctgtgtggagggcctgagcccctactgcccccccctggtggccacccaggcccccctgcctggaacagctgctgacttctggctgatggtgcatgagcagaaggtgtctgtgattgtgatgctggtgtctgaggccgagatggagaagcagaaggtggcccgctacttccccacagagcggggccagcccatggtgcatggagccctgagcctggccctgagctctgtgcgcagcacagagacccacgtggagcgggtgctgagcctgcagttccgggaccagagcctgaagaggagcctggtgcacctgcacttccccacctggccagagctgggcctgcctgacagccccagcaacctgctgcgcttcatccaggaggtgcacgcccactacctgcaccagaggcccctgcacacccccatcatcgtgcactgcagcagcggcgtgggccgcactggagcctttgccctgctgtatgctgctgtgcaggaggtggaggccggaaatggcatccctgagctgccccagctggtgcggaggatgaggcagcagaggaagcacatgctgcaggagaagctgcacctgcgcttctgctatgaggccgtggtgcgccacgtggagcaggtgctgcagagacatggagtgcccccaccctgcaagcccctggccagcgccagcatcagccagaagaaccacctgccccaggacagccaggacctggtgctgggcggagatgtgcccatcagcagcatccaggccaccatcgccaagctgagcatccggcccccaggcggcctggagagccctgtggccagcctgcccggccctgctgagcccccaggcctgcccccagccagcctgcctgagagcacccccatccccagcagcagccccccacccctgagcagccccctgcctgaggccccccagcccaaggaggagccccctgtgcctgaggcccccagcagcggcccccccagcagcagcctggagctgctggccagcctgaccccagaggccttcagcctggacagcagcctgcggggcaagcagaggatgagcaagcacaacttcctgcaggcccacaacggccagggcctgcgggccacccggcccagtgatgaccccctgagcctgctggaccccctgtggaccctgaacaagacctag

SEQ ID NO: 186932 - DNA, 4911 bp, Artificial Sequence
  derived and/or modified sequence
atggaggccgtgccccggatgcccatgatctggctggacctgaaggaggcgggcgacttccactttcagccagccgtcaagaaatttgtgttaaagaactacggcgagaatcccgaggcctacaatgaggagctcaaaaagttggagttgctgcgccagaatgctgtcagagtaccgagggatttcgagggttgtagtgttctcaggaaatacctcggacaactccattacctgcaatcccgggtccctatgggctccggacaggaagcagccgtgcctgtcacgtggacagagattttctctgggaagagcgtagctcacgaagacatcaagtacgaacaggcatgtatcctgtacaacctaggtgcgctccacagcatgctgggcgccatggataagcgcgttagtgaggaaggcatgaaggtcagttgcacgcatttccagtgtgccgccggcgccttcgcttatctgcgagagcactttcctcaggcgtattccgtggatatgagcagacaaatactaacgctcaacgtaaatttgatgctgggacaggcccaggagtgcctgcttgaaaagtcaatgctagacaataggaagagtttcctcgtggctcggatttcagcccaggtggttgactactacaaggaggcctgtcgggcgctcgaaaaccccgacaccgcttctctcctggggaggatccagaaggattggaagaaactggttcagatgaagatatattacttcgccgctgtcgcgcatctccacatgggaaaacaagccgaggagcagcaaaagttcggtgagagagttgcctattttcaaagtgccctggacaagctgaacgaggccatcaagctcgccaagggacagcctgacaccgtgcaggatgcccttcgatttacgatggacgtcattggcggaaagtataatagtgctaagaaggacaatgactttatctaccatgaggctgtacccgcattggacacattgcagcctgtaaaaggcgccccactggtgaagccattgccagtcaatccaactgatccggccgtcaccgggcccgacattttcgctaaactggtgcccatggctgcccacgaagcttcaagcctgtactcggaggagaaagccaaattgctgcgcgaaatgatggccaagatagaggataagaatgaggtgctggatcagtttatggattccatgcagcttgacccagagacagtggataatcttgatgcttactcacatatccccccacaactgatggagaagtgtgcagcacttagtgtgcgtccagacaccgttcgcaatctggtgcagtcaatgcaggtacttagtggcgtgttcaccgacgttgaggcaagtctgaaggatataagagatctgttggaagaagacgagctgttagagcagaagtttcaggaggcagtgggccaggctggggcaatctctatcacttctaaagctgaattagcagaagtccgtagggagtgggcaaagtacatggaagtgcacgagaaagcatcatttacgaattcagaactgcaccgcgcgatgaatcttcatgtaggtaatctgaggctgctgtccggacccttagatcaagtgcgcgctgccctgcctactccggcgctgtctcccgaagacaaggccgtcctgcagaatctaaaaagaatccttgccaaggtgcaagagatgagagaccaacgcgtttccctggagcagcagttgagagagctgattcagaaggacgatatcactgccagtttggtgactaccgaccacagcgaaatgaaaaagttgtttgaggaacagctcaaaaaatatgatcaacttaaggtctaccttgaacagaacctggcggctcaggacagggtcctatgtgctcttaccgaagcgaacgttcagtatgccgcagtgaggagggtcctttcggatctggatcagaaatggaactctactctgcagaccttggtggctagctacgaggcttatgaggatctgatgaagaagagccaggagggtcgagacttttacgctgatctcgaatcaaaagtggccgccctgttagaaagaacccagtcaacctgccaagcaagagaggctgctcgacagcagctgttagacagagaacttaagaaaaaaccaccgcccaggccaacagcacccaagccacttcttccacgccgcgaggaaagtgaagccgtggaggccggggacccacctgaggagctgcgcagcttgcccccagacatggtcgccgggcctcgccttccagatacatttctgggcagcgccactccccttcacttccccccctcacccttccctagttccacggggccgggcccacattatctttcaggacccctgccacccggaacttactcagggcctacccaactgatccagccgagggcccccggtccacacgcaatgcccgtcgcccctggtcccgcactgtatccggctcctgcctacaccccagaattgggacttgtgcctagatcttcgccccagcacggcgtggtgtcaagtccatatgtgggtgtaggacccgccccccctgtggccggtctgcccagcgctcctcctcctcagttttctggcccagaactcgctatggcagtaaggcctgccaccacgacagtggattccatccaggccccaataccctctcacacagcgccacgaccaaacccgaccccagcccccccccccccctgcttcccagtgcctcccccccaaccacttcccactccgtacacctatcccgcgggagccaaacaacccatccccgctcaacatcacttctctagtggcatcccagctggtttcccggcgccccgaattggaccacagccacagcctcatccccaacctcatccttcccaggccttcggacctcagcctccccagcagccactgcctctacagcacccacacctgttccctccccaggctcctgggctgctgcccccccagtcaccttatccctacgccccccagcccggagtgctgggccagcctccccccccgctgcacacccagttatacccaggccctgctcaggaccccttgcccgctcactcgggtgcattgccctttccttcaccaggtcccccccagcctccccatccaccactggcatatggcccagcaccaagcacccgcccgatgggacctcaagccgctccacttacgatcaggggaccgagctctgccggccagtccaccccttccccacatctagtaccttcccccgccccatcaccgggccccggccccgttccgccgagaccgcctgcagccgaacctccaccctgtcttcgccggggcgccgctgccgccgacttgctgtcttcaagccctgaatcacagcacgggggtacccagagcccaggcggcggacagccactcctgcagccaactaaagtcgatgctgctgaaggcagaaggccccaggcgctccgcctcatcgaacgcgacccatatgagcacccagaacgcctcagacaacttcagcaggagttagaggcctttagggggcaacttggggacgtgggggcattggacacggtgtggcgagaattacaggacgctcaggaacatgatgcccgcggacgaagtatcgccattgcacgctgttattcgttgaaaaataggcatcaggacgtgatgccctacgactccaaccgtgttgtgctgaggagcggcaaggatgattatatcaacgcctcgtgcgtggaggggctttcaccctactgcccgcctctcgtggctacacaggcacccctgcctggaaccgccgccgacttctggctgatggttcatgaacaaaaggtttcagtgattgtgatgctagtctcggaggccgagatggaaaaacaaaaggtcgccaggtatttcccaaccgagagaggccagccaatggttcatggggccctgagcctggccctgagtagcgtgcggagtacagaaacccacgtggagcgagtcctgagtctacagtttagggatcagtctctgaagcggtctctggtccatttacacttccccacctggcccgaactcgggctgcccgacagtccttccaatttactcaggtttatccaggaggtccacgcccattaccttcaccagcgccctttacacacccccattattgtccactgcagtagcggtgtgggcagaactggagcttttgcactgctttacgccgctgtgcaggaggtggaagctggaaacggcatacctgaactgccacagctggtcagaaggatgcgacagcaacggaagcacatgctacaggaaaaacttcaccttcggttctgctacgaagccgttgttagacacgtggaacaagtgctccaacgacacggcgtccctcccccatgtaagcctctcgcctcagcctccatttctcagaaaaatcatcttccccaggatagccaagacttagtccttggtggagatgtcccaatctcaagtatccaagccacaattgccaagctgtctattagaccaccagggggcctcgagtctcccgtggcgagcctcccaggaccagctgaacccccaggccttccacccgcttctctcccagagtccactccgatcccatccagttcacccccgcccctgagctctcctttacctgaagcaccacagccgaaggaagagccccccgtgcccgaagctccttcaagtggtcctccctcttcttcactggagcttctggccagtcttacccctgaagccttctcgcttgactcttcccttaggggcaagcaaaggatgagcaagcataattttctgcaagctcacaatggccaggggcttcgcgccacccggcccagtgatgaccccctttctttgctcgacccgttgtggacattgaataagacatag

SEQ ID NO: 186933 - DNA, 4911 bp, Artificial Sequence
  derived and/or modified sequence
atggaggcagtgcctagaatgcctatgatttggctcgacctaaaggaagcaggagattttcactttcagccggcagtcaagaagttcgtcctcaaaaactacggtgagaaccccgaggcttacaatgaagaactgaaaaagttggagctcttacgtcagaatgccgtcagggtccccagggacttcgaaggatgtagtgtgttgagaaagtatctgggacagctgcactacctccagtctcgggtgcctatggggtcgggccaagaagcggcagtgccggtaacatggactgagatcttttctggtaaatcagtggctcacgaggacatcaaatatgagcaagcttgtatcctgtacaacctgggtgcgttgcactccatgctcggtgccatggacaaacgagtgtctgaagagggcatgaaggttagttgtacccacttccagtgtgctgccggagcattcgcataccttcgtgaacattttcctcaggcctactcagtggatatgagtaggcagatccttactctgaacgtgaatctgatgttgggacaggcacaggagtgcctgctggagaaatccatgctagataaccgaaagtcctttctcgtcgccagaatatcagctcaggtggtcgattattataaagaggcttgccgggcactcgagaatcccgacactgctagccttctgggacggatccaaaaagattggaaaaagttggtgcagatgaagatatattacttcgccgctgtcgcccatctacatatggggaaacaggccgaggaacagcagaaattcggtgagagggtggcttactttcaaagcgctctggataagctcaacgaggccatcaaattagcaaaggggcagcccgataccgtgcaggacgcactgagatttaccatggacgttatcggagggaagtataactctgcaaagaaagataacgactttatttatcatgaggctgttcctgcattggatacactgcagcctgtgaagggcgctcccctcgtcaagcccttgccagttaatcctactgatcccgctgtgactggacctgacatcttcgcgaagttagtgcccatggcagcccacgaagcttcgagcctgtattcagaagaaaaagccaagttgctgagggaaatgatggcaaagatcgaggacaaaaacgaagtcctggatcagttcatggactcaatgcaattagatcctgaaaccgttgacaatctggacgcttactcacacataccaccgcaattgatggaaaagtgcgcagcactatccgtgaggcctgacacagtcagaaatttggtgcagagcatgcaagtgctgagtggggttttcacagacgtcgaagccagtttaaaggatattagggacttgctggaggaggacgaactcctggaacagaagtttcaggaggccgtgggtcaagcaggggcaatatctattacatcaaaggcagaacttgctgaggtcaggcgtgaatgggccaagtacatggaggtccatgaaaaggcctctttcacaaactcagaacttcaccgggcaatgaacctgcacgtgggtaatcttaggctgctttctggaccactggaccaggtgagagctgctctcccaaccccagccctctccccggaggacaaggctgttctgcagaatctcaaacgaatcttagctaaagtgcaagaaatgagagaccagcgtgtcagtctagagcagcaactgcgggagctgatacaaaaggatgatattacagcatccctcgtgactaccgatcactcagagatgaagaagctgttcgaggagcagctcaagaagtacgaccagctaaaggtgtaccttgagcagaatcttgcagcccaagatcgcgttctctgcgctttgacagaagccaacgtgcagtatgccgctgtgcggcgtgtgttatctgaccttgaccagaagtggaactcaacactgcagactctagtggcaagctatgaggcctacgaggacctgatgaagaagagccaagagggccgagacttttacgccgatctggagtctaaggttgccgctctcctggaaaggacacagtccacatgtcaggcgagagaagcagccagacagcagcttctggacagggaactgaagaaaaagccccctccaagaccaactgccccaaaaccactgctccctaggcgggaggaatccgaagctgtggaagctggggaccctccagaggaactgcgttcccttccacctgacatggtcgcaggccctcgccttcccgacacatttctgggcagtgctacccccctgcactttccgcctagcccctttccgtcctcgaccgggccaggaccccattaccttagtgggcctctgcctcctggcacctacagtggccctactcagcttatccagcccagggccccaggaccacacgccatgcccgtcgccccaggtccagccctataccccgcaccagcgtatacacccgagcttggcctggtacctcggtccagccctcagcatggggtggtgagctctccttacgtgggggtgggacctgccccaccagtcgctgggctcccctctgcccctccgccacagttttctggacccgagctggctatggccgtcagacccgcaacaacgaccgtagactccattcaagccccaatcccaagtcatacagcacctagaccaaatcctacaccagctcctcctcccccatgctttccagtgccgcctccacagcctctacctacgccttacacgtacccagccggtgcaaagcagcctataccagcacagcatcacttcagttctggaattcccgctggatttcctgcccctagaattggacctcagccccagcctcacccgcagccccacccaagccaggcctttggcccacagcctccccagcagccgcttccactccagcaccctcatctgttcccccctcaggcgccaggactgttgccgccacagtctccttacccgtacgctccgcagccaggggtcctcgggcagccacctccaccactccatactcaactttaccccggtccggctcaggacccgctgcctgcccattccggagccctgcctttccccagccctgggccaccacagcccccacacccaccactggcctatggtccagcgccatccactcggccaatgggaccacaagccgctccactgacgattcgcggaccgtctagcgctggtcagagcacacctagcccccatttagtgccatctccggcaccgagcccgggtccgggtccagtaccaccacgaccccctgcggcagagccgccaccatgcctgagacgtggcgctgccgcagccgatctgctgagtagttctcccgaatcccagcacggagggacccagtctcccggtgggggacagcctctgctacagccaacaaaggtggacgcagctgaggggagaagacctcaggctttacgtctaattgagcgagacccttatgagcatcccgaaagactacgtcagctccagcaggagctagaggcttttcggggtcagctgggtgacgtaggtgccctcgacaccgtttggagagagctacaggacgcgcaggaacacgacgcaagaggcagaagcatagccatcgctcgatgttattcccttaagaataggcatcaggatgtcatgccctacgattccaatcgggtagtactaaggtccggcaaagatgattacataaacgccagttgcgtcgaagggctgagcccatactgtcctccactcgtggccacacaggccccactgccgggaacagcagctgatttctggctgatggtccacgagcagaaagtgagtgtcatcgtgatgttagtgagcgaagccgaaatggagaagcaaaaggtcgcacgttactttcctaccgagagaggccagcccatggtgcacggggctctttctttggctctgtcctctgtacggtccactgaaactcacgtcgagcgggtcctaagcttgcagttcagggatcagtccctcaagaggagtttggtccatctgcacttccccacctggcccgagttaggactgccagacagtccttctaacctgctgagatttatccaggaggtgcacgcacattacctgcatcaaaggcctcttcacacaccgataatagtccactgctcatcgggtgttggtcggactggagcatttgctctgctgtacgccgctgtccaagaggtcgaggccggtaatggaatcccagagctaccgcagcttgtgaggcggatgagacagcagcggaaacatatgctccaggagaagcttcacctgcgattctgctatgaagctgtggtgagacatgtagaacaggttctgcagcggcatggtgtccctcccccatgtaaacctctggcatcagcttcgataagtcagaagaatcatttgccccaggacagccaggacctcgtgctcggcggtgatgtgccaatcagctcgatccaggctactatagcaaagctgtccatccggcctccaggcggactggaaagccctgttgctagccttcctggacccgctgagccgcctggcctcccacccgcttccctgccagagagcactccgataccctccagctcgccacctcctttgagtagccccctccccgaggctccacagcccaaagaagaacccccagttcctgaagccccaagcagcgggcctccttctagctctctcgagctactggcttctctgacgcctgaagccttctcccttgattcgagccttaggggtaaacagcggatgagtaagcacaattttcttcaggctcacaacgggcagggacttagggctactcgccctagtgacgacccccttagtctgctcgatcctctctggacactgaataagacttag

SEQ ID NO: 186934 - DNA, 5244 bp, Artificial Sequence
  derived and/or modified sequence
cggggctgggctcgtggctgagccagcagctgcagcagctacgggagtggccgggtggccggcgggtgccagccgccatggaggccgtgccccgcatgcccatgatctggctggacctgaaggaggccggtgactttcacttccagccagctgtgaagaagtttgtcctgaagaattatggagagaacccagaagcctacaatgaagaactgaagaagctggagttgctcagacagaatgctgtccgtgtcccacgagactttgagggctgtagtgtcctccgcaagtacctcggccagcttcattacctgcagagtcgggtccccatgggctcgggccaggaggccgctgtccctgtcacctggacagagatcttctcaggcaagtctgtggcccatgaggacatcaagtacgagcaggcctgtattctctacaaccttggagcgctgcactccatgctgggggccatggacaagcgggtgtctgaggagggcatgaaggtctcctgtacccatttccagtgcgcagccggcgccttcgcctacctacgggagcacttccctcaagcctacagcgtcgacatgagccgccagatccttacgctcaacgtcaacctcatgctgggccaggctcaggagtgcctcctggagaagtcgatgttggacaacaggaagagctttctggtggcccgcatcagtgcacaggtggtagattactacaaggaggcatgccgggccttggagaaccccgacactgcctcactgctgggccggatccagaaggactggaagaaacttgtgcagatgaagatctactacttcgcagccgtggctcatctgcacatgggaaagcaggccgaggagcagcagaagttcggggagcgggttgcatacttccagagcgccctggacaagctcaatgaagccatcaagttggccaagggccagcctgacactgtgcaagacgcgcttcgcttcactatggatgtcattgggggaaagtacaattctgccaagaaggacaacgacttcatttaccatgaggctgtcccagcattggacactcttcagcctgtaaaaggagcccccttggtgaagcccttgccagtgaaccccacagacccagctgttacaggccctgacatctttgccaaactggtacccatggctgcccacgaggcctcgtcactgtacagtgaggagaaggccaagctgctccgggagatgatggccaagattgaggacaagaatgaggtcctggaccagttcatggattcaatgcagttggatcccgagacggtggacaaccttgatgcctacagccacatcccaccccagctcatggagaagtgcgcggctctcagcgtccggcccgacactgtcaggaaccttgtacagtccatgcaagtgctgtcaggtgtgttcacggatgtggaggcttccctgaaggacatcagagatctgttggaggaggatgagctgctagagcagaagtttcaggaggcggtgggccaggcaggggccatctccatcacctccaaggctgagctggcagaggtgaggcgagaatgggccaagtacatggaagtccatgagaaggcctccttcaccaacagtgagctgcaccgtgccatgaacctgcacgtcggcaacctgcgcctgctcagcgggccgcttgaccaggtccgggctgccctgcccacaccggccctctccccagaggacaaggccgtgctgcaaaacctaaagcgcatcctggctaaggtgcaggagatgcgggaccagcgcgtgtccctggagcagcagctgcgtgagcttatccagaaagatgacatcactgcctcgctggtcaccacagaccactcagagatgaagaagttgttcgaggagcagctgaaaaagtatgaccagctgaaggtgtacctggagcagaacctggccgcccaggaccgtgtcctctgtgcactgacagaggccaacgtgcagtacgcagccgtgcggcgggtactcagcgacttggaccaaaagtggaactccacgctgcagaccctggtggcctcgtatgaagcctatgaggacctgatgaagaagtcgcaggagggcagggacttctacgcagatctggagagcaaggtggctgctctgctggagcgcacgcagtccacctgccaggcccgcgaggctgcccgccagcagctcctggacagggagctgaagaagaagccgccgccacggcccacagccccaaagccgctgctgccccgcagggaggagagtgaggcagtggaagcaggagacccccctgaggagctgcgcagcctcccccctgacatggtggctggcccacgactgcctgacaccttcctgggaagtgccaccccgctccactttcctcccagccccttccccagctccacaggcccaggaccccactatctctcaggccccttgccccctggtacctactcgggccccacccagctgatacagcccagggccccagggccccatgcaatgcccgtagcacctgggcctgccctctacccagcccctgcctacacaccggagctgggccttgtgccccgatcctccccacagcatggcgtggtgagcagtccctatgtgggggtagggccggccccaccagttgcaggtctcccctcggccccacctcctcaattctcaggccccgagttggccatggcggttcggccagccaccaccacagtagatagcatccaggcgcccatccccagccacacagccccacggccaaaccccacccctgctcctcccccgccctgcttccctgtgcccccaccgcagccactgcccacgccttacacctaccctgcaggggctaagcaacccatcccggcacagcaccacttctcttctgggatccccgcaggttttccagccccaaggattgggccccagccccagccccatcctcagccccatccttcacaagcgtttgggcctcagcccccacagcagccccttccactccagcatccacatctcttcccaccccaggccccaggactcctacccccacaatccccctacccctatgcccctcagcctggggtcctggggcagccgccaccccccctacacacccagctctacccaggtcccgctcaagaccctctgccagcccactcaggggctctgcctttccccagccctgggccccctcagcctccccatcccccactggcatatggtcctgccccttctaccagacccatgggcccccaggcagcccctcttaccattcgagggccctcgtctgctggccagtccacccctagtccccacctggtgccttcacctgccccatctccagggcctggtccggtaccccctcgccccccagcagcagaaccacccccttgcctgcgccgaggcgccgcagctgcagacctgctctcctccagcccggagagccagcatggcggcactcagtctcctgggggtgggcagcccctgctgcagcccaccaaggtggatgcagctgagggtcgtcggccgcaggccctgcggctgattgagcgggacccctatgagcatcctgagaggctgcggcagttgcagcaggagctggaggcctttcggggtcagctgggggatgtgggagctctggacactgtctggcgagagctgcaagatgcgcaggaacatgatgcccgaggccgttccatcgccattgcccgctgctactcactgaagaaccggcaccaggatgtcatgccctatgacagtaaccgtgtggtgctgcgctcaggcaaggatgactacatcaatgccagctgcgtggaggggctctccccatactgccccccgctagtggcaacccaggccccactgcctggcacagctgctgacttctggctcatggtccatgagcagaaagtgtcagtcattgtcatgctggtttctgaggctgagatggagaagcaaaaagtggcacgctacttccccaccgagaggggccagcccatggtgcacggtgccctgagcctggcattgagcagcgtccgcagcaccgaaacccatgtggagcgcgtgctgagcctgcagttccgagaccagagcctcaagcgctctcttgtgcacctgcacttccccacttggcctgagttaggcctgcccgacagccccagcaacttgctgcgcttcatccaggaggtgcacgcacattacctgcatcagcggccgctgcacacgcccatcattgtgcactgcagctctggtgtgggccgcacgggagcctttgcactgctctatgcagctgtgcaggaggtggaggctgggaacggaatccctgagctgcctcagctggtgcggcgcatgcggcagcagagaaagcacatgctgcaggagaagctgcacctcaggttctgctatgaggcagtggtgagacacgtggagcaggtcctgcagcgccatggtgtgcctcctccatgcaaacccttggccagtgcaagcatcagccagaagaaccaccttcctcaggactcccaggacctggtcctcggtggggatgtgcccatcagctccatccaggccaccattgccaagctcagcattcggcctcctggggggttggagtccccggttgccagcttgccaggccctgcagagcccccaggcctcccgccagccagcctcccagagtctaccccaatcccatcttcctccccgccccccctttcctccccactacctgaggctccccagcctaaggaggagccgccagtgcctgaagcccccagctcggggcccccctcctcctccctggaattgctggcctccttgaccccagaggccttctccctggacagctccctgcggggcaaacagcggatgagcaagcataactttctgcaggcccataacgggcaagggctgcgggccacccggccctctgacgaccccctcagccttctggatccactctggacactcaacaagacctgaacaggttttgcctacctggtccttacactacatcatcatcatctcatgcccacctgcccacacccagcagagcttctcagtgggcacagtctcttactcccatttctgctgcctttggccctgcctggcccagcctgcacccctgtggggtggaaatgtactgcaggctctgggtcaggttctgctcctttatgggacccgacatttttcagctctttgctattgaaataataaaccaccctgttctgtggcccgt

SEQ ID NO: 186935 - DNA, 4911 bp, Artificial Sequence
  derived and/or modified sequence
atggaggccgtgcccagaatgcccatgatctggctggacctgaaggaggccggcgacttccacttccagcccgccgtgaagaagttcgtgctgaagaactacggcgagaaccccgaggcctacaacgaggagctgaagaagctggagctgctgagacagaacgccgtgagagtgcccagagacttcgagggctgcagcgtgctgagaaagtacctgggccagctgcactacctgcagagcagagtgcccatgggcagcggccaggaggccgccgtgcccgtgacctggaccgagatcttcagcggcaagagcgtggcccacgaggacatcaagtacgagcaggcctgcatcctgtacaacctgggcgccctgcacagcatgctgggcgccatggacaagagagtgagcgaggagggcatgaaggtgagctgcacccacttccagtgcgccgccggcgccttcgcctacctgagagagcacttcccccaggcctacagcgtggacatgagcagacagatcctgaccctgaacgtgaacctgatgctgggccaggcccaggagtgcctgctggagaagagcatgctggacaacagaaagagcttcctggtggccagaatcagcgcccaggtggtggactactacaaggaggcctgcagagccctggagaaccccgacaccgccagcctgctgggcagaatccagaaggactggaagaagctggtgcagatgaagatctactacttcgccgccgtggcccacctgcacatgggcaagcaggccgaggagcagcagaagttcggcgagagagtggcctacttccagagcgccctggacaagctgaacgaggccatcaagctggccaagggccagcccgacaccgtgcaggacgccctgagattcaccatggacgtgatcggcggcaagtacaacagcgccaagaaggacaacgacttcatctaccacgaggccgtgcccgccctggacaccctgcagcccgtgaagggcgcccccctggtgaagcccctgcccgtgaaccccaccgaccccgccgtgaccggccccgacatcttcgccaagctggtgcccatggccgcccacgaggccagcagcctgtacagcgaggagaaggccaagctgctgagagagatgatggccaagatcgaggacaagaacgaggtgctggaccagttcatggacagcatgcagctggaccccgagaccgtggacaacctggacgcctacagccacatccccccccagctgatggagaagtgcgccgccctgagcgtgagacccgacaccgtgagaaacctggtgcagagcatgcaggtgctgagcggcgtgttcaccgacgtggaggccagcctgaaggacatcagagacctgctggaggaggacgagctgctggagcagaagttccaggaggccgtgggccaggccggcgccatcagcatcaccagcaaggccgagctggccgaggtgagaagagagtgggccaagtacatggaggtgcacgagaaggccagcttcaccaacagcgagctgcacagagccatgaacctgcacgtgggcaacctgagactgctgagcggccccctggaccaggtgagagccgccctgcccacccccgccctgagccccgaggacaaggccgtgctgcagaacctgaagagaatcctggccaaggtgcaggagatgagagaccagagagtgagcctggagcagcagctgagagagctgatccagaaggacgacatcaccgccagcctggtgaccaccgaccacagcgagatgaagaagctgttcgaggagcagctgaagaagtacgaccagctgaaggtgtacctggagcagaacctggccgcccaggacagagtgctgtgcgccctgaccgaggccaacgtgcagtacgccgccgtgagaagagtgctgagcgacctggaccagaagtggaacagcaccctgcagaccctggtggccagctacgaggcctacgaggacctgatgaagaagagccaggagggcagagacttctacgccgacctggagagcaaggtggccgccctgctggagagaacccagagcacctgccaggccagagaggccgccagacagcagctgctggacagagagctgaagaagaagcccccccccagacccaccgcccccaagcccctgctgcccagaagagaggagagcgaggccgtggaggccggcgacccccccgaggagctgagaagcctgccccccgacatggtggccggccccagactgcccgacaccttcctgggcagcgccacccccctgcacttcccccccagccccttccccagcagcaccggccccggcccccactacctgagcggccccctgccccccggcacctacagcggccccacccagctgatccagcccagagcccccggcccccacgccatgcccgtggcccccggccccgccctgtaccccgcccccgcctacacccccgagctgggcctggtgcccagaagcagcccccagcacggcgtggtgagcagcccctacgtgggcgtgggccccgccccccccgtggccggcctgcccagcgccccccccccccagttcagcggccccgagctggccatggccgtgagacccgccaccaccaccgtggacagcatccaggcccccatccccagccacaccgcccccagacccaaccccacccccgcccccccccccccctgcttccccgtgccccccccccagcccctgcccaccccctacacctaccccgccggcgccaagcagcccatccccgcccagcaccacttcagcagcggcatccccgccggcttccccgcccccagaatcggcccccagccccagccccacccccagccccaccccagccaggccttcggcccccagcccccccagcagcccctgcccctgcagcacccccacctgttccccccccaggcccccggcctgctgcccccccagagcccctacccctacgccccccagcccggcgtgctgggccagccccccccccccctgcacacccagctgtaccccggccccgcccaggaccccctgcccgcccacagcggcgccctgcccttccccagccccggccccccccagcccccccacccccccctggcctacggccccgcccccagcaccagacccatgggcccccaggccgcccccctgaccatcagaggccccagcagcgccggccagagcacccccagcccccacctggtgcccagccccgcccccagccccggccccggccccgtgccccccagaccccccgccgccgagccccccccctgcctgagaagaggcgccgccgccgccgacctgctgagcagcagccccgagagccagcacggcggcacccagagccccggcggcggccagcccctgctgcagcccaccaaggtggacgccgccgagggcagaagaccccaggccctgagactgatcgagagagacccctacgagcaccccgagagactgagacagctgcagcaggagctggaggccttcagaggccagctgggcgacgtgggcgccctggacaccgtgtggagagagctgcaggacgcccaggagcacgacgccagaggcagaagcatcgccatcgccagatgctacagcctgaagaacagacaccaggacgtgatgccctacgacagcaacagagtggtgctgagaagcggcaaggacgactacatcaacgccagctgcgtggagggcctgagcccctactgcccccccctggtggccacccaggcccccctgcccggcaccgccgccgacttctggctgatggtgcacgagcagaaggtgagcgtgatcgtgatgctggtgagcgaggccgagatggagaagcagaaggtggccagatacttccccaccgagagaggccagcccatggtgcacggcgccctgagcctggccctgagcagcgtgagaagcaccgagacccacgtggagagagtgctgagcctgcagttcagagaccagagcctgaagagaagcctggtgcacctgcacttccccacctggcccgagctgggcctgcccgacagccccagcaacctgctgagattcatccaggaggtgcacgcccactacctgcaccagagacccctgcacacccccatcatcgtgcactgcagcagcggcgtgggcagaaccggcgccttcgccctgctgtacgccgccgtgcaggaggtggaggccggcaacggcatccccgagctgccccagctggtgagaagaatgagacagcagagaaagcacatgctgcaggagaagctgcacctgagattctgctacgaggccgtggtgagacacgtggagcaggtgctgcagagacacggcgtgccccccccctgcaagcccctggccagcgccagcatcagccagaagaaccacctgccccaggacagccaggacctggtgctgggcggcgacgtgcccatcagcagcatccaggccaccatcgccaagctgagcatcagaccccccggcggcctggagagccccgtggccagcctgcccggccccgccgagccccccggcctgccccccgccagcctgcccgagagcacccccatccccagcagcagccccccccccctgagcagccccctgcccgaggccccccagcccaaggaggagccccccgtgcccgaggcccccagcagcggcccccccagcagcagcctggagctgctggccagcctgacccccgaggccttcagcctggacagcagcctgagaggcaagcagagaatgagcaagcacaacttcctgcaggcccacaacggccagggcctgagagccaccagacccagcgacgaccccctgagcctgctggaccccctgtggaccctgaacaagacctag

SEQ ID NO: 186936 - protein, 653 aa, Artificial Sequence
  derived and/or modified sequence
MALVRGAEPAAGPSRWLPTHVQVTVLRARGLRGKSSGAGSTSDAYTVIQVGREKYSTSVVEKTHGCPEWREECSFELPPGALDGLLRAQEADAGPAPWAASSAAACELVLTTMHRSLIGVDKFLGQATVALDEVFGAGRAQHTQWYKLHSKPGKKEKERGEIEVTIQFTRNNLSASMFDLSMKDKPRSPFSKIRDKMKGKKKYDLESASAILPSSAIEDPDLGSLGKMGKAKGFFLRNKLRKSSLTQSNTSLGSDSTLSSASGSLAYQGPGAELLTRSPSRSSWLSTEGGRDSAQSPKLFTHKRTYSDEANQMRVAPPRALLDLQGHLDAASRSSLCVNGSHIYNEEPQGPVRHRSSISGSLPSSGSLQAVSSRFSEEGPRSTDDTWPRGSRSNSSSEAVLGQEELSAQAKVLAPGASHPGEEEGARLPEGKPVQVATPIVASSEAVAEKEGARKEERKPRMGLFHHHHQGLSRSELGRRSSLGEKGGPILGASPHHSSSGEEKAKSSWFGLREAKDPTQKPSPHPVKPLSAAPVEGSPDRKQSRSSLSIALSSGLEKLKTVTSGSIQPVTQAPQAGQMVDTKRLKDSAVLDQSAKYYHLTHDELISLLLQRERELSQRDEHVQELESYIDRLLVRIMETSPTLLQIPPGPPK

SEQ ID NO: 186937 - DNA, 1962 bp, Artificial Sequence
  derived and/or modified sequence
atggccctggtgagaggcgccgagcccgccgccggccccagcagatggctgcccacccacgtgcaggtgaccgtgctgagagccagaggcctgagaggcaagagcagcggcgccggcagcaccagcgacgcctacaccgtgatccaggtgggcagagagaagtacagcaccagcgtggtggagaagacccacggctgccccgagtggagagaggagtgcagcttcgagctgccccccggcgccctggacggcctgctgagagcccaggaggccgacgccggccccgccccctgggccgccagcagcgccgccgcctgcgagctggtgctgaccaccatgcacagaagcctgatcggcgtggacaagttcctgggccaggccaccgtggccctggacgaggtgttcggcgccggcagagcccagcacacccagtggtacaagctgcacagcaagcccggcaagaaggagaaggagagaggcgagatcgaggtgaccatccagttcaccagaaacaacctgagcgccagcatgttcgacctgagcatgaaggacaagcccagaagccccttcagcaagatcagagacaagatgaagggcaagaagaagtacgacctggagagcgccagcgccatcctgcccagcagcgccatcgaggaccccgacctgggcagcctgggcaagatgggcaaggccaagggcttcttcctgagaaacaagctgagaaagagcagcctgacccagagcaacaccagcctgggcagcgacagcaccctgagcagcgccagcggcagcctggcctaccagggccccggcgccgagctgctgaccagaagccccagcagaagcagctggctgagcaccgagggcggcagagacagcgcccagagccccaagctgttcacccacaagagaacctacagcgacgaggccaaccagatgagagtggccccccccagagccctgctggacctgcagggccacctggacgccgccagcagaagcagcctgtgcgtgaacggcagccacatctacaacgaggagccccagggccccgtgagacacagaagcagcatcagcggcagcctgcccagcagcggcagcctgcaggccgtgagcagcagattcagcgaggagggccccagaagcaccgacgacacctggcccagaggcagcagaagcaacagcagcagcgaggccgtgctgggccaggaggagctgagcgcccaggccaaggtgctggcccccggcgccagccaccccggcgaggaggagggcgccagactgcccgagggcaagcccgtgcaggtggccacccccatcgtggccagcagcgaggccgtggccgagaaggagggcgccagaaaggaggagagaaagcccagaatgggcctgttccaccaccaccaccagggcctgagcagaagcgagctgggcagaagaagcagcctgggcgagaagggcggccccatcctgggcgccagcccccaccacagcagcagcggcgaggagaaggccaagagcagctggttcggcctgagagaggccaaggaccccacccagaagcccagcccccaccccgtgaagcccctgagcgccgcccccgtggagggcagccccgacagaaagcagagcagaagcagcctgagcatcgccctgagcagcggcctggagaagctgaagaccgtgaccagcggcagcatccagcccgtgacccaggccccccaggccggccagatggtggacaccaagagactgaaggacagcgccgtgctggaccagagcgccaagtactaccacctgacccacgacgagctgatcagcctgctgctgcagagagagagagagctgagccagagagacgagcacgtgcaggagctggagagctacatcgacagactgctggtgagaatcatggagaccagccccaccctgctgcagatcccccccggcccccccaagtag

SEQ ID NO: 186938 - DNA, 1962 bp, Artificial Sequence
  derived and/or modified sequence
atggccctcgtgaggggagccgagccagctgccggacccagccggtggctgccaacgcacgtgcaagttacagtgctgcgtgctagggggctcaggggaaaaagttcaggagcaggttccacctctgacgcatatacggtgatccaggttgggcgggagaagtattccacaagtgttgtggagaagacacacggatgcccagaatggcgtgaggagtgctctttcgaactccctcctggcgctctggatgggctgctgagggcgcaggaggccgacgccggacctgccccttgggcggccagcagcgcagcggcgtgtgaactggtgcttacaaccatgcacaggtccctcattggggtcgacaagttcttgggtcaggctaccgttgctctggatgaggtgttcggagccggacgcgcgcagcatacccagtggtataaactgcactctaaaccaggcaagaaagaaaaagaacgtggagaaatcgaagtgactatacagttcacacggaacaacctttcagcctctatgtttgacctctccatgaaggacaagcccagatcacccttttctaagatccgggacaaaatgaaaggcaaaaagaaatatgacctggaatcagccagcgcaatccttccgtccagcgctattgaggacccagacctaggttctctcggcaaaatgggaaaggcaaagggtttttttttacggaacaaactgagaaagagctcattaacccagtccaacacaagcttgggatccgattctaccctttctagtgcgtccggaagtctggcctatcagggtcccggggcagagttattgacgcgatctccaagccgaagttcatggctgagcaccgaaggggggcgagatagcgcccaaagtcccaaactattcactcataagcgaacttactccgatgaggccaaccaaatgagggtggccccacctcgggcccttttggatctgcagggtcacctggacgccgccagtcgcagctccttatgcgtcaatggtagtcacatttacaacgaggagccgcagggcccggtcaggcatcgctcctcgatctcagggtccttgccttcttccggctcactacaagctgtgagcagtcgtttctcagaggaaggccctagatctactgatgacacttggcctaggggatctcggtccaactcctccagtgaagcggttctgggtcaggaagagttatcggcacaggcgaaggttctggctccgggcgcctcccatcccggtgaagaggaaggtgcccggctcccagagggcaagcccgttcaggttgccactccaatagtggcctcctctgaagcagtggcagaaaaggagggcgctcgcaaggaggagagaaaacctcgcatgggcctgtttcatcaccaccatcaagggctcagccgatcggaactaggtcggaggagcagtctgggagaaaaaggtggacccatcttgggggctagtccgcaccactcttccagtggcgaagaaaaggctaagtccagctggtttggtctgagagaagccaaagatcccacacagaagcccagcccacacccggtgaaacccttaagcgccgcgccagtcgagggaagtcccgacagaaagcagagccgatcatcactttctattgccctcagctcaggtctagaaaagttaaaaactgtgacctctggttcaattcagcctgtcactcaagcaccacaggccggtcagatggtcgatacaaaacggctgaaggattcagcagtgctggatcagtctgccaagtattaccatcttacgcacgacgagctgatctctctgttgctgcagagggagcgggagctgtcccaaagagatgaacatgtgcaggagttagagtcatatatcgatcggctgctggttcgcattatggaaacctccccaacactcttacagatcccccccggtcccccgaagtag

SEQ ID NO: 186939 - DNA, 1962 bp, Artificial Sequence
  derived and/or modified sequence
atggccctggtgagaggagctgagcctgctgctggccccagccgctggctgcccacccacgtgcaggtgacagtgctgcgggcccggggcctgcggggcaagagcagcggggccggcagcaccagtgatgcctacaccgtcatccaggtgggccgggagaagtacagcacctctgtggtggagaagacccacggctgcccagagtggagggaggagtgcagctttgagctgcccccaggggccctggatggcctgctgcgggcccaggaggctgatgctggccctgccccctgggccgccagcagcgctgctgcctgtgagctggtgctgaccaccatgcacaggagcctcatcggcgtggacaagttcctgggccaggccaccgtggccctggatgaggtgtttggagctggccgggcccagcacacccagtggtacaagctgcacagcaagccaggcaagaaggagaaggagcggggggagattgaggtgaccatccagttcaccaggaacaacctgagcgcctccatgtttgacctgtccatgaaggacaagcccaggagccccttcagcaagatccgggacaagatgaagggcaagaagaagtatgacctggagagcgccagcgccatcctgcccagcagcgccatcgaggaccctgacctgggcagcctgggcaagatgggcaaggccaagggcttcttcctgaggaacaagctgaggaagagcagcctgacccagagcaacaccagcctgggcagtgacagcaccctgagcagcgccagcggcagcctggcctaccagggccctggagctgagctgctgaccaggagccccagccgcagctcctggctgagcacagaaggaggccgggacagcgcccagagccccaagctgttcacccacaagaggacctacagtgatgaggccaaccagatgagggtggccccaccccgggccctgctggacctgcagggccacctggatgctgccagccgcagcagcctgtgtgtgaatggcagccacatctacaatgaggagccccagggccctgtgcgccacaggagcagcatcagcggcagcctgcccagcagcggcagcctgcaggccgtgagcagccgcttcagcgaggagggccccaggagcacagatgacacctggccccggggcagccgcagcaacagcagcagcgaggccgtgctgggccaggaggagctgagcgcccaggccaaggtgctggcccctggggccagccaccctggagaggaggagggcgcccggctgcctgagggcaagcctgtgcaggtggccacccccatcgtggccagcagcgaggccgtggccgagaaggagggcgccaggaaggaggagaggaagcccaggatgggcctcttccaccaccaccaccagggcctgagccgctctgagctgggcagaagaagcagcctgggggagaagggcggccccatcctgggcgccagcccccaccacagcagcagcggggaggagaaggccaagagctcctggtttggcctgcgggaggccaaggaccccacccagaagcccagcccccaccctgtgaagcccctgtctgctgcccctgtggagggcagcccagacaggaagcagagccgcagcagcctgagcatcgccctgagcagcggcctggagaagctgaagacagtgaccagcggcagcatccagcctgtgacccaggccccccaggccggccagatggtggacaccaagaggctgaaggacagcgctgtgctggaccagagcgccaagtactaccacctgacccatgatgagctgatcagcctgctgctgcagcgggagcgggagctgagccagagagatgagcacgtgcaggagctggagagctacatcgaccggctgctggtgcgcatcatggagaccagccccaccctgctgcagatccccccaggcccccccaagtag

SEQ ID NO: 186940 - DNA, 1962 bp, Artificial Sequence
  derived and/or modified sequence
atggccctggtgcggggcgccgagcccgccgccggccccagccggtggcttcccacacatgtgcaagtcaccgtcttgagggcccgagggctcagaggcaaatcatccggagccggatctaccagcgacgcttataccgtcatccaggtcggcagagagaaatattcgacaagcgtggttgagaagacacacgggtgccccgagtggagagaagaatgctccttcgaattgccacctggagcccttgacggtcttcttagagctcaagaagccgacgcagggccagccccttgggcagctagcagcgcagctgcgtgcgagctcgtcctgactacaatgcatcgttcactaatcggcgtagataaatttctgggccaagccaccgtggctctcgatgaggtttttggagctggaagggcacagcatacccaatggtataaactgcatagtaaacctggcaaaaaagagaaagaacgcggtgagatcgaagttacaatccagtttacacgcaacaatctctcagcttctatgttcgatttgagtatgaaggacaagcctaggtcacctttctctaagatccgtgataaaatgaaagggaagaagaagtatgatctcgagagtgccagcgctatattgccttccagcgcgatagaggatcccgaccttggtagcctagggaagatgggaaaggcaaaagggtttttcctaaggaataaattgcgaaagagtagcctgacccagtcaaacacgtctctaggttctgacagtactttgagctcggccagcggctccctcgcatatcagggcccaggggccgagctgttaactagaagccctagtcgatcaagctggctgtccactgaggggggccgggatagcgcccaatcgccaaaactcttcactcacaagcggacatacagcgacgaagcaaaccagatgagagttgccccgccgagagcactgcttgatctccaaggccatttagatgcggcctcaaggagcagcttgtgcgttaacgggtcacatatatacaacgaagagccacagggccctgtgcggcacagatcatctatttcgggctccctgccttcgtccgggtccttacaggcagtctcttccaggttttccgaagaaggtcctcgttccaccgacgatacgtggcccagggggtctcgaagtaacagctcctccgaggccgttttaggacaagaggaattatcggcgcaggccaaggtcctggcccctggcgccagtcaccctggcgaagaagaaggtgctaggctgccagagggaaagcccgttcaggtcgcgacacctatagtggcatcttccgaggcagtggcagagaaagagggggcgcgcaaagaggagcgcaagcctcggatgggtctattccaccatcaccaccaaggtctctctcgatccgagctaggtaggcgcagcagtcttggagagaagggtggtccaattttgggggcctcaccacaccattcaagcagcggggaagagaaagcaaaatcttcttggttcggcctgcgcgaggctaaagatcccactcagaaaccctccccccaccctgtgaagcctctgtccgcagcacccgtcgaaggatccccggacaggaaacagagcagaagttcactgtctatagccctgtctagtggacttgagaagctgaaaactgtgactagtggatccatacaaccggtgacccaggctcctcaagccgggcagatggtcgatacaaaacgtctgaaggattcagccgttctggaccagagcgctaaatattaccacctcacacatgacgagctgattagtctcctgcttcagcgagagagggagctttcacagcgggatgaacacgttcaagaactggagtcctatattgatcggttactggtgagaattatggagacttctccaaccctgttacagataccacccggtcctcccaagtag

SEQ ID NO: 186941 - DNA, 1962 bp, Artificial Sequence
  derived and/or modified sequence
atggccctggtccgaggggctgaaccagccgctggcccatcgcgatggctccccacccacgtccaggttactgttctgcgcgctcgcggactacgtggtaaaagctccggcgcagggagcactagtgacgcttacactgttattcaagtgggacgggaaaaatacagtaccagtgtcgtcgaaaagacccacgggtgtcctgagtggagggaggaatgcagctttgaactccctccgggagccctggatgggctgctgcgtgctcaggaggccgacgctggacctgctccatgggcggcatcttctgccgcagcttgcgaactagtactgacaaccatgcacagaagtcttatcggcgtggacaagtttcttgggcaggcgactgtggcgctggatgaagtgtttggcgcaggacgagcccaacatactcagtggtacaagctacactccaaacccggaaagaaggagaaggagcggggagagattgaagtgacaatccagtttactcgcaataatcttagtgcatctatgtttgacctatccatgaaagataagccacgtagccctttcagtaagataagggataaaatgaaggggaaaaaaaaatacgacctcgagtcggcttctgcaatactgccttcttctgctatagaggatccagatcttggttctctcggcaaaatgggcaaggcgaaaggatttttcttgaggaacaaattgcggaagagctccttgacccagtcaaatacttccttggggtccgattccaccctaagctcggcatctgggagcctggcatatcagggaccaggcgctgagttgttgacccggtctccctcccgctccagttggctgtccacagagggaggcagggactccgcacaaagtcctaagctgtttacccacaagcggacctattcagacgaggccaatcagatgcgtgttgcccctcccagagccctgctggacctccaagggcacctggacgcagcttccagatcctccttgtgcgtcaacggctctcacatctacaacgaggaaccacagggccctgtccgccaccgcagcagcatttctggaagtctgcctagcagcggcagcctccaagcagtgtcttctagattcagcgaagagggaccccgatccactgatgatacttggcccagggggtcacgcagcaacagcagtagtgaggccgttctcggacaggaggaactctccgctcaggccaaagttcttgcacctggcgcttctcacccaggtgaggaggagggcgcacggctaccagaggggaaacccgtgcaggtggccactcccattgtcgcctcctctgaagctgtggccgaaaaagagggtgctcggaaggaggaaagaaagcccaggatgggcctgttccatcaccaccatcagggcctcagcaggtccgagctcggacggaggtctagccttggagaaaagggtgggccaatattaggagctagtccgcaccacagctccagtggggaggaaaaggcaaagtctagttggtttggcttgagggaagcaaaggacccaacacagaaaccttcaccacatcctgtcaaaccattgtccgccgctcccgtggaaggttcccctgaccgaaagcagagccgttcgtccctctctatcgcgttgagctcgggcctcgagaaactgaagaccgtgaccagtggttcaattcagcccgtgacacaggccccacaggcagggcagatggttgacacgaaacggctgaaagactccgcagttctcgatcaatccgctaagtattaccacctgacacacgacgaattaatttccctgctcttgcagcgggagcgtgagctaagccaaagagacgagcacgtccaggagttagagtcttacattgatcgattgctggttagaattatggaaacgtctccaacactgctgcagatccccccaggaccacctaaatag

SEQ ID NO: 186942 - DNA, 4342 bp, Artificial Sequence
  derived and/or modified sequence
gccggttggggcggcgggcgcggggcggggcagggggcggggcgctgacgtcgcggcgcggcccgcggccagcggcccggtgaggcggggaggcggcggccggtcggcccggcccagcccagcccgcagctgcggcggcgctcagagttggttcctgaccgccttctgccgcggccgggtttgtcaccaggtcctggggtctgcaccggctcggccagacctcgccccccgcttctccgccatggccctggtgcggggcgcggagccggcggcggggccttcccgctggctgcccacgcacgtccaggtgacggtgctgcgggcccgcgggctgcggggcaagagctcgggagcgggcagcaccagcgacgcgtacacggtgatccaggtgggccgcgagaagtacagtacgtcggtggtggagaagacgcacggctgccccgagtggcgtgaggagtgctccttcgagctgccgccgggggccctggatggcctgctgcgggcgcaggaggccgacgcgggcccggcgccctgggccgcgagctccgccgccgcctgcgagctggtgctcaccaccatgcaccgctcgctcatcggcgtcgacaagttcctgggccaggccacggtggcgctggacgaggtcttcggcgcaggccgcgcccagcacacgcagtggtacaagctgcactccaagccaggcaagaaggagaaggaacgcggcgagattgaagtcaccatccagttcacgcgcaacaacctgagcgccagtatgtttgacctgtccatgaaggacaagccaaggtctcccttcagcaagatcagggacaagatgaagggcaagaagaagtatgatctggaatctgcctctgccatcctcccaagcagcgccatagaggatcctgacctgggcagcctgggcaagatgggcaaagccaaaggcttcttcctccgcaacaagctgcgcaagtcgtccctgacccagtccaacacctcgctgggctcggacagcaccctgtcctcagccagcgggagcttggcctaccagggacctggcgccgaactcctcacccgctcaccaagccgtagcagctggctgtccactgaagggggcagggactctgcacagtcccccaagctgttcacccataagaggacctacagcgatgaggccaaccagatgcgagtggctcctcctcgggcccttctggaccttcagggccacctggatgctgcctcccgctcttcgctctgtgtcaatgggagccacatttacaatgaggagccccagggccctgtgcggcaccgcagctccatctcgggctcgcttccatcctctggctccttgcaagctgtctcttcccggttctccgaggaggggcctcgttccacagatgacacctggcccagaggcagtcgtagcaacagcagctcagaggcagtgcttggacaggaggagctgagtgctcaggctaaagtcctggcccctggggccagccaccctggagaggaggagggggcccggctaccagagggcaagccagtccaggttgccacacccatagtggcctcctctgaggctgtggcagagaaggagggagcccggaaggaggaacgcaagccccggatgggtctcttccaccaccaccaccaaggcctaagtcggagcgagttgggtcgccgaagctctctgggggaaaaggggggtcccatcctgggggcctccccacatcactcatccagtggggaggaaaaggccaagagtagctggtttggcttgagagaagccaaggacccgactcagaaacccagtccccaccccgtgaagcccctcagtgccgcccctgtggagggcagccccgacaggaagcagtcccgctccagtctgagcatagccctgagcagtgggctggagaagctcaaaacagtcacatctgggagcattcagcctgtgacccaggccccccaggctggccagatggtggacaccaaaaggctgaaggactcagctgtgctggaccagtcggccaagtactaccacctgacccacgatgagctcatcagcctgctcctgcagcgggagcgggagctgagccagcgggacgagcatgtgcaggagctggagagctacatcgaccggctgctggtgcggatcatggagacctcacccacgctgctgcagatccccccgggcccccccaaatagccttcctcaccctacccccaggagggttggcatggacctattgctgcctgccctctctcctcctgaactctctcatctgcagtggggcatcgtctgtcttgccttgtcactccttgctcctctccctcctgcctcaactggggctgctggaagggggccctctggattccctttggaggcatcaggttctgtgcacaacttgtgtgtctttgggagccctgggtctttcccacctgcctgttttcatatccctcagctttgggggccccagggaattggaactcttcccccaagacagagcaggggtgaactgtagcttgatgcagtaatctgggacaagactggttgctagcacatactttattatcccccaaggatggtcagccatttcttcccacagccaaagccccatccccttcatttccctccagtccctggaggggcttctagtattactgggacaatgaccacgctgcctgtttgtctgtgagttacgggcaaccagcctcttcagcctcacacccattcccctgagagcaagaagcctgtgtggtctgggccagtctctgccatgtcctgagtctgcttcagtctggagctgtttgtggggcgagtgccatgtggacagtggtggatgatgtgtgtgcttcaggctgctccctgacccctctgacctttccacgagtgtcacatgggaatgtgtggggcgcaggggcgggtgcggagagagcacctttttgcttttcgagctcttgaccacctccaatgtgtaggtccctccaggctggggcttgggactgcttatgatttggggatcaagcctccatgtctattcttgttgcctgtccagatgccaaaactctgtgttgctgcagggtttgaacttttggaaaccaattaaaatgtgcctttggtgggcggggtcaagagcccctggatgtcgacctctcccgctgtgtggcgtccccctcccacctgttgaatacatagggatggctctctcagggccctgggaatgggaatggacagcactgctgtgggctgttcccctcccctaaagttaatctcttggtctggccaagttgctgctccctcaaccttcctgctgtcttcccctccctcaaccccaataggaggatcccaggataaacactgctgggcaggcgggcaggcaggcctggggctgccctgctcactctcattgtctggcctcaggacttagccatactagaccagtcagcttgcctggaagagggaggtcccactatgcctttgggagacacctatacttaggaaaaagcctttgttgtcctcccatccatccattaagctgctatctcagcctgtcccttctgccccaggggcttgcctggcttggctgcagtgcactttgaaatgaagtatctgtcctttggcccagcccctggtttgcttgtagaaaacatggtaggcttccccaaggcatctgcagggaactttggcagcttggggcaccctgaattagcaaaaatggggggtgatgaggtgctgaagaaggatacttaacagcttagtgaggaggcaagagctcctctgggaccaccacttcttcaggagagggcctgtgggcttgcttttggaaggcctcaggcagacacgtgccctctgggtgatgtctgtctgctgccaggatggagcagaggagcgccacacatggaggaaagcccctgtaacgttacctaccttaaactccactcatcaaatctgagaaaagtatccactggtccccagggtttcagtcatgcttttgggggtcattgggtattagagaagtaagtatcttttctgagagagggggagtcaccccccctactggggattcctctgggctttattcactcccagccctggccctgacctttgtgggcctccctaatgcccagggcatggatggcttcagaggagtttttgaatcgaagcccagggtccttgttgatgtttcttctcctagccacacttggaggaaagttgcaggtgggttgggcagggagcaggcatggttctgctttgctgtttgtcttcctagttaaggctctttataaagagcttgttcttcatgttttaagcactttatgaagaataaaacattcatgtactgca

SEQ ID NO: 186943 - protein, 626 aa, Artificial Sequence
  derived and/or modified sequence
MQRADSEQPSKRPRCDDSPRTPSNTPSAEADWSPGLELHPDYKTWGPEQVCSFLRRGGFEEPVLLKNIRENEITGALLPCLDESRFENLGVSSLGERKKLLSYIQRLVQIHVDTMKVINDPIHGHIELHPLLVRIIDTPQFQRLRYIKQLGGGYYVFPGASHNRFEHSLGVGYLAGCLVHALGEKQPELQISERDVLCVQIAGLCHDLGHGPFSHMFDGRFIPLARPEVKWTHEQGSVMMFEHLINSNGIKPVMEQYGLIPEEDICFIKEQIVGPLESPVEDSLWPYKGRPENKSFLYEIVSNKRNGIDVDKWDYFARDCHHLGIQNNFDYKRFIKFARVCEVDNELRICARDKEVGNLYDMFHTRNSLHRRAYQHKVGNIIDTMITDAFLKADDYIEITGAGGKKYRISTAIDDMEAYTKLTDNIFLEILYSTDPKLKDAREILKQIEYRNLFKYVGETQPTGQIKIKREDYESLPKEVASAKPKVLLDVKLKAEDFIVDVINMDYGMQEKNPIDHVSFYCKTAPNRAIRITKNQVSQLLPEKFAEQLIRVYCKKVDRKSLYAARQYFVQWCADRNFTKPQDGDVIAPLITPQKKEWNDSTSVQNPTRLREASKSRVQLFKDDPM

SEQ ID NO: 186944 - protein, 170 aa, Artificial Sequence
  derived and/or modified sequence
MFDGRFIPLARPEVKWTHEQGSVMMFEHLINSNGIKPVMEQYGLIPEEDICFIKEQIVGPLESPVEDSLWPYKGRPENKSFLYEIVSNKRNGIDVDKWDYFARDCHHLGIQNNFDYKRFIKFARVCEVDNELRICARDKEVGNLYDMFHTRNSLHRRAYQHKVGNIIDTM

SEQ ID NO: 186945 - DNA, 1881 bp, Artificial Sequence
  derived and/or modified sequence
atgcaaagggcagactctgagcaaccctcaaaaagacccagatgtgatgatagtccaagaacccctagtaacaccccatctgcagaagcagattggtcacccggcctagagttgcaccctgactacaagacttggggccccgagcaagtgtgtagtttcctcagacgggggggttttgaggagccagtgttacttaagaatattagagagaatgagattacgggtgcccttttgccctgtcttgatgagagcaggtttgaaaatttaggtgtgtccagtttgggcgagcgcaaaaagctgctctcctacattcaacggttagtccagatccacgttgatactatgaaggtgataaacgatccaatccacgggcacattgagctgcatcccttactggttagaatcatcgacacccctcagttccaacgcttgagatacatcaagcagttggggggaggatactatgtattccctggtgcctcccacaaccggttcgagcactctcttggcgtgggatacctggctggatgtctcgttcatgctctgggagaaaaacagccagaactgcagatttctgagagagatgtcttatgtgtacagatcgccggactctgtcacgatctgggccatggcccgttttcacacatgtttgatggccgctttattcccctggcacgaccagaagtaaaatggacccatgagcagggcagcgtgatgatgtttgagcacctgatcaattctaatggaatcaaacctgtcatggagcagtatgggctcatccccgaagaagacatctgctttattaaggagcagatcgtagggccactggagtcccccgtggaggactctctctggccctataaaggacgtcccgaaaacaaaagtttcttgtatgaaatagtaagtaataagaggaacgggattgatgtggataaatgggactatttcgcacgcgactgccaccacttggggatccagaacaatttcgattacaaaagattcattaaatttgcccgcgtatgtgaagtagacaatgagttgaggatttgtgccagggataaggaggtcggcaatctgtacgacatgttccacacacggaatagcctgcaccggagggcctatcaacataaggtgggcaacatcattgacaccatgattacagatgccttcctgaaggctgatgactatattgaaattactggtgccggcggcaaaaagtacagaattagtaccgccatcgatgacatggaggcctacaccaagctgactgacaacatctttttagagatactgtatagcaccgatcctaaactcaaggatgcgcgggagattctgaagcagattgagtaccggaatctgttcaaatacgtgggcgaaactcagcccactggtcaaattaagattaagagggaggactacgagagcttgccaaaggaggtggccagtgcgaaacctaaggtattgttggacgtgaaactgaaggccgaagactttatcgtagatgttataaatatggactatggcatgcaagagaagaaccccattgatcacgtatcgttctactgtaagactgccccgaaccgggcgatccgcattactaaaaatcaggtctctcagctgctgcccgagaagtttgcagaacagctgatacgcgtctattgcaagaaagtagacaggaaatcactgtatgccgcgaggcagtacttcgtgcagtggtgcgcggacaggaattttactaaacctcaggacggcgacgtgattgccccacttatcactccccaaaaaaaagagtggaacgatagtactagcgtgcagaacccaactcggttgcgggaagccagtaagtcccgagtccagctttttaaggacgatcccatgtag

SEQ ID NO: 186946 - DNA, 1881 bp, Artificial Sequence
  derived and/or modified sequence
atgcagagagctgacagcgagcagcccagcaagaggccccgctgtgatgacagccccaggacccccagcaacaccccatctgctgaggccgactggagccctggcctggagctgcacccagactacaagacctggggccctgagcaggtgtgcagcttcctgcggcggggcggctttgaggagcctgtgctgctgaagaacatccgggagaatgagatcaccggggccctgctgccctgcctggatgagagcagatttgagaacctgggcgtgagcagcctgggggagaggaagaagctgctgagctacatccagaggctggtgcagatccacgtggacaccatgaaggtgatcaatgaccccatccacggccacatcgagctgcaccccctgctggtgcgcatcatcgacaccccccagttccagaggctgcgctacatcaagcagctgggcggcggctactacgtgtttcctggggccagccacaacagatttgagcacagcctgggcgtgggctacctggccggctgcctggtgcacgccctgggggagaagcagcctgagctgcagatcagcgagagagatgtgctgtgtgtgcagattgctggcctgtgccacgacctgggccacggccccttcagccacatgtttgatggccgcttcatccccctggcccggcctgaggtgaagtggacccatgagcagggctctgtgatgatgtttgagcacctgatcaacagcaatggcatcaagcctgtgatggagcagtatggcctcatccctgaggaggacatctgcttcatcaaggagcagatcgtgggccccctggagagccctgtggaggacagcctgtggccctacaagggccggcctgagaacaagagcttcctgtatgagatcgtgagcaacaagagaaatggaattgatgtggacaagtgggactactttgcccgggactgccaccacctgggcatccagaacaactttgactacaagcgcttcatcaagtttgcccgggtgtgtgaggtggacaatgagctgcgcatctgtgcccgggacaaggaggtgggcaacctgtatgacatgttccacaccaggaacagcctgcacagaagagcctaccagcacaaggtgggcaacatcatcgacaccatgatcacagatgccttcctgaaggcagatgactacatcgagatcaccggggccggcggcaagaagtaccgcatcagcacagccattgatgacatggaggcctacaccaagctgacagacaacatcttcctggagatcctgtacagcacagaccccaagctgaaggatgcccgggagatcctgaagcagatcgagtacagaaacctcttcaagtatgtgggggagacccagcccaccggccagatcaagatcaagagagaagattatgagagcctgcccaaggaggtggccagcgccaagcccaaggtgctgctggatgtgaagctgaaggccgaggacttcatcgtggatgtgatcaacatggactatggcatgcaggagaagaaccccatcgaccacgtgtccttctactgcaagacagcccccaacagagccatccgcatcaccaagaaccaggtgtcccagctgctgcctgagaagtttgctgagcagctgatccgggtgtactgcaagaaggtggacaggaagagcctgtatgctgcccggcagtactttgtgcagtggtgtgccgacaggaacttcaccaagccccaggatggagatgtgattgcccccctcatcaccccccagaagaaggagtggaatgacagcacctctgtgcagaaccccacccggctgcgggaggccagcaagagccgggtgcagctgttcaaggatgaccccatgtag

SEQ ID NO: 186947 - DNA, 1881 bp, Artificial Sequence
  derived and/or modified sequence
atgcagcgggccgacagcgagcagcccagcaagcggccccggtgcgacgatagcccgcgaactccgtctaataccccatctgccgaggccgactggtctccgggactggaactgcaccctgactataaaacttggggtccggagcaggtgtgttcttttctccggcgtggtgggttcgaagaaccggtcttacttaagaacatacgggaaaacgaaattacaggagctttgctcccttgtctcgatgaatcacggttcgagaacctgggggtgagttctctcggcgaacgcaagaagcttctcagttatatacaacgcctagtccaaatccacgtggataccatgaaggtgatcaacgaccctatacatgggcatattgagctacaccccctccttgtacgaatcatagataccccacaattccaaagattaaggtatataaaacagctgggtggcggctattatgtatttcctggggcttcccacaataggtttgaacacagtttaggcgtaggctatctggctggatgcttagtgcatgccctgggggagaagcagccggagcttcaaatcagcgagcgcgacgttctgtgcgtgcagattgcagggctgtgccacgatcttggacatgggccctttagtcatatgttcgatggccgcttcattcccctggcccgacccgaagttaagtggactcacgagcagggcagtgtgatgatgtttgaacatctcatcaattccaatggcatcaaaccagtaatggaacaatatggtctgatccctgaggaagatatctgctttatcaaggaacagattgtaggaccactggaatcacctgttgaggatagtttatggccttataagggccgcccagagaacaaaagcttcttatatgagattgtttctaataagaggaacggtatcgacgtcgacaaatgggattactttgcccgggactgtcaccacctggggattcagaacaatttcgactacaaaaggttcatcaagtttgctcgggtgtgtgaagtggacaatgagctcagaatctgtgctcgcgacaaagaagtcggcaacctgtatgacatgtttcacactcggaattctctccatagaagggcataccagcacaaggtgggcaacatcattgacaccatgattacagacgcatttttgaaggctgatgattatattgagattaccggcgctggcggtaagaagtacagaatttccaccgcaattgatgatatggaggcctacacaaagctcactgataatatctttctggagatcctttattccactgatcctaagttaaaggacgctcgcgagattctgaaacaaatcgagtaccgaaacttattcaagtacgtcggcgagacgcagccaactgggcagattaagataaaacgggaggactatgaatcactgcccaaggaggtagcgtctgcgaagcccaaggtgctgctggacgtgaagctcaaggcggaggatttcattgtggacgtgataaatatggactatgggatgcaggaaaaaaatccgatcgatcatgtgtctttctactgtaagaccgctcccaatagggcaattagaatcaccaagaatcaggtttcacagctgttacccgaaaagttcgccgagcaactgatccgggtctactgcaaaaaggtagataggaagagcctctacgctgcccgccagtactttgtgcagtggtgtgccgacagaaacttcaccaagccgcaggacggagatgtcatagcccctcttattacacctcagaagaaagaatggaatgactcaacctccgtacagaatccaacacgtttgagggaagccagcaaatcaagggtacagctgtttaaagacgatcctatgtag

SEQ ID NO: 186948 - DNA, 1881 bp, Artificial Sequence
  derived and/or modified sequence
atgcaacgggctgacagtgagcaaccttcaaaacgcccacgctgtgacgatagccctagaacaccaagtaatactccatcagccgaagcagattggtcccctggattagaactccaccctgattataagacctggggccctgaacaagtttgtagttttttgaggcgaggcggatttgaggaaccggtgttgcttaagaacattagggagaatgagatcacaggagctctgctgccgtgtctagacgaatcccgcttcgaaaatcttggggtctcaagtctcggagaacgaaaaaaactcctgtcctatattcagcggctcgtccagatccatgtggataccatgaaggtgataaacgaccctatacatggccacatagaattgcaccctctactagtcaggatcatagacacaccacagtttcaacgactgcgctacatcaaacagttgggcggagggtattatgtgtttcctggcgcttcacataacagatttgaacatagtttgggggtcggttacctcgctgggtgcctggtgcacgctctcggggaaaaacaaccggagctgcagatcagcgagagagatgtgctctgtgtccagattgcgggactttgccacgatcttgggcatggccctttcagccatatgttcgacggccgatttattccactcgctcgtcctgaagttaaatggacccacgagcaaggctcagtgatgatgtttgaacacctgatcaattctaacgggattaagcccgtgatggaacagtatggccttattcctgaggaagatatatgctttataaaagaacagattgtgggccctcttgaatccccagtcgaagattcgctctggccctataagggtcgccctgagaacaagagttttctatacgagattgtgtccaataagcgcaatggtatcgacgttgataaatgggactatttcgccagagattgtcaccatctaggaatccagaacaacttcgactacaaacgcttcattaaattcgccagggtgtgcgaggtggacaatgagcttcggatttgtgctcgggacaaggaggtcggtaatctgtatgatatgttccacacacggaactctcttcaccggagggcgtatcaacataaggtgggcaatattatcgacaccatgataacagatgctttcctaaaggctgatgactatatcgagatcacaggcgcaggcggaaaaaaatacaggattagcacagcaatcgacgacatggaagcgtataccaaacttacagacaatatctttttagaaatcctctactccaccgatcctaaactcaaggacgctcgggagattttgaagcaaatcgaatatagaaacctgttcaagtacgtcggcgaaacgcagcctaccggtcagatcaagatcaaacgtgaggactacgaaagtttaccgaaagaggtggcctctgctaaaccaaaggtgctgctggatgtgaaactgaaggccgaagacttcatcgtggatgtgatcaacatggactatggcatgcaagagaagaatccaatcgatcatgtgagcttttattgcaagactgccccaaatagggccatccgcattaccaagaaccaggtgtctcagctgctgcccgaaaagtttgcagaacagcttatccgagtgtactgtaagaaggtggatagaaaatctctgtatgccgctagacaatacttcgttcaatggtgcgccgataggaacttcacaaagccacaggatggagatgtcatcgcaccactcattacccctcagaagaaggagtggaatgacagcactagtgtccagaaccccacacgtctgagagaggcctccaagagtagagtgcagttgtttaaggatgatcccatgtag

SEQ ID NO: 186949 - DNA, 4784 bp, Artificial Sequence
  derived and/or modified sequence
attgcgcctgcgcagggagcccaaggcaagagccgctaggctgccctgcccgaagggctcaactgtcagtgagcctgcgcaggaggccaataggctgccaatactccttggactccccgccagggccctgctgtcagtgcgcctgcgcgcgggtccggcgccgaggttcttgactgctgtgccggacgccaggtgtagccatgcagcgagccgattccgagcagccctccaagcgtccccgttgcgatgacagcccgagaaccccctcaaacaccccttccgcagaggcagactggtccccgggcctggaactccatcccgactacaagacatggggtccggagcaggtgtgctccttcctcaggcgcggtggctttgaagagccggtgctgctgaagaacatccgagaaaatgaaatcacaggcgcattactgccttgtcttgatgagtctcgttttgaaaatcttggagtaagttccttgggggagaggaagaagctgcttagttatatccagcgattggttcaaatccacgttgatacaatgaaggtaattaatgatcctatccatggccacattgagctccaccctctcctcgtccgaatcattgatacacctcaatttcaacgtcttcgatacatcaaacagctgggaggtggttactatgtttttccaggagcttcacacaatcgatttgagcatagtctaggggtggggtatctagcaggatgtctagttcacgcactgggtgaaaaacaaccagagctgcagataagtgaacgagatgttctctgtgttcagattgctggactttgtcatgatctcggtcatgggccattttctcacatgtttgatggacgatttattccacttgctcgcccggaggtgaaatggacgcatgaacaaggctcagttatgatgtttgagcaccttattaattctaatggaattaagcctgtcatggaacaatatggtctcatccctgaagaagatatttgctttataaaggaacaaattgtaggaccacttgaatcacctgtcgaagattcattgtggccatataaagggcgtcctgaaaacaaaagcttcctttatgagatagtatctaataaaagaaatggcattgatgtggacaaatgggattattttgccagggactgccatcatcttggaatccaaaataattttgattacaagcgctttattaagtttgcccgtgtctgtgaagtagacaatgagttgcgtatttgtgctagagataaggaagttggaaatctgtatgacatgttccacactcgcaactctttacaccgtagagcttatcaacacaaagttggcaacattattgatacaatgattacagatgctttcctcaaagcagatgactacatagagattacaggtgctggaggaaaaaagtatcgcatttctacagcaattgacgacatggaagcctatactaagctgacagataacatttttctggagattttatactctactgatcccaaattgaaagacgcacgagagattttaaaacaaattgaataccgtaatctattcaagtatgtgggtgagacgcagccaacaggacaaataaagattaaaagggaggactatgaatctcttccaaaagaggttgccagtgctaaacccaaagtattgctagacgtgaaactgaaggctgaagattttatagtggatgttatcaacatggattatggaatgcaagaaaagaatccaattgatcatgttagcttctattgtaagactgcccccaacagagcaatcaggattactaaaaaccaggtttcacaacttctgccagagaaatttgcagagcagctgattcgagtatattgtaagaaggtggacagaaagagtttgtatgccgcaagacaatattttgttcagtggtgtgcagacagaaatttcaccaagccgcaggatggcgatgttatagccccactcataacacctcaaaaaaaggaatggaacgacagtacttcagtccaaaatccaactcgcctccgagaagcatccaaaagcagagtccagctttttaaagatgacccaatgtgaatgtctgtagtcagttgtttacaaactccctctcctgcacaattcatttagaggcttcaatcatagaattctgcaaattaatgacaactcatgctttaattttgtattttgaatgtacacgcatgctgaagctaagtaacttttaatcaaagaaataagatggtattaggcaaatcttactatactatgaaaagcattaccttgcctatttttaatattattaaagcctttctccttcagtagtctattttcttagaataacaactcttttatctattctgaactctattttttttcttttttaagagacaaggttttgctctgttgcccagcttggactcgaactttcctgggctcaagcgaccctcctgcctcagccccccaagtagctgggactaaagtcatgtgccaccacacccagcttactctgaacttttatgacagatgattgttttttgtttttaatgtagaaatgagacaagggtacaaattggaactagaaattgacattgtcattgacaaacatggctaaaaacaaaacatcaaatcctgcccccgtgaagagttccctgtcacctcaagtttgaggatagtcctctaagagtgacctaagcataagtgaaagacacctcccctcacccttctagccccctacaaggtgccaggttggggtaaagagttggagatgatggccaggagtggcctccaacacgctggtgagaggcctgattaggttttggggaagatctgagagctctggcctcttcgtgagtggaacataaagccgcctcttgttgggagatcctaccccagtgacagaggaatcccccaaactaggctgtgccctggctccgtggcggctccagacccgggtagtgcctttgtcccctgaatactcactcccccggtccagagggccttcccactgcccagcctggagaaggcctcccctgacctgctctctcagtatcctggagagctggccagaggccatcacaggcatcatcctcagagctcctcagacctgggactttgtttttgctggttcagtgcattttgtgtatttaagagcaaacactagccaggcgtggcggcgtgtgcctgtagtcccagctacttgggaggctgaggcaggaggattgctcgaacctgggaggcggaggttgcagtgagcctagatcacgccattgcactccagcctgggtgacagagtgagactccatctccaaaaaaaaaagcacaaacactgcactgcctgtgctgaaattagtgaccacccagtgggctccaggctccgctaggtaacttcgttttcccagcagtggagtgggcaccaccttggtggggcagtgcccctgtgcccagggcacacctcattcccagttctatagcaattcaccaagaacaaagtctgcagttagagccaaagctggtggtggccagagggtgctgaagatacaggccagtggggatgggagccatgagccccgaatgtcttctgctctgatgctccccggactaagcctccctggcacactgggagtgaggggcagcctgagcaagtaggggaactcagaccacaggccagcagatttcccagcagtccatcactggccaccgtgtagccagattctgttccgtccacactggggtgaagagtacttggaatgtctgccatcctgtatgatcaccccaccccctgtccatccatcagtagataataagggttggttacaattcataagagaatagttaaaacacttctcctctcatgcctaccatggtgctgtatcaaggggatttgttcacatatgggctcagcaacgcacaagtgaggtcagccatggcactaggtcattcccattttagccaaggtgcctctataggggtcagacatcatgtgcccagacctaaggtcaggaatgtcatatttttctgttaaaatcattttatttctgtgtatcttacctttaaatcattgtggtttactctgagattctgtagtcctaatattgtatcattgtgctgtctgcaaaacaacttgaatctattttgtttgcatcttttgttacatgtaacgcagctgtactttatgttctttgcaactgtttccattatgagaacgctgtgctatttacaaggttacatttttcttggccaggcgaggtggtcatgcctgtaatcccagcactttgggaggccaaggtgggcggatcacttgaggtaaagagttgagaccagcctggctagcatggcgaaacccagtctctactaaaaatacaaaaattagccgggtgaaattagccgggcgtggtggtgtgtgcttgtaatcccagctactcgggaggctgaggcaggagaatcgcttgaatccgggaggcagaggttgcagtgagccaagatcaggccactgcactccagcctcggggtcaagagcgaaactctgtctcaaacaaaaagaaagaaaggaaggaaggaaggagggaaggaaggaaggaaagagagaaagaaaagaaagaaagaaagaaagaaagagaaagaaatatctttgctatttgtataaaaatggaaattttaacagcttagcctctagagagttactgaacgtggttaccttgggaatgtaaatagaactgcaaattaaaatgactggccacttcaactgggtaagggaaacagctgcaataaagcttcgtgaatata

SEQ ID NO: 186950 - DNA, 1881 bp, Artificial Sequence
  derived and/or modified sequence
atgcagagagccgacagcgagcagcccagcaagagacccagatgcgacgacagccccagaacccccagcaacacccccagcgccgaggccgactggagccccggcctggagctgcaccccgactacaagacctggggccccgagcaggtgtgcagcttcctgagaagaggcggcttcgaggagcccgtgctgctgaagaacatcagagagaacgagatcaccggcgccctgctgccctgcctggacgagagcagattcgagaacctgggcgtgagcagcctgggcgagagaaagaagctgctgagctacatccagagactggtgcagatccacgtggacaccatgaaggtgatcaacgaccccatccacggccacatcgagctgcaccccctgctggtgagaatcatcgacaccccccagttccagagactgagatacatcaagcagctgggcggcggctactacgtgttccccggcgccagccacaacagattcgagcacagcctgggcgtgggctacctggccggctgcctggtgcacgccctgggcgagaagcagcccgagctgcagatcagcgagagagacgtgctgtgcgtgcagatcgccggcctgtgccacgacctgggccacggccccttcagccacatgttcgacggcagattcatccccctggccagacccgaggtgaagtggacccacgagcagggcagcgtgatgatgttcgagcacctgatcaacagcaacggcatcaagcccgtgatggagcagtacggcctgatccccgaggaggacatctgcttcatcaaggagcagatcgtgggccccctggagagccccgtggaggacagcctgtggccctacaagggcagacccgagaacaagagcttcctgtacgagatcgtgagcaacaagagaaacggcatcgacgtggacaagtgggactacttcgccagagactgccaccacctgggcatccagaacaacttcgactacaagagattcatcaagttcgccagagtgtgcgaggtggacaacgagctgagaatctgcgccagagacaaggaggtgggcaacctgtacgacatgttccacaccagaaacagcctgcacagaagagcctaccagcacaaggtgggcaacatcatcgacaccatgatcaccgacgccttcctgaaggccgacgactacatcgagatcaccggcgccggcggcaagaagtacagaatcagcaccgccatcgacgacatggaggcctacaccaagctgaccgacaacatcttcctggagatcctgtacagcaccgaccccaagctgaaggacgccagagagatcctgaagcagatcgagtacagaaacctgttcaagtacgtgggcgagacccagcccaccggccagatcaagatcaagagagaggactacgagagcctgcccaaggaggtggccagcgccaagcccaaggtgctgctggacgtgaagctgaaggccgaggacttcatcgtggacgtgatcaacatggactacggcatgcaggagaagaaccccatcgaccacgtgagcttctactgcaagaccgcccccaacagagccatcagaatcaccaagaaccaggtgagccagctgctgcccgagaagttcgccgagcagctgatcagagtgtactgcaagaaggtggacagaaagagcctgtacgccgccagacagtacttcgtgcagtggtgcgccgacagaaacttcaccaagccccaggacggcgacgtgatcgcccccctgatcaccccccagaagaaggagtggaacgacagcaccagcgtgcagaaccccaccagactgagagaggccagcaagagcagagtgcagctgttcaaggacgaccccatgtag

SEQ ID NO: 186951 - protein, 300 aa, Artificial Sequence
  derived and/or modified sequence
MEEEASSPGLGCSKPHLEKLTLGITRILESSPGVTEVTIIEKPPAERHMISSWEQKNNCVMPEDVKNFYLMTNGFHMTWSVKLDEHIIPLGSMAINSISKLTQLTQSSMYSLPNAPTLADLEDDTHEASDDQPEKPHFDSRSVIFELDSCNGSGKVCLVYKSGKPALAEDTEIWFLDRALYWHFLTDTFTAYYRLLITHLGLPQWQYAFTSYGISPQAKQWFSMYKPITYNTNLLTEETDSFVNKLDPSKVFKSKNKIVIPKKKGPVQPAGGQKGPSGPSGPSTSSTSKSSSGSGNPTRK

SEQ ID NO: 186952 - DNA, 903 bp, Artificial Sequence
  derived and/or modified sequence
atggaggaggaggccagcagccccggcctgggctgcagcaagccccacctggagaagctgaccctgggcatcaccagaatcctggagagcagccccggcgtgaccgaggtgaccatcatcgagaagccccccgccgagagacacatgatcagcagctgggagcagaagaacaactgcgtgatgcccgaggacgtgaagaacttctacctgatgaccaacggcttccacatgacctggagcgtgaagctggacgagcacatcatccccctgggcagcatggccatcaacagcatcagcaagctgacccagctgacccagagcagcatgtacagcctgcccaacgcccccaccctggccgacctggaggacgacacccacgaggccagcgacgaccagcccgagaagccccacttcgacagcagaagcgtgatcttcgagctggacagctgcaacggcagcggcaaggtgtgcctggtgtacaagagcggcaagcccgccctggccgaggacaccgagatctggttcctggacagagccctgtactggcacttcctgaccgacaccttcaccgcctactacagactgctgatcacccacctgggcctgccccagtggcagtacgccttcaccagctacggcatcagcccccaggccaagcagtggttcagcatgtacaagcccatcacctacaacaccaacctgctgaccgaggagaccgacagcttcgtgaacaagctggaccccagcaaggtgttcaagagcaagaacaagatcgtgatccccaagaagaagggccccgtgcagcccgccggcggccagaagggccccagcggccccagcggccccagcaccagcagcaccagcaagagcagcagcggcagcggcaaccccaccagaaagtag

SEQ ID NO: 186953 - DNA, 2064 bp, Artificial Sequence
  derived and/or modified sequence
gtcccggctccagaacgccgcggcactggggcgggaggggcccgccacgtccgccatcttgaaacaaccgccactcggggcgtcgcgcctgggccgccacgcctcggcctgcaggctcggtccccattggccgcaccacgcagaggcccgcccccgcctgcgcggccggcccctgcggggcgagagggtgggggcgaaggggaagctacgtcccggaggtgcggtgtggggcaccgggcggggccgcgggaaccggcgccccacggagctgctgctgtcagaccaaccccgggcccccatcatcactgcgccgcgctttcaggcgccgagaactaccgttcccggcatgccatgaaattggcctcggcgctgaggcggggtccggccctccacccgctcccgccgcgcgcgaatcgcggtcgcgagccatggaggaggaggcatcgtccccggggctgggctgcagcaagccgcacctggagaagctgaccctgggcatcacgcgcatcctagaatcttccccaggtgtgactgaggtgaccatcatagaaaagcctcctgctgaacgtcatatgatttcttcctgggaacaaaagaataactgtgtgatgcctgaagatgtgaagaacttttacctgatgaccaatggcttccacatgacatggagtgtgaagctggatgagcacatcattccactgggaagcatggcaattaacagcatctcaaaactgactcagctcacccagtcttccatgtattcacttcctaatgcacccactctggcagacctggaggacgatacacatgaagccagtgatgatcagccagagaagcctcactttgactctcgcagtgtgatatttgagctggattcatgcaatggcagtgggaaagtttgccttgtctacaaaagtgggaaaccagcattagcagaagacactgagatctggttcctggacagagcgttatactggcattttctcacagacacctttactgcctattaccgcctgctcatcacccacctgggcctgccccagtggcaatatgccttcaccagctatggcattagcccacaggccaagcaatggttcagcatgtataaacctatcacctacaacacaaacctgctcacagaagagaccgactcctttgtgaataagctagatcccagcaaagtgtttaagagcaagaacaagatcgtaatcccaaaaaagaaagggcctgtgcagcctgcaggtggccagaaagggccctcaggaccctccggtccctccacttcctccacttctaaatcctcctctggctctggaaaccccacccggaagtgagcacccctccctccaactccctaccagctccagagtggtggtttccatgcacagatggccctaggggtgacctccagttttgcgtgtggaccgtaggcctctttctagttgaatgaccaaaattgtaaggcttttagtcccaccgacattagccaggctcgtagtgaggcctccagagcaggttgtgctgtcccctgcctctggaagcaatggggaatttggaatcttgtgtaagtgcccaaataagtctgagtgctttcctcttcttcaacactcaaccctcaatcccttagcactgattgattagagaggtcccccaaagaaaccactggttttgacccatgaagcattagaactgcattgttcattcaggagccactagtcacatatgactatttaaatttaaagtaaattgtatgaaaaattcatttcttcaattgcattagccacattttgagtattcatgtggctggtagattctgtattagcacaaagatatggaacatttccatcaccacagaaagttctgttggacagcactgcattagaatattttcatactgctcttcctcaattaatttttgttgttaatgttgatgtcttcattggatgggtcataatgttccatgaaacctctcaagtacacaattgtatgttctttgtatcccttaccacaaatatctcgctctgctcatttcttttgcagcttcctataaagtttgtcttcctcatc

SEQ ID NO: 186954 - DNA, 903 bp, Artificial Sequence
  derived and/or modified sequence
atggaagaggaagctagctcaccagggttgggctgtagtaagccccaccttgagaagctgacgctagggatcacccgcatcctcgagagttcgccgggggtcaccgaggtgactatcattgagaagccacctgccgagcggcatatgatcagttcatgggaacaaaaaaacaattgtgtgatgccggaggatgtgaaaaacttttacctcatgaccaatggctttcacatgacctggtctgttaagttagacgaacacatcattcccctcggctctatggctatcaatagtatatctaagcttacgcagctgactcagagctcaatgtactccctccctaatgcaccaaccctcgccgacctcgaagacgacacccacgaggcgtctgatgaccagcccgagaaaccgcatttcgatagccggagcgtcattttcgaacttgattcttgcaacggcagcggtaaggtatgccttgtgtacaagtcaggtaagcccgcattggcagaggatacggagatttggttcttagatcgggcgctctactggcatttcctgacagatacgttcacagcctactataggctgcttatcactcacctgggtctgccccagtggcagtatgcctttaccagctatggcatatcccctcaggctaagcagtggttttcaatgtacaagccaataacatataataccaacctcctaaccgaggaaaccgacagcttcgtgaacaagttagatccatctaaggtcttcaaaagtaaaaataaaattgtgattcccaagaaaaagggcccagtccagcctgccggtggacaaaaagggcctagtgggccatcaggccccagtacatcctccactagcaagtcatccagtgggtcagggaaccccacccggaagtag

SEQ ID NO: 186955 - DNA, 903 bp, Artificial Sequence
  derived and/or modified sequence
atggaggaggaggccagcagccctggcctgggctgcagcaagccccacctggagaagctgaccctgggcatcacccgcatcctggagagcagccctggggtgacagaggtgaccatcatcgagaagcccccagctgagcggcacatgatcagctcctgggagcagaagaacaactgtgtgatgccagaagatgtgaagaacttctacctgatgaccaacggcttccacatgacctggagcgtgaagctggatgagcacatcatccccctgggctccatggccatcaacagcatcagcaagctgacccagctgacccagagctccatgtacagcctgcccaatgcccccaccctggccgacctggaggatgacacccatgaggccagtgatgaccagcctgagaagccccactttgacagccgcagcgtcatctttgagctggacagctgcaatggaagtggcaaggtgtgcctggtgtacaagagcggcaagccagccctggccgaggacacagagatctggttcctggaccgggccctgtactggcacttcctgacagacaccttcaccgcctactaccgcctgctgatcacccacctgggcctgccccagtggcagtatgccttcaccagctatggcatcagcccccaggccaagcagtggttctccatgtacaagcccatcacctacaacaccaacctgctgacagaggagacagacagctttgtgaacaagctggaccccagcaaggtgttcaagagcaagaacaagatcgtcatccccaagaagaagggccctgtgcagcctgctgggggccagaagggccccagcggccccagcggccccagcaccagcagcaccagcaagagcagcagcggcagcggcaaccccaccaggaagtag

SEQ ID NO: 186956 - DNA, 903 bp, Artificial Sequence
  derived and/or modified sequence
atggaggaggaggccagcagccccggcctgggctgcagcaagccccatctggaaaagctgacactagggatcacacgcattcttgaaagctctcccggggtgactgaggtaaccatcatcgagaagcctccagctgagcggcacatgatttcaagctgggagcagaagaacaactgcgtgatgcctgaagacgtgaaaaacttctatctgatgacaaacggctttcacatgacctggagtgtaaaactggacgaacacattattcccttggggtccatggcgatcaattctattagcaagctgacgcagcttactcagtcctccatgtattctctgcctaacgcccccacccttgcagacctggaggacgacacccatgaggcttccgatgatcagcctgaaaaaccacactttgattcaagatcagtcatcttcgagctggactcttgtaacggctccggaaaggtatgtcttgtgtataaaagcgggaagcctgctctggccgaagacacagagatctggtttctggatagagctctctattggcacttcttaactgatacgtttacagcttattatcggctgctgatcactcacctgggcctgccacaatggcagtacgccttcacaagctacgggatctctccccaggcaaaacagtggttttccatgtacaaacctatcacgtataacacgaaccttctgaccgaagaaacggatagctttgtgaataagctagacccctctaaagtgttcaagtccaagaataagatcgtcatccctaaaaaaaagggccctgtgcaaccagccggggggcagaaggggcctagtggcccatctggcccgagcacaagtagtacgagcaaatccagtagcgggtcaggaaaccccacacgaaaatag

SEQ ID NO: 186957 - DNA, 903 bp, Artificial Sequence
  derived and/or modified sequence
atggaggaagaagccagttcacccggactgggatgctcaaaaccccatttggagaagctcacattgggtattaccaggatactcgagtcatcacctggggtcacagaagtgacgattatcgaaaagccacctgccgagaggcacatgatctcttcctgggagcaaaagaataactgcgtgatgcccgaagacgtaaagaacttctacttgatgaccaatggattccatatgacctggagtgtgaaactggatgagcatattattcccttgggatcgatggcaattaatagtatctctaaactgacacagcttacacagtcttccatgtattccctgcccaacgcacctacactagctgacctggaagatgacacccatgaggccagcgacgaccagcctgaaaagccccactttgactctcgttcagtcatcttcgagctggactcctgcaacggctccggtaaagtatgcctcgtgtataagtccggtaagccagcccttgcggaagacactgagatatggttcctagaccgcgctctgtactggcactttctgactgacacctttaccgcttactaccgcctgttgattacccacctaggtctcccacagtggcaatacgcctttacaagttacggtatttccccccaggcaaaacagtggttcagtatgtacaaacccattacctataacaccaacctcctgacagaagagaccgactcattcgtgaacaaactggacccatcaaaagtcttcaagtccaagaataagatagtgattcctaagaaaaaaggtcccgtgcagcccgctggcggacagaaaggccctagcggtccctccggaccatccacatctagcacctctaaaagctcaagcggatccggaaaccccacccgtaaatag

SEQ ID NO: 186958 - protein, 390 aa, Artificial Sequence
  derived and/or modified sequence
MKLEAVDRMNPSLVCVASVTDVVDSRFLVHFDNWDDTYDYWCDPSSPYIHPVGWCQKQGKPLTPPQDYPDPDNFCWEKYLEETGASAVPTWAFKVRPPHSFLVNMKLEAVDRRNPALIRVASVEDVEDHRIKIHFDGWSHGYDFWIDADHPDIHPAGWCSKTGHPLQPPLGPREPSSASPGGCPPLSYRSLPHTRTSKYSFHHRKCPTPGCDGSGHVTGKFTAHHCLSGCPLAERNQSRLKAELSDSEASARKKNLSGFSPRKKPRHHGRIGRPPKYRKIPQEDFQTLTPDVVHQSLFMSALSAHPDRSLSVCWEQHCKLLPGVAGISASTVAKWTIDEVFGFVQTLTGCEDQARLFKDEVRCKCRVGDRAGVTVLKTAGSRCPPQRHFC

SEQ ID NO: 186959 - protein, 743 aa, Artificial Sequence
  derived and/or modified sequence
MRRREGHGTDSEMGQGPVRESQSSDPPALQFRISEYKPLNMAGVEQPPSPELRQEGVTEYEDGGAPAGDGEAGPQQAEDHPQNPPEDPNQDPPEDDSTCQCQACGPHQAAGPDLGSSNDGCPQLFQERSVIVENSSGSTSASELLKPMKKRKRREYQSPSEEESEPEAMEKQEEGKDPEGQPTASTPESEEWSSSQPATGEKKECWSWESYLEEQKAITAPVSLFQDSQAVTHNKNGFKLGMKLEGIDPQHPSMYFILTVAEVCGYRLRLHFDGYSECHDFWVNANSPDIHPAGWFEKTGHKLQPPKGYKEEEFSWSQYLRSTRAQAAPKHLFVSQSHSPPPLGFQVGMKLEAVDRMNPSLVCVASVTDVVDSRFLVHFDNWDDTYDYWCDPSSPYIHPVGWCQKQGKPLTPPQDYPDPDNFCWEKYLEETGASAVPTWAFKVRPPHSFLVNMKLEAVDRRNPALIRVASVEDVEDHRIKIHFDGWSHGYDFWIDADHPDIHPAGWCSKTGHPLQPPLGPREPSSASPGGCPPLSYRSLPHTRTSKYSFHHRLFFPRKCPTPGCDGSGHVTGKFTAHHCLSGCPLAERNQSRLKAELSDSEASARKKNLSGFSPRKKPRHHGRIGRPPKYRKIPQEDFQTLTPDVVHQSLFMSALSAHPDRSLSVCWEQHCKLLPGVAGISASTVAKWTIDEVFGFVQTLTGCEDQARLFKDEVRCKCRVGDRAGVTVLKTAGSRCPPQRHFC

SEQ ID NO: 186960 - protein, 772 aa, Artificial Sequence
  derived and/or modified sequence
MRRREGHGTDSEMGQGPVRESQSSDPPALQFRISEYKPLNMAGVEQPPSPELRQEGVTEYEDGGAPAGDGEAGPQQAEDHPQNPPEDPNQDPPEDDSTCQCQACGPHQAAGPDLGSSNDGCPQLFQERSVIVENSSGSTSASELLKPMKKRKRREYQSPSEEESEPEAMEKQEEGKDPEGQPTASTPESEEWSSSQPATGEKKECWSWESYLEEQKAITAPVSLFQDSQAVTHNKNGFKLGMKLEGIDPQHPSMYFILTVAEVCGYRLRLHFDGYSECHDFWVNANSPDIHPAGWFEKTGHKLQPPKGYKEEEFSWSQYLRSTRAQAAPKHLFVSQSHSPPPLGFQVGMKLEAVDRMNPSLVCVASVTDVVDSRFLVHFDNWDDTYDYWCDPSSPYIHPVGWCQKQGKPLTPPQDYPDPDNFCWEKYLEETGASAVPTWAFKVRPPHSFLVNMKLEAVDRRNPALIRVASVEDVEDHRIKIHFDGWSHGYDFWIDADHPDIHPAGWCSKTGHPLQPPLGPREPSSASPGGCPPLSYRSLPHTRTSKYSFHHRKCPTPGCDGSGHVTGKFTAHHCLSGCPLAERNQSRLKAELSDSEASARKKNLSGFSPRKKPRHHGRIGRPPKYRKIPQEDFQTLTPDVVHQSLFMSALSAHPDRSLSVCWEQHCKLLPGVAGISASTVAKWTIDEVFGFVQTLTGCEDQARLFKDEARIVRVTHVSGKTLVWTVAQLGDLVCSDHLQEGKGILETGVHSLLCSLPTHLLAKLSFASDSQY

SEQ ID NO: 186961 - protein, 84 aa, Artificial Sequence
  derived and/or modified sequence
MAGVEQPPSPELRQEGVTEYEDGGAPAGDGEAGPQQAEDHPQNPPEDPNQDPPEDDSTCQCQACGPHQAAGPDLGSSNDGCPQL

SEQ ID NO: 186962 - protein, 738 aa, Artificial Sequence
  derived and/or modified sequence
MRRREGHGTDSEMGQGPVRESQSSDPPALQFRISEYKPLNMAGVEQPPSPELRQEGVTEYEDGGAPAGDGEAGPQQAEDHPQNPPEDPNQDPPEDDSTCQCQACGPHQAAGPDLGSSNDGCPQLFQERSVIVENSSGSTSASELLKPMKKRKRREYQSPSEEESEPEAMEKQEEGKDPEGQPTASTPESEEWSSSQPATGEKKECWSWESYLEEQKAITAPVSLFQDSQAVTHNKNGFKLGMKLEGIDPQHPSMYFILTVAEVCGYRLRLHFDGYSECHDFWVNANSPDIHPAGWFEKTGHKLQPPKGYKEEEFSWSQYLRSTRAQAAPKHLFVSQSHSPPPLGFQVGMKLEAVDRMNPSLVCVASVTDVVDSRFLVHFDNWDDTYDYWCDPSSPYIHPVGWCQKQGKPLTPPQDYPDPDNFCWEKYLEETGASAVPTWAFKVRPPHSFLVNMKLEAVDRRNPALIRVASVEDVEDHRIKIHFDGWSHGYDFWIDADHPDIHPAGWCSKTGHPLQPPLGPREPSSASPGGCPPLSYRSLPHTRTSKYSFHHRKCPTPGCDGSGHVTGKFTAHHCLSGCPLAERNQSRLKAELSDSEASARKKNLSGFSPRKKPRHHGRIGRPPKYRKIPQEDFQTLTPDVVHQSLFMSALSAHPDRSLSVCWEQHCKLLPGVAGISASTVAKWTIDEVFGFVQTLTGCEDQARLFKDEVRCKCRVGDRAGVTVLKTAGSRCPPQRHFC

SEQ ID NO: 186963 - DNA, 1173 bp, Artificial Sequence
  derived and/or modified sequence
atgaagctggaagccgtggaccggatgaacccatcccttgtttgcgtcgcctctgtgactgacgtggtggactcccggtttctggtccatttcgacaattgggatgacacgtatgattattggtgcgatccttcttctccttacatccacccagttggctggtgccagaagcaggggaagcctctcaccccccctcaggattatcctgaccctgacaacttttgttgggaaaagtatcttgaagagaccggagcatctgccgtgccaacatgggcatttaaggtccgaccgccgcacagcttcttggtcaatatgaagttagaggcagtggacagaaggaatcccgctctgattcgcgtggcctccgtggaggacgtggaagatcaccgcattaagatacatttcgacggatggtcccatgggtacgatttctggatcgacgctgaccatcctgacattcatcctgctggctggtgttctaaaacggggcatccgctacagcccccactgggaccgagagagccctcaagcgcttcaccgggcggctgtccccccctctcctatcggagcctcccgcacactagaacaagtaagtattctttccaccataggaaatgtcctacacctggttgtgatgggtccgggcacgttacgggcaagttcaccgcccaccactgtctgtctggatgcccgctggcggagcgtaatcaaagtcgcctcaaggccgagctttctgattcagaggctagcgctagaaaaaaaaacctttcaggtttctcgcctagaaagaaaccgcgccaccatggcagaataggtcggccaccaaaataccgaaagattcctcaggaagacttccagacattaaccccagacgttgtccaccagtccctgttcatgtccgccctgtctgcccatcctgataggagtctgtccgtttgctgggaacagcactgtaagcttctacctggagtggctggaatcagcgccagcaccgtggctaagtggaccatcgatgaggtgtttggatttgtccagaccctaacgggctgtgaggatcaagcgcggttgtttaaagacgaagtaaggtgtaagtgccgagtaggcgacagagccggggttaccgtgctgaagactgctggctcccggtgcccgccacagagacatttctgctag

SEQ ID NO: 186964 - DNA, 2232 bp, Artificial Sequence
  derived and/or modified sequence
atgcgcagacgagagggccatggcaccgactccgagatgggacagggccccgtgcgagagtcacaatcttctgatccaccagccctccaattcaggattagtgaatataaacccctgaacatggccggagtggagcagcccccgtctccagagctccggcaggagggcgttacagaatatgaggacgggggggcccccgcaggtgatggcgaggcaggaccacaacaggccgaagaccatccccagaatccacccgaagaccccaaccaggatccaccagaggatgactcaacctgtcagtgccaggcatgtggcccacaccaggcagccgggcccgatttgggaagctccaatgacggctgtcctcagctgttccaggaaaggtcagtgattgttgaaaatagcagcggaagcaccagtgcttcagaactgttgaaacctatgaaaaaacggaaacgaagggagtaccagagtccgtctgaggaagaatccgaacccgaggcaatggagaaacaagaagaaggcaaggacccagagggccagccaaccgctagcaccccagagtccgaggagtggagctcatcccagcctgccacaggcgaaaaaaaagagtgttggagctgggagagctacctcgaggagcagaaggctataacggccccagtgagtctctttcaggactcgcaggcagtaacacataacaaaaatggattcaagctcggaatgaagctggagggcatagaccctcaacacccctctatgtatttcatcctgactgtggccgaggtatgcgggtatagactgagacttcattttgatggatacagtgagtgccatgatttctgggtcaacgctaacagcccagatatccatccagctgggtggtttgagaagactggccacaaactgcaacctcctaaaggatacaaggaagaggagttttcgtggtcccagtatctacgttctacacgggcccaggccgccccaaagcacctgtttgtttcacagagtcattcacccccacccctggggtttcaggtcggcatgaaacttgaagcggttgatcgtatgaatccatccttagtgtgcgtcgcatcagtgaccgacgttgtggatagtcggttcctcgtccatttcgacaactgggatgatacctacgactattggtgtgatccctcttccccgtacatccaccccgtgggatggtgccagaagcaaggtaagccactcacacctccacaggactaccccgatcctgataatttttgttgggagaagtatcttgaggagactggcgcgtccgcagtgccaacctgggcatttaaggttcggccgccccattccttcttggtgaatatgaaactggaggccgtggatcggagaaatcctgctcttattagagtggctagcgtggaggacgtggaagatcaccgtattaaaatccacttcgatgggtggtcccatggatatgacttttggatagatgccgaccacccagatatacacccggccgggtggtgttctaagacagggcatccactccagcccccactgggaccccgggagccatcatccgcaagccccgggggatgtcctcctctgagctaccgctcactgcctcacacgagaacgtctaaatacagctttcaccacaggctgttctttcctaggaagtgtcctacaccagggtgtgacggaagcggccatgtcaccggcaaattcactgcccaccattgccttagcgggtgtcctctggcagagaggaatcagtcaagacttaaggcggaactgtccgatagcgaagcttcagctaggaagaagaatttgtcaggtttttctcctcgcaagaaaccccgacaccacggccgaatcggtcggccccccaagtatcggaagatcccacaggaagacttccagaccctgacaccagacgtggtgcaccagtccttgtttatgtctgccttgtctgcccatcccgatcggtccctttcagtttgctgggagcaacactgtaagctgctgcctggagtggccggtatatctgcatctactgtggcgaagtggacaatcgacgaggtatttggcttcgtgcaaactttgaccggctgtgaggatcaggccaggctgttcaaggacgaagtgagatgcaaatgcagggtgggggatagagccggtgtgacagtgctcaaaaccgcaggtagtcggtgtccacctcagcggcacttctgttag

SEQ ID NO: 186965 - DNA, 2319 bp, Artificial Sequence
  derived and/or modified sequence
atgcggaggagggagggccacggaacagactccgagatggggcagggcccagtgcgtgagtcccagagctccgatccccccgcactccagttccgtattagtgagtacaagccactcaatatggcaggtgttgagcaaccaccctcacccgagttaagacaggagggcgtgactgagtacgaagatgggggagctccagcaggggatggggaggccggaccccagcaggcagaggatcaccctcagaatccccctgaagaccccaaccaagaccccccagaagacgattctacctgccagtgtcaggcatgcggaccgcatcaggccgcagggccggacctcggatcttccaatgatgggtgcccgcaactgttccaagaacgctcggtgatcgtcgaaaatagcagtggctccacctccgcaagtgagctccttaaacctatgaaaaagcggaagagaagggaataccaatccccgagcgaggaagagtcagaacccgaagcgatggaaaagcaggaggagggaaaagacccagaaggccaaccaaccgcatcgactccggaatccgaggaatggagcagcagccagccagccaccggtgaaaaaaaagaatgctggtcctgggaatcttacctggaggagcagaaggcaatcacagcacccgtaagcctcttccaagacagccaagccgtaacacataataagaatggcttcaaactgggaatgaaattagagggtatcgatccccagcaccctagcatgtactttattctcaccgtggctgaggtgtgtgggtaccgactccgactgcattttgatggatattccgagtgtcacgatttctgggttaacgcgaactcgcctgacatccaccccgccggatggtttgagaagacagggcataagctgcagcctccaaaaggatataaggaggaagaatttagctggagccaatatctaagatccacacgggcgcaggcagcccccaagcacctgtttgtctctcaatctcacagtccaccccccctggggttccaggtgggcatgaaattggaagccgttgaccggatgaaccccagcctggtctgcgtggcgagcgtaactgatgtggtggattcacggtttctggtacatttcgacaactgggatgacacatatgattattggtgtgacccatcgtcgccctatatccatcctgttggatggtgtcagaagcagggaaagcccctgacacctccacaagattaccccgacccagacaatttctgttgggagaaatatctggaagagacgggcgcttctgccgtgcccacctgggcctttaaggtgcgtcccccccattcctttctcgtaaatatgaaactcgaagccgtggataggagaaaccctgcattgattcgcgtggcttcagtggaggacgtggaagaccaccgtattaagatccacttcgacggatggagccatggatacgatttttggattgacgctgatcatcccgatattcaccctgcagggtggtgttcgaaaactggccacccactgcaacctcctctggggccgcgcgagccttcgagtgcgtccccaggggggtgtcctcctctatcgtatcggagtctccctcataccagaacctccaaatattccttccaccatagaaagtgtcccactcccggctgtgacggaagcgggcacgtgactgggaaattcacagcccatcactgcctttctggatgtcccctggctgagcgaaaccaatctaggctgaaagccgaattaagtgatagcgaggcgagcgccagaaaaaagaatctgtctgggttctctccacggaaaaaaccccgccaccatggcaggatcggtcggccaccaaaatacaggaaaataccgcaagaggactttcaaacactcactccggacgtggtccaccagtctttattcatgtctgcattgtcagcgcaccccgaccgctccctctccgtctgttgggaacagcattgcaaactgctcccaggggtggccggaattagcgcgtcgaccgtggcaaagtggaccattgatgaggtctttggcttcgtccagacactaaccggctgcgaggaccaagccaggctcttcaaagacgaggcacgcattgtccgagtgacccacgtttctgggaagaccctcgtgtggacagtggctcagctgggagatctggtgtgctctgatcacctgcaggaaggcaaaggcattctcgagaccggagtgcacagcctgttatgttcactgcctacccacttattagccaaactgtccttcgccagtgactcgcagtattag

SEQ ID NO: 186966 - DNA, 255 bp, Artificial Sequence
  derived and/or modified sequence
atggccggagtggaacagcctccatcccctgaactgaggcaggagggagtaacagaatatgaagatggaggtgcccccgctggggacggggaggctgggccccagcaggccgaggaccatccccagaatcctcctgaggatcccaatcaggacccccccgaggatgactcaacctgtcagtgccaagcctgcggacctcaccaggcagcaggcccagatttgggtagctctaatgatggttgccctcagctctag

SEQ ID NO: 186967 - DNA, 2217 bp, Artificial Sequence
  derived and/or modified sequence
atgcggcgccgcgaaggacatggcacagattctgaaatgggacagggaccagtaagagagtctcagtcttccgatccgcccgctttgcaatttcgtatctctgaatataaaccgctgaacatggctggagtcgaacagccacccagtcccgagctccgacaggagggcgttactgagtatgaagacggtggagcccctgccggagatggagaggccgggcctcagcaggccgaagaccatccccagaatccacccgaagatcctaaccaggatcctccagaagatgacagcacttgccaatgtcaagcttgtggtccccatcaggcagctggcccggacctgggcagctccaacgatggctgtcctcaactctttcaggaaaggtcagtgatcgtggagaatagttcaggatccacgtccgcctcagaactattgaagcccatgaaaaagagaaaacgacgagaatatcagtccccatcagaggaagagtccgagcctgaggccatggagaaacaggaggagggcaaggaccctgaggggcaacccacagcatcaacccctgagtccgaggaatggtcctctagccaaccggcaacaggggaaaagaaggagtgttggtcttgggagtcttacctggaagagcagaaagcaattacggcgcccgtgagcttgtttcaggattcccaggctgtgacgcacaacaaaaacgggtttaagctaggcatgaagctcgagggaatcgatccccagcaccccagtatgtacttcattctgaccgtggcggaggtttgcgggtaccgcttacggctacatttcgatggatactctgagtgtcacgacttctgggtgaatgccaattcccccgacattcatcccgcaggctggttcgaaaagaccggccacaaactacagcctccgaaaggttataaggaggaagaattttcgtggtcccagtacctgagaagcacccgcgcacaggccgcacctaagcacctgttcgtgtcccagtcccattctccgccaccacttgggtttcaagtaggcatgaaacttgaggctgtagacaggatgaaccctagtctcgtgtgcgtcgcatcagtgaccgacgttgtcgactcacgcttcttggtgcattttgacaactgggacgacacatatgattactggtgcgacccatccagcccatacattcaccccgtgggttggtgccagaagcagggcaaacctctcaccccgcctcaggattacccagatcctgacaacttctgttgggaaaaatatctggaagagacaggggcatcggctgtacctacctgggcctttaaagtgagacctccccacagtttcctggttaacatgaagctcgaagctgtagaccgccgtaatcccgccctgataagggtcgccagcgtggaggacgtggaagaccaccgaataaaaatccattttgatggatggagtcacggctatgatttttggatagatgctgaccatccagatatccaccctgcaggctggtgctcaaaaaccggccatccattgcaaccccccttgggtcccagagagccctcttctgcgagccccgggggctgccccccgctgtcgtacaggagcctcccacacactcggaccagtaagtactcttttcatcatagaaagtgccccacacctggctgcgatgggagcggtcatgtaaccggaaaattcactgctcatcactgtctttcaggctgcccactggccgaaaggaaccagagtcgcctgaaggcagaactatcggatagcgaggcctccgcgcgcaagaaaaatttatcaggcttttccccccggaagaagcctcggcatcacggccgaattggtcggccgcccaagtaccgcaagattccgcaggaagacttccaaacactcaccccagacgttgtgcatcagagtctattcatgagtgcgctatctgcccatcctgaccggagtctgagcgtttgctgggaacagcattgtaaactgcttcccggcgtcgccggtatttctgcctcaactgtagccaagtggacgatcgatgaagtattcggattcgtccagacattaactgggtgtgaagatcaggcaagactgtttaaagacgaggtcagatgcaagtgccgagtgggcgacagggccggtgttaccgtgctgaagactgctggctcccgttgcccgccccaaaggcatttctgctag

SEQ ID NO: 186968 - DNA, 870 bp, Artificial Sequence
  derived and/or modified sequence
tagaccagcggcagcatgccaacaccgttaactttcacgctactcgccggctccaggcgacgggcgacatcctgtagcttacctaaaagcccccctcccctgggattccaagtgggtatgaaattggaggctgtcgacaggatgaatccctctctcgtttgtgtggcttccgtgacagacgttgtagatagtcgatttctggtccatttcgataattgggacgatacctacgactattggtgtgaccctagttccccgtacatccatcctgtgggatggtgccagaagcagggcaagcctttaaccccgccacaggactatccggacccggacaatttttgttgggagaagtacctagaagaaactggggcaagtgctgtccctacatgggcgttcaaggtccgccccccacacagttttctggtcaatatgaagctagaagcagttgaccggcgcaaccccgccctgatccgggttgctagtgttgaggatgttgaagaccacaggattaaaattcacttcgatggctggagccatggctatgatttttggattgatgccgaccacccggacattcaccccgccggatggtgcagtaaaactggccatcccctgcaacctcctctgggcccccgggagcctagttctgcctctccagggggctgtcccccacttagctatcgctcacttccccacacccgaacctccaaatactcattccaccaccgcaagtgtcctacccctggttgcgacgggtctggccatgttacaggaaagtttacggctcaccactgcctttcaggctgtcccttggctgaacgtaatcaatcccgtctgaaggctgaactttcggactctgaagcgtcttag

SEQ ID NO: 186969 - DNA, 3288 bp, Artificial Sequence
  derived and/or modified sequence
cagaagggagctcatgtgctggttctctcagctttgttctgatctctcatatcagatgggaggggtacagctgggcagggtccagggccagagatgggaagctggttataggtttttcccgacttccctccctcctttgctactgcagataccctgtcctcacatccccttggagcccctggcccactaccctagtctgagcactgagatgtcattgctcatatattcttgctttggcttgctctgcagttctttggtgtaaggtcaatgcctctattctgggagcttctttttctttccttttgcccaacattgagactcttccatttatttccaacaattcatcccttgtcctttcctctgttcagggcagctggcagcttatccagcagttaaagtatctcataatcccaaccaaaaggcctaagagatacagggagcctccattaaaaatatcatactggaccaggtgtggcggctcatgcctgtaatcccagcactttgggaggctgaggcgggtggatcacctgaggtcaggagttcaagactagcctgggcaacatggtgaaacccccatctctactaaaaatataaaaaattagctgggcgtggtggtgggtgtctgtaatcccagttactcaggatgctgaggcaggagaatcgcttgaacctggggggcggaagttgcagtgagccaagatcacgccattgcactccggtctcagcaacaagaacgaaactccgtctcaaaaaaaagaagtatgtatcagtcttactggctgggtgcggtggctcacacctgtaattccagtactttgggaggctgaggcgggaggatcacttgagcccaggagtttgagaccagcgtaggcaacatagtgagaccccatctgtacaaaaaatgtcattaaattattagctgggcatggtgcatgtgcctgtagtcctagataccacagtagctagctgagctgggaggattgtttgagcccaggaattcaaggctacagcaagctatgattgtaccactgtaccccagcctgggcgacagagtgagaccctgtgtctaaagaaaaaaaaccatattgaatgtctagagtttccctgggcccaggactccaccatgctcttcaggcagagacagttactcccctaccccagtccagccccagagttcatacttgcaagttcccaggtgacaggtggggtcctgcctgctgttgtgacaacgaatgccgacttttaattcaaactatttaaatactggccccgccgttgactagcattgtgttctgggccaagtgatttaacttcttaaatgggaatagggttgttgtaaaggtccaaggaggtgatgtcttttgaagcttacatggcaggtactcagtttatactggttccctgtctgcctctatgccatagatgtccgctgtttcttcccagccaccccactgttgccacaactgcctcaggacaagctgggaagggcttgtctgggtagggaagatttatacttggttcaccaggttctttgggcgaacgcatagcctccttccaggcacttaccttctgacacaagccaggcctctgagtgcaccttggaggccagaggttcctgagtgcctcagggctcaggttatgattctgccctggagggccctctttcccagcttatttctccttcctttctcactgcccacaccccaggctttcctagagaacctattcctttgtttgccaatgggctctgggctggtcttagccagcttggccctggccgtggcagctcctttttttcccctagagtcccccacccctgggcttccaggtgggcatgaagctggaggctgttgaccgcatgaacccgtcccttgtctgcgtggccagtgtgaccgatgtggtggacagccgcttcctggtgcactttgacaactgggatgatacttatgactactggtgtgatcccagcagcccctacatccacccagtgggctggtgccagaagcaaggaaagcccctcacccctccacaagactacccagaccctgataacttctgttgggagaaatatctggaagaaactggggcctctgctgtccccacctgggccttcaaggtgcgaccccctcacagcttcctggtcaatatgaagctggaggctgtggaccgcaggaacccagccctgattcgcgtggccagcgtggaggatgtggaggaccatcggataaagatccactttgatggctggagtcatggctatgatttctggatcgacgctgaccacccagacatccaccctgccggctggtgctccaagacaggacatcccctgcagcctcctctcggacccagagagcccagctctgcctcccctgggggctgtccccctctcagctataggagcctgccccacactaggacctccaaatacagctttcaccaccggaagtgccccactcctggttgcgacggctctggccatgtcacaggcaagttcacagctcaccattgcctctcaggctgcccactggctgagaggaaccagagccggctgaaagcggagctgtctgactcggaggcctcagcccgcaagaagaacctctcaggcttctccccaaggaagaagcctcgccatcacggccgaattggacgccctccgaagtatcgaaagattccgcaggaagatttccagaccctcacgcccgatgtcgtgcaccagtccctcttcatgtcagccctgtcggcccaccctgaccgctcactctcagtgtgctgggagcagcactgcaagctcctgccaggagtagcgggcatctcagcctcgacagtcgccaagtggaccatcgatgaggtcttcggctttgttcagaccctgacaggttgtgaggaccaagcacgcctcttcaaagacgaggtaaggtgcaagtgcagagtgggagacagagccggggtcactgtccttaagacggcaggaagcaggtgccctccccagcgtcacttctgctaaggagggacccgtgttgccccaccaggcaagaatagtcagagtgacccatgtatctgggaagactctagtctggactgtggcccagcttggggaccttgtgtgctcagatcatcttcaggaaggaaaaggcatcctggagacaggagtccattcactcctctgctctctacccactcatttgcttgccaaacttagctttgccagtgatagtcaatattaaagtgtacttttttcccctttaatccaatatagttgataattaaagtgtattttgaatgaca

SEQ ID NO: 186970 - DNA, 2532 bp, Artificial Sequence
  derived and/or modified sequence
gctgagggcgtgagctggcatgaggcgaagagagggccatggcaccgactccgagatgggtcaaggacccgtacgggagtcgcaatcctcagaccctcccgcgctccagttccggataagcgagtataagccgctgaacatggcgggagtggagcagcccccgagccccgagctgcggcaggaaggcgtgaccgaatacgaagatggcggggccccggcgggagatggcgaggcgggcccccaacaggcggaggaccacccccagaatcctccagaagatcccaatcaggaccccccagaggatgatagcacctgtcagtgccaggcgtgcgggcctcaccaagccgcgggtccagatcttggttcctctaatgatggctgccctcagctgttccaggagcggtcagtcatagtggagaactcctcaggctctaccagcgcttctgagctcctcaaacccatgaagaagaggaagcgcagggaataccagagcccatcagaggaggagtcggagccagaggccatggagaagcaagaagaaggaaaggacccagagggacaacccactgctagcaccccagagagtgaggagtggagcagcagccagcctgcaacaggtgagaagaaggaatgctggtcgtgggagtcctacctagaggagcagaaggccattactgctccagtcagcctcttccaggactcccaggcagtcactcacaacaagaatggcttcaaactgggcatgaagttggaaggcattgaccctcaacacccgtccatgtacttcatcctcaccgtggctgaggtatgtggctatcgcctacgcctgcactttgatgggtattctgagtgccatgacttctgggtcaatgccaactcccctgacattcaccctgctggctggttcgagaagacgggccacaagctgcagcctcccaaaggttacaaggaggaggagttcagctggagccagtacctgcgcagcacaagagctcaggctgcccccaagcacctgtttgtgagccagagccacagtcccccacccctgggcttccaggtgggcatgaagctggaggctgttgaccgcatgaacccgtcccttgtctgcgtggccagtgtgaccgatgtggtggacagccgcttcctggtgcactttgacaactgggatgatacttatgactactggtgtgatcccagcagcccctacatccacccagtgggctggtgccagaagcaaggaaagcccctcacccctccacaagactacccagaccctgataacttctgttgggagaaatatctggaagaaactggggcctctgctgtccccacctgggccttcaaggtgcgaccccctcacagcttcctggtcaatatgaagctggaggctgtggaccgcaggaacccagccctgattcgcgtggccagcgtggaggatgtggaggaccatcggataaagatccactttgatggctggagtcatggctatgatttctggatcgacgctgaccacccagacatccaccctgccggctggtgctccaagacaggacatcccctgcagcctcctctcggacccagagagcccagctctgcctcccctgggggctgtccccctctcagctataggagcctgccccacactaggacctccaaatacagctttcaccaccgtctcttcttccccaggaagtgccccactcctggttgcgacggctctggccatgtcacaggcaagttcacagctcaccattgcctctcaggctgcccactggctgagaggaaccagagccggctgaaagcggagctgtctgactcggaggcctcagcccgcaagaagaacctctcaggcttctccccaaggaagaagcctcgccatcacggccgaattggacgccctccgaagtatcgaaagattccgcaggaagatttccagaccctcacgcccgatgtcgtgcaccagtccctcttcatgtcagccctgtcggcccaccctgaccgctcactctcagtgtgctgggagcagcactgcaagctcctgccaggagtagcgggcatctcagcctcgacagtcgccaagtggaccatcgatgaggtcttcggctttgttcagaccctgacaggttgtgaggaccaagcacgcctcttcaaagacgaggtaaggtgcaagtgcagagtgggagacagagccggggtcactgtccttaagacggcaggaagcaggtgccctccccagcgtcacttctgctaaggagggacccgtgttgccccaccaggcaagaatagtcagagtgacccatgtatctgggaagactctagtctggactgtggcccagcttggggaccttgtgtgctcagatcatcttcaggaaggaaaaggcatcctggagacaggagtccattcactcctctgctctctacccactcatttgcttgccaaacttagctttgccagtgatagtcaatattaaagtgtacttttttcccctttaatccaatatagttgataattaaagtgtattttgaatgaca

SEQ ID NO: 186971 - DNA, 3218 bp, Artificial Sequence
  derived and/or modified sequence
agagtggggcaccctgggactggaccccgcaggtgcttgggggcgtagcctggagtgagggtttggctggtgtagcttggagtgaggccccctggcgtggagtcttgaggcctgctgagggcgtgagctggcatgaggcgaagagagggccatggcaccgactccgagatgggtcaaggacccgtacgggagtcgcaatcctcagaccctcccgcgctccagttccggataagcgagtataagccgctgaacatggcgggagtggagcagcccccgagccccgagctgcggcaggaaggcgtgaccgaatacgaagatggcggggccccggcgggagatggcgaggcgggcccccaacaggcggaggaccacccccagaatcctccagaagatcccaatcaggaccccccagaggatgatagcacctgtcagtgccaggcgtgcgggcctcaccaagccgcgggtccagatcttggttcctctaatgatggctgccctcagctgttccaggagcggtcagtcatagtggagaactcctcaggctctaccagcgcttctgagctcctcaaacccatgaagaagaggaagcgcagggaataccagagcccatcagaggaggagtcggagccagaggccatggagaagcaagaagaaggaaaggacccagagggacaacccactgctagcaccccagagagtgaggagtggagcagcagccagcctgcaacaggtgagaagaaggaatgctggtcgtgggagtcctacctagaggagcagaaggccattactgctccagtcagcctcttccaggactcccaggcagtcactcacaacaagaatggcttcaaactgggcatgaagttggaaggcattgaccctcaacacccgtccatgtacttcatcctcaccgtggctgaggtatgtggctatcgcctacgcctgcactttgatgggtattctgagtgccatgacttctgggtcaatgccaactcccctgacattcaccctgctggctggttcgagaagacgggccacaagctgcagcctcccaaaggttacaaggaggaggagttcagctggagccagtacctgcgcagcacaagagctcaggctgcccccaagcacctgtttgtgagccagagccacagtcccccacccctgggcttccaggtgggcatgaagctggaggctgttgaccgcatgaacccgtcccttgtctgcgtggccagtgtgaccgatgtggtggacagccgcttcctggtgcactttgacaactgggatgatacttatgactactggtgtgatcccagcagcccctacatccacccagtgggctggtgccagaagcaaggaaagcccctcacccctccacaagactacccagaccctgataacttctgttgggagaaatatctggaagaaactggggcctctgctgtccccacctgggccttcaaggtgcgaccccctcacagcttcctggtcaatatgaagctggaggctgtggaccgcaggaacccagccctgattcgcgtggccagcgtggaggatgtggaggaccatcggataaagatccactttgatggctggagtcatggctatgatttctggatcgacgctgaccacccagacatccaccctgccggctggtgctccaagacaggacatcccctgcagcctcctctcggacccagagagcccagctctgcctcccctgggggctgtccccctctcagctataggagcctgccccacactaggacctccaaatacagctttcaccaccggaagtgccccactcctggttgcgacggctctggccatgtcacaggcaagttcacagctcaccattgcctctcaggctgcccactggctgagaggaaccagagccggctgaaagcggagctgtctgactcggaggcctcagcccgcaagaagaacctctcaggcttctccccaaggaagaagcctcgccatcacggccgaattggacgccctccgaagtatcgaaagattccgcaggaagatttccagaccctcacgcccgatgtcgtgcaccagtccctcttcatgtcagccctgtcggcccaccctgaccgctcactctcagtgtgctgggagcagcactgcaagctcctgccaggagtagcgggcatctcagcctcgacagtcgccaagtggaccatcgatgaggtcttcggctttgttcagaccctgacaggttgtgaggaccaagcacgcctcttcaaagacgaggcaagaatagtcagagtgacccatgtatctgggaagactctagtctggactgtggcccagcttggggaccttgtgtgctcagatcatcttcaggaaggaaaaggcatcctggagacaggagtccattcactcctctgctctctacccactcatttgcttgccaaacttagctttgccagtgatagtcaatattaaagtgtacttttttcccctttaatccaatatagttgataattaaagtgtattttgaatgacacagatattgtgatttactgcaaggatcctaacacacacttaaaatcaagagccaaggagtagtgagttgtagataaaaaaagaatgtcagctttggagacagtctgggtttaaatcccagttctgtcaatttgagctgtttactgtctctgagcctacatcttcttgtctgtaaaatggagataaaatgggtttaatgaggtctaccttgcagagccattgtgagcattggaaatgatgaatgaatcataccagaacgtctagtataattacagtcatgcattgcttaacgatggggatacattcttagaaatgtgtcactaggcaattctgtcattgtgtaaacattatagaatgtacttacacaaacctagatgttatatgtatttttatttacatgtatattttcacatgaaataccaaatgtcacagcattattactgaatgtcagtcatttcccctacttgatctgcaatgccaatatcaagggccatgtatcaggtttctgtatatgttccactataatcttatgggaccatggttttaaatgtggaatcattgacagaaatgtctttatgtagcatatggctgtgtatcactagtatataatagagcaatattatggaggaatatgtagatccaatcactttacctatacaaaatgactgctatggtgggaacacaataaacaccagttttgactttta

SEQ ID NO: 186972 - DNA, 3335 bp, Artificial Sequence
  derived and/or modified sequence
agagtggggcaccctgggactggaccccgcaggtgcttgggggcgtagcctggagtgagggtttggctggtgtagcttggagtgaggccccctggcgtggagtcttgaggcctgctgagggcgtgagctggcatgaggcgaagagagggccatggcaccgactccgagatgggtcaaggacccgtacgggagtcgcaatcctcagaccctcccgcgctccagttccggataagcgagtataagccgctgaacatggcgggagtggagcagcccccgagccccgagctgcggcaggaaggcgtgaccgaatacgaagatggcggggccccggcgggagatggcgaggcgggcccccaacaggcggaggaccacccccagaatcctccagaagatcccaatcaggaccccccagaggatgatagcacctgtcagtgccaggcgtgcgggcctcaccaagccgcgggtccagatcttggttcctctaatgatggctgccctcagctgttccaggagcggtcagtcatagtggagaactcctcaggctctaccagcgcttctgagctcctcaaacccatgaagaagaggaagcgcagggaataccagagcccatcagaggaggagtcggagccagaggccatggagaagcaagaagaaggaaaggacccagagggacaacccactgctagcaccccagagagtgaggagtggagcagcagccagcctgcaacaggtgagaagaaggaatgctggtcgtgggagtcctacctagaggagcagaaggccattactgctccagtcagcctcttccaggactcccaggcagtcactcacaacaagaatggcttcaaactgggcatgaagttggaaggcattgaccctcaacacccgtccatgtacttcatcctcaccgtggctgaggtatgtggctatcgcctacgcctgcactttgatgggtattctgagtgccatgacttctgggtcaatgccaactcccctgacattcaccctgctggctggttcgagaagacgggccacaagctgcagcctcccaaaggttacaaggaggaggagttcagctggagccagtacctgcgcagcacaagagctcaggctgcccccaagcacctgtttgtgagccagagccacagtcccccacccctgggcttccaggtgggcatgaagctggaggctgttgaccgcatgaacccgtcccttgtctgcgtggccagtgtgaccgatgtggtggacagccgcttcctggtgcactttgacaactgggatgatacttatgactactggtgtgatcccagcagcccctacatccacccagtgggctggtgccagaagcaaggaaagcccctcacccctccacaagactacccagaccctgataacttctgttgggagaaatatctggaagaaactggggcctctgctgtccccacctgggccttcaaggtgcgaccccctcacagcttcctggtcaatatgaagctggaggctgtggaccgcaggaacccagccctgattcgcgtggccagcgtggaggatgtggaggaccatcggataaagatccactttgatggctggagtcatggctatgatttctggatcgacgctgaccacccagacatccaccctgccggctggtgctccaagacaggacatcccctgcagcctcctctcggacccagagagcccagctctgcctcccctgggggctgtccccctctcagctataggagcctgccccacactaggacctccaaatacagctttcaccaccggaagtgccccactcctggttgcgacggctctggccatgtcacaggcaagttcacagctcaccattgcctctcaggctgcccactggctgagaggaaccagagccggctgaaagcggagctgtctgactcggaggcctcagcccgcaagaagaacctctcaggcttctccccaaggaagaagcctcgccatcacggccgaattggacgccctccgaagtatcgaaagattccgcaggaagatttccagaccctcacgcccgatgtcgtgcaccagtccctcttcatgtcagccctgtcggcccaccctgaccgctcactctcagtgtgctgggagcagcactgcaagctcctgccaggagtagcgggcatctcagcctcgacagtcgccaagtggaccatcgatgaggtcttcggctttgttcagaccctgacaggttgtgaggaccaagcacgcctcttcaaagacgaggtaaggtgcaagtgcagagtgggagacagagccggggtcactgtccttaagacggcaggaagcaggtgccctccccagcgtcacttctgctaaggagggacccgtgttgccccaccaggcaagaatagtcagagtgacccatgtatctgggaagactctagtctggactgtggcccagcttggggaccttgtgtgctcagatcatcttcaggaaggaaaaggcatcctggagacaggagtccattcactcctctgctctctacccactcatttgcttgccaaacttagctttgccagtgatagtcaatattaaagtgtacttttttcccctttaatccaatatagttgataattaaagtgtattttgaatgacacagatattgtgatttactgcaaggatcctaacacacacttaaaatcaagagccaaggagtagtgagttgtagataaaaaaagaatgtcagctttggagacagtctgggtttaaatcccagttctgtcaatttgagctgtttactgtctctgagcctacatcttcttgtctgtaaaatggagataaaatgggtttaatgaggtctaccttgcagagccattgtgagcattggaaatgatgaatgaatcataccagaacgtctagtataattacagtcatgcattgcttaacgatggggatacattcttagaaatgtgtcactaggcaattctgtcattgtgtaaacattatagaatgtacttacacaaacctagatgttatatgtatttttatttacatgtatattttcacatgaaataccaaatgtcacagcattattactgaatgtcagtcatttcccctacttgatctgcaatgccaatatcaagggccatgtatcaggtttctgtatatgttccactataatcttatgggaccatggttttaaatgtggaatcattgacagaaatgtctttatgtagcatatggctgtgtatcactagtatataatagagcaatattatggaggaatatgtagatccaatcactttacctatacaaaatgactgctatggtgggaacacaataaacaccagttttgactttt

SEQ ID NO: 186973 - DNA, 865 bp, Artificial Sequence
  derived and/or modified sequence
tgacttctgggtcaatgccaactcccctgacattcaccctgctggctggttcgagaagacgggccacaagctgcagcctcccaaagagtcccccacccctgggcttccaggtgggcatgaagctggaggctgttgaccgcatgaacccgtcccttgtctgcgtggccagtgtgaccgatgtggtggacagccgcttcctggtgcactttgacaactgggatgatacttatgactactggtgtgatcccagcagcccctacatccacccagtgggctggtgccagaagcaaggaaagcccctcacccctccacaagactacccagaccctgataacttctgttgggagaaatatctggaagaaactggggcctctgctgtccccacctgggccttcaaggtgcgaccccctcacagcttcctggtcaatatgaagctggaggctgtggaccgcaggaacccagccctgattcgcgtggccagcgtggaggatgtggaggaccatcggataaagatccactttgatggctggagtcatggctatgatttctggatcgacgctgaccacccagacatccaccctgccggctggtgctccaagacaggacatcccctgcagcctcctctcggacccagagagcccagctctgcctcccctgggggctgtccccctctcagctataggagcctgccccacactaggacctccaaatacagctttcaccaccggaagtgccccactcctggttgcgacggctctggccatgtcacaggcaagttcacagctcaccattgcctctcaggctgcccactggctgagaggaaccagagccggctgaaagcggagctgtctgactcggaggcctc

SEQ ID NO: 186974 - DNA, 1173 bp, Artificial Sequence
  derived and/or modified sequence
atgaagctggaggccgtggacaggatgaaccccagcctggtgtgtgtggcctctgtgacagatgtggtggacagccgcttcctggtgcactttgacaactgggatgacacctatgactactggtgtgaccccagcagcccctacatccaccctgtgggctggtgccagaagcagggcaagcccctgaccccaccccaggactacccagaccctgacaacttctgctgggagaagtacctggaggagactggagccagcgctgtgcccacctgggccttcaaggtgcggcccccccacagcttcctggtgaacatgaagctggaggccgtggacagaagaaatcctgccctgatccgggtggcctctgtggaggatgtggaggaccaccgcatcaagatccactttgatggctggagccacggctatgacttctggattgatgctgaccacccagacatccaccctgctggctggtgcagcaagacaggccaccccctgcagccccccctgggcccccgggagcccagcagcgccagccctgggggctgcccccccctgagctaccgcagcctgccccacaccaggaccagcaagtacagcttccaccacaggaaatgtcccaccccaggctgtgatggcagcggccacgtgacaggcaagttcaccgcccaccactgcctgagcggctgccccctggccgagaggaaccagagccggctgaaggccgagctgagtgacagcgaggccagcgccaggaagaagaacctgagcggcttcagccccaggaagaagcccaggcaccacggcagaattggccggccccccaagtacaggaagatcccccaggaggacttccagaccctgaccccagatgtggtgcaccagagcctcttcatgtctgccctgagcgcccacccagacaggagcctgtctgtgtgctgggagcagcactgcaagctgctgcccggggtggccggcatcagcgccagcacagtggccaagtggaccattgatgaggtgtttggatttgtgcagaccctgaccggctgtgaggaccaggcccggctcttcaaggatgaggtgcgctgcaagtgccgggtgggggacagagctggggtgacagtgctgaagacagctggcagccgctgccccccccagaggcacttctgctag

SEQ ID NO: 186975 - DNA, 2232 bp, Artificial Sequence
  derived and/or modified sequence
atgagaagaagagagggccatggaacagattctgagatgggccagggccctgtgcgggagagccagagcagtgaccccccagccctgcagttccgcatcagcgagtacaagcccctgaacatggccggcgtggagcagccccccagccctgagctgcggcaggagggcgtgacagaatatgaagatggaggagccccagctggagatggagaggccggcccccagcaggccgaggaccacccccagaaccccccagaggaccccaaccaggaccccccagaagatgacagcacctgccagtgccaggcctgtggcccccaccaggccgccggccctgacctgggcagcagcaatgatggctgcccccagctgttccaggagaggtctgtgattgtggagaacagcagcggcagcaccagcgccagcgagctgctgaagcccatgaagaagaggaagagaagagagtaccagagccccagcgaggaggagagcgagcctgaggccatggagaagcaggaggagggcaaggaccctgagggccagcccacagccagcaccccagagagcgaggagtggagcagcagccagcctgccactggagagaagaaggagtgctggagctgggagagctacctggaggagcagaaggccatcacagcccctgtgtccctcttccaggacagccaggccgtgacccacaacaagaatggcttcaagctgggcatgaagctggagggcatcgacccccagcaccccagcatgtacttcatcctgactgtggccgaggtgtgtggctaccgcctgcggctgcactttgatggctacagtgaatgtcatgacttctgggtgaatgccaacagcccagacatccaccctgctggctggtttgagaagacaggccacaagctgcagccccccaagggctacaaggaggaggagttctcctggagccagtacctgcggagcacccgggcccaggccgcccccaagcacctgtttgtgtcccagagccacagccccccacccctgggcttccaggtgggcatgaagctggaggccgtggacaggatgaaccccagcctggtgtgtgtggcctctgtgacagatgtggtggacagccgcttcctggtgcactttgacaactgggatgacacctatgactactggtgtgaccccagcagcccctacatccaccctgtgggctggtgccagaagcagggcaagcccctgaccccaccccaggactacccagaccctgacaacttctgctgggagaagtacctggaggagactggagccagcgctgtgcccacctgggccttcaaggtgcggcccccccacagcttcctggtgaacatgaagctggaggccgtggacagaagaaatcctgccctgatccgggtggcctctgtggaggatgtggaggaccaccgcatcaagatccactttgatggctggagccacggctatgacttctggattgatgctgaccacccagacatccaccctgctggctggtgcagcaagacaggccaccccctgcagccccccctgggcccccgggagcccagcagcgccagccctgggggctgcccccccctgagctaccgcagcctgccccacaccaggaccagcaagtacagcttccaccacaggctcttcttccccaggaagtgccccaccccaggctgtgatggcagcggccacgtgacaggcaagttcaccgcccaccactgcctgagcggctgccccctggccgagaggaaccagagccggctgaaggccgagctgagtgacagcgaggccagcgccaggaagaagaacctgagcggcttcagccccaggaagaagcccaggcaccacggccgcatcggccggccccccaagtacaggaagatcccccaggaggacttccagaccctgaccccagatgtggtgcaccagagcctcttcatgtctgccctgagcgcccacccagacaggagcctgtctgtgtgctgggagcagcactgcaagctgctgcccggggtggccggcatcagcgccagcacagtggccaagtggaccattgatgaggtgtttggatttgtgcagaccctgaccggctgtgaggaccaggcccggctcttcaaggatgaggtgcgctgcaagtgccgggtgggggaccgggccggcgtgacagtgctgaagacagctggcagccgctgccccccccagaggcacttctgctag

SEQ ID NO: 186976 - DNA, 2319 bp, Artificial Sequence
  derived and/or modified sequence
atgagaagaagagagggccatggaacagattctgagatgggccagggccctgtgcgggagagccagagcagtgaccccccagccctgcagttccgcatcagcgagtacaagcccctgaacatggccggcgtggagcagccccccagccctgagctgcggcaggagggcgtgacagaatatgaagatggaggagccccagctggagatggagaggccggcccccagcaggccgaggaccacccccagaaccccccagaggaccccaaccaggaccccccagaagatgacagcacctgccagtgccaggcctgtggcccccaccaggccgccggccctgacctgggcagcagcaatgatggctgcccccagctgttccaggagaggtctgtgattgtggagaacagcagcggcagcaccagcgccagcgagctgctgaagcccatgaagaagaggaagagaagagagtaccagagccccagcgaggaggagagcgagcctgaggccatggagaagcaggaggagggcaaggaccctgagggccagcccacagccagcaccccagagagcgaggagtggagcagcagccagcctgccactggagagaagaaggagtgctggagctgggagagctacctggaggagcagaaggccatcacagcccctgtgtccctcttccaggacagccaggccgtgacccacaacaagaatggcttcaagctgggcatgaagctggagggcatcgacccccagcaccccagcatgtacttcatcctgactgtggccgaggtgtgtggctaccgcctgcggctgcactttgatggctacagtgaatgtcatgacttctgggtgaatgccaacagcccagacatccaccctgctggctggtttgagaagacaggccacaagctgcagccccccaagggctacaaggaggaggagttctcctggagccagtacctgcggagcacccgggcccaggccgcccccaagcacctgtttgtgtcccagagccacagccccccacccctgggcttccaggtgggcatgaagctggaggccgtggacaggatgaaccccagcctggtgtgtgtggcctctgtgacagatgtggtggacagccgcttcctggtgcactttgacaactgggatgacacctatgactactggtgtgaccccagcagcccctacatccaccctgtgggctggtgccagaagcagggcaagcccctgaccccaccccaggactacccagaccctgacaacttctgctgggagaagtacctggaggagactggagccagcgctgtgcccacctgggccttcaaggtgcggcccccccacagcttcctggtgaacatgaagctggaggccgtggacagaagaaatcctgccctgatccgggtggcctctgtggaggatgtggaggaccaccgcatcaagatccactttgatggctggagccacggctatgacttctggattgatgctgaccacccagacatccaccctgctggctggtgcagcaagacaggccaccccctgcagccccccctgggcccccgggagcccagcagcgccagccctgggggctgcccccccctgagctaccgcagcctgccccacaccaggaccagcaagtacagcttccaccacaggaaatgtcccaccccaggctgtgatggcagcggccacgtgacaggcaagttcaccgcccaccactgcctgagcggctgccccctggccgagaggaaccagagccggctgaaggccgagctgagtgacagcgaggccagcgccaggaagaagaacctgagcggcttcagccccaggaagaagcccaggcaccacggcagaattggccggccccccaagtacaggaagatcccccaggaggacttccagaccctgaccccagatgtggtgcaccagagcctcttcatgtctgccctgagcgcccacccagacaggagcctgtctgtgtgctgggagcagcactgcaagctgctgcccggggtggccggcatcagcgccagcacagtggccaagtggaccattgatgaggtgtttggatttgtgcagaccctgaccggctgtgaggaccaggcccggctcttcaaggatgaggccagaattgtgcgggtgacccacgtgtctgggaagaccctggtgtggacagtggcccagctgggggacctggtgtgcagcgaccacctgcaggagggcaagggcatcctggagactggagtgcacagcctgctgtgcagcctgcccacccacctgctggccaagctgagctttgccagtgacagccagtactag

SEQ ID NO: 186977 - DNA, 255 bp, Artificial Sequence
  derived and/or modified sequence
atggccggcgtggagcagccccccagccctgagctgcggcaggagggcgtgacagaatatgaagatggaggagccccagctggagatggagaggccggcccccagcaggccgaggaccacccccagaaccccccagaggaccccaaccaggaccccccagaagatgacagcacctgccagtgccaggcctgtggcccccaccaggccgccggccctgacctgggcagcagcaatgatggctgcccccagctgtag

SEQ ID NO: 186978 - DNA, 2217 bp, Artificial Sequence
  derived and/or modified sequence
atgagaagaagagagggccatggaacagattctgagatgggccagggccctgtgcgggagagccagagcagtgaccccccagccctgcagttccgcatcagcgagtacaagcccctgaacatggccggcgtggagcagccccccagccctgagctgcggcaggagggcgtgacagaatatgaagatggaggagccccagctggagatggagaggccggcccccagcaggccgaggaccacccccagaaccccccagaggaccccaaccaggaccccccagaagatgacagcacctgccagtgccaggcctgtggcccccaccaggccgccggccctgacctgggcagcagcaatgatggctgcccccagctgttccaggagaggtctgtgattgtggagaacagcagcggcagcaccagcgccagcgagctgctgaagcccatgaagaagaggaagagaagagagtaccagagccccagcgaggaggagagcgagcctgaggccatggagaagcaggaggagggcaaggaccctgagggccagcccacagccagcaccccagagagcgaggagtggagcagcagccagcctgccactggagagaagaaggagtgctggagctgggagagctacctggaggagcagaaggccatcacagcccctgtgtccctcttccaggacagccaggccgtgacccacaacaagaatggcttcaagctgggcatgaagctggagggcatcgacccccagcaccccagcatgtacttcatcctgactgtggccgaggtgtgtggctaccgcctgcggctgcactttgatggctacagtgaatgtcatgacttctgggtgaatgccaacagcccagacatccaccctgctggctggtttgagaagacaggccacaagctgcagccccccaagggctacaaggaggaggagttctcctggagccagtacctgcggagcacccgggcccaggccgcccccaagcacctgtttgtgtcccagagccacagccccccacccctgggcttccaggtgggcatgaagctggaggccgtggacaggatgaaccccagcctggtgtgtgtggcctctgtgacagatgtggtggacagccgcttcctggtgcactttgacaactgggatgacacctatgactactggtgtgaccccagcagcccctacatccaccctgtgggctggtgccagaagcagggcaagcccctgaccccaccccaggactacccagaccctgacaacttctgctgggagaagtacctggaggagactggagccagcgctgtgcccacctgggccttcaaggtgcggcccccccacagcttcctggtgaacatgaagctggaggccgtggacagaagaaatcctgccctgatccgggtggcctctgtggaggatgtggaggaccaccgcatcaagatccactttgatggctggagccacggctatgacttctggattgatgctgaccacccagacatccaccctgctggctggtgcagcaagacaggccaccccctgcagccccccctgggcccccgggagcccagcagcgccagccctgggggctgcccccccctgagctaccgcagcctgccccacaccaggaccagcaagtacagcttccaccacaggaaatgtcccaccccaggctgtgatggcagcggccacgtgacaggcaagttcaccgcccaccactgcctgagcggctgccccctggccgagaggaaccagagccggctgaaggccgagctgagtgacagcgaggccagcgccaggaagaagaacctgagcggcttcagccccaggaagaagcccaggcaccacggcagaattggccggccccccaagtacaggaagatcccccaggaggacttccagaccctgaccccagatgtggtgcaccagagcctcttcatgtctgccctgagcgcccacccagacaggagcctgtctgtgtgctgggagcagcactgcaagctgctgcccggggtggccggcatcagcgccagcacagtggccaagtggaccattgatgaggtgtttggatttgtgcagaccctgaccggctgtgaggaccaggcccggctcttcaaggatgaggtgcgctgcaagtgccgggtgggggacagagctggggtgacagtgctgaagacagctggcagccgctgccccccccagaggcacttctgctag

SEQ ID NO: 186979 - DNA, 870 bp, Artificial Sequence
  derived and/or modified sequence
tgaacatctggctccatgcccacccccctgaccttcaccctgctggccggcagcagaagaagagccaccagctgcagcctgcccaagagccccccacccctgggcttccaggtgggcatgaagctggaggccgtggacaggatgaaccccagcctggtgtgtgtggcctctgtgacagatgtggtggacagccgcttcctggtgcactttgacaactgggatgacacctatgactactggtgtgaccccagcagcccctacatccaccctgtgggctggtgccagaagcagggcaagcccctgaccccaccccaggactacccagaccctgacaacttctgctgggagaagtacctggaggagaccggggccagcgctgtgcccacctgggccttcaaggtgcggcccccccacagcttcctggtgaacatgaagctggaggccgtggacagaagaaatcctgccctgatccgggtggcctctgtggaggatgtggaggaccaccgcatcaagatccactttgatggctggagccacggctatgacttctggattgatgctgaccacccagacatccaccctgctggctggtgcagcaagacaggccaccccctgcagccccccctgggcccccgggagcccagcagcgccagccctgggggctgcccccccctgagctaccgcagcctgccccacaccaggaccagcaagtacagcttccaccacaggaagtgccccaccccaggctgtgatggcagcggccacgtgacaggcaagttcaccgcccaccactgcctgagcggctgccccctggccgagaggaaccagagccggctgaaggccgagctgagtgacagcgaggccagctag

SEQ ID NO: 186980 - DNA, 1173 bp, Artificial Sequence
  derived and/or modified sequence
atgaagctggaggccgtggaccggatgaaccccagcctggtgtgcgtggcctccgtgacagacgtggtggactcgagattcctagttcatttcgacaactgggatgacacttacgattattggtgtgacccaagcagcccctacattcaccccgtcggttggtgccagaaacaggggaagcccttgacaccccctcaagattatcctgaccccgacaacttttgttgggagaaatacctggaggagacaggtgcctccgcagtaccgacatgggcattcaaggtgcgcccgcctcacagttttctggtaaacatgaaactggaggcagtggaccgccgtaaccctgcccttatcagggttgcctccgtagaggacgttgaagatcaccggatcaaaattcactttgacgggtggtctcacggctacgacttctggatagatgcagatcatcccgacatccaccccgctggctggtgctccaagaccggtcacccgttgcagccaccactgggtccccgcgagccatcctccgcgagtcccggggggtgtcctccattgagttaccggtcactcccccacactcggacaagtaaatactcattccaccacaggaaatgccctaccccggggtgtgacggaagcggtcatgttactggaaaattcaccgcacatcactgcttgtctggctgtcctttggccgaacgtaatcagtcacgactgaaggcagagttgagcgactccgaagcctcagcccgaaagaagaacctgtccggcttctctcctcgcaaaaaacccagacatcacggaaggatcggccggcctccaaaatatcgcaaaattccacaggaggacttccagacactcacccctgatgtggttcaccagagcctctttatgtcagctctgagtgcccatccagaccgcagtctttcagtgtgctgggagcagcattgcaagctgttgcccggcgtcgctggcattagcgcatcaaccgtcgccaagtggacgatagacgaggtgtttggatttgttcagactcttaccggctgcgaagatcaagcaagacttttcaaggatgaggtgcggtgtaagtgccgcgtcggcgaccgggcgggtgtaacagtactcaaaaccgccgggtcccgatgtccacctcagcgccacttttgctag

SEQ ID NO: 186981 - DNA, 2232 bp, Artificial Sequence
  derived and/or modified sequence
atgcggcggcgggagggccacggcaccgacagcgagatgggccagggacctgtccgagagagtcagtcctcagaccctcccgccctccagtttcgaatcagcgagtataagccccttaatatggcaggcgtggagcagccaccgagccccgaattacgacaggaaggggtcacagaatacgaggacggcggcgctccagcgggagatggcgaggcaggaccccagcaggccgaggatcacccccagaaccccccagaagatccaaaccaggacccacctgaagatgattctacgtgtcaatgccaggcctgcggtccccaccaagctgctggacccgatttagggtcctccaatgatggttgcccccagctattccaagagcggtcggttatcgtcgagaactcatccggcagcacctcggcaagcgagctgctcaagcctatgaagaaacggaaaagaagggaataccagagtccgagcgaagaggaatccgaacctgaagccatggaaaaacaagaagagggcaaggatcctgagggccagcccaccgcatcaactcccgaatctgaggagtggtcctcctctcagcccgctacaggggaaaagaaggagtgttggagctgggaatcatacctcgaagagcagaaagccatcaccgcccctgtgtctctcttccaggactcccaagcggtcacccacaataagaatggttttaagctgggcatgaagctggaaggcattgacccacagcacccctctatgtacttcattttaactgtggcagaggtgtgcggctacaggctgcggctacattttgatggctatagcgagtgccacgatttttgggtgaacgctaactccccggacatccatcccgcagggtggttcgagaagacaggccataagttgcagcccccaaagggatacaaagaagaagaattcagctggtctcagtacctcagaagcaccagagcccaagccgcccccaaacacctgttcgtctcgcagagccacagccctccccccctgggctttcaggtggggatgaaactggaggcggtggatcgcatgaatccttccctcgtctgcgtggccagcgtcactgacgtggtggacagtcgatttctagtgcacttcgacaattgggatgacacatacgattactggtgcgacccttcaagtccatatatccaccccgtcggatggtgtcagaaacaggggaagccgttaaccccaccacaggactatccagatccggacaacttttgctgggaaaagtatctcgaggagaccggcgcatcagctgtgccaacatgggcctttaaggtgcgccctccccattcctttctcgttaacatgaaattggaggccgtcgacaggagaaaccctgccctgatccgcgtcgcctcagttgaggacgtggaagaccataggattaagattcactttgatggttggagccacgggtatgatttttggattgatgccgatcatcccgacatccatcccgctggctggtgctcaaaaactggccaccccctgcagcctcctttagggccccgggaaccttcaagcgcatcccctggcgggtgtccgcccctctcttaccgcagtctcccccacacacggacgtccaaatacagttttcatcacaggctgttcttccctaggaaatgcccaaccccaggctgcgatggctccggacatgtcactggaaagttcaccgcccaccattgtttgagtgggtgcccccttgctgaaaggaaccaatccaggctgaaggcagagctgtccgactccgaggcatctgccagaaaaaagaacctgtctgggttcagtcccaggaaaaaaccccgtcatcacggcagaatcggtcggccgcctaagtatcgaaagatcccccaggaggatttccagaccttgacccccgatgtagttcaccaatctctgtttatgagcgccctatccgctcacccagaccgctccttgtccgtgtgctgggaacagcattgtaagctccttccaggggtggcgggcatttctgcctcaacagtggctaagtggactattgacgaagtcttcggcttcgtgcagactctcactggctgcgaggaccaggccagactttttaaagatgaggtgagatgtaagtgccgggtgggcgacagagcaggagtgaccgttctgaaaacggccgggtctagatgtccaccacagcggcatttctgttag

SEQ ID NO: 186982 - DNA, 2319 bp, Artificial Sequence
  derived and/or modified sequence
atgcggcggcgggagggccacggcaccgacagcgagatgggccagggcccagtacgggagagccagagttcagaccctcccgccttgcaattccgtatcagcgagtacaagcccctgaacatggcaggggtagagcagcccccctctccagagttgagacaggagggtgtaaccgagtacgaggacgggggtgcacccgctggcgatggcgaagccggaccccagcaggctgaggaccacccacagaacccgccggaagacccaaatcaggaccccccagaggatgatagtacctgccaatgccaggcctgtggacctcatcaagccgctgggcccgacctagggtcatccaacgatggctgcccacagctcttccaagagagatcagttatcgtggagaattcatccggaagcacaagcgctagcgaactccttaaaccaatgaaaaaacgcaagcgccgggagtaccagtctccatctgaagaggaatccgagccggaggccatggaaaaacaggaagaagggaaggaccctgagggccagcccaccgcgtccacccccgaatccgaagaatggtcctccagccagccagccacaggggaaaagaaagagtgttggtcctgggagagttacctcgaggagcagaaggcaatcaccgcccctgtgagtttgttccaggactctcaggccgtgacacacaacaagaatggtttcaagctgggcatgaaactcgaggggatcgatcctcagcatcctagcatgtattttatactgaccgttgcagaggtttgcggctataggctccggctgcacttcgacggctattcagagtgtcatgacttttgggtgaacgccaactccccagacatccaccccgctggctggtttgagaagaccggacataagctccagcctcccaagggctataaagaagaggagttctcatggtcccagtatttacggtcaacccgggcacaggcagctcccaagcacctgttcgtatcacagtcacactcccccccacccctgggctttcaggtcgggatgaagcttgaggctgttgaccgaatgaatccatccctagtttgcgtcgcgagtgtgaccgatgtcgtcgacagccgcttccttgtccatttcgataactgggatgatacatacgattattggtgtgaccccagctccccctacattcaccccgtcgggtggtgtcagaagcaagggaagcccttaaccccgccacaggattacccagatcccgacaatttttgctgggagaagtatctggaggagacaggagcaagcgcggtgcctacctgggcctttaaggtgagacccccgcactccttcctagtgaacatgaagctggaagccgtggaccgacgaaaccccgctcttatcagggtggcgtctgtcgaagacgtggaggatcacagaatcaagatccactttgatgggtggagccatgggtatgatttctggatagatgctgatcacccagatattcatcccgcaggctggtgttccaagacagggcaccccctgcagccaccactgggcccccgggagcccagttccgcatctcccggaggatgtccacccctgagttatcgcagcctccctcacacacgcacaagcaaatactctttccatcatagaaaatgcccaacgccaggctgtgatggctcagggcacgtgactgggaagtttacagcgcaccactgcttgtctggttgtcctcttgctgaacggaatcaaagtcgcctgaaggcagagctcagcgatagtgaagcctccgcacgcaaaaagaatttgtctggcttttccccacgcaagaagccacgccatcatggccgaatcggtagaccgcctaagtaccgaaaaattccgcaggaggactttcagaccctgacaccagatgtggttcatcagagcctgttcatgtctgccttgtccgctcaccccgatagatccctgtcagtgtgctgggagcagcactgtaaactgttgcctggggtggccggtatttccgcaagtactgtggcgaagtggacaatcgatgaggtgttcggcttcgtacagactctcactggctgcgaggatcaggcgcgtctgttcaaagacgaggcaagaatcgtgagggtaacgcatgtgtcaggcaaaaccctggtttggacagttgcacagctcggtgatctcgtatgctcagatcacttacaggaaggaaaggggattttagagacaggagtgcacagcctgctttgttcactccccactcatctgctagccaaactttcgtttgcatctgacagtcagtactag

SEQ ID NO: 186983 - DNA, 255 bp, Artificial Sequence
  derived and/or modified sequence
atggccggcgtggagcagccccccagccccgagctgcggcaggagggcgttacagaatacgaggacggcggagccccagcgggcgacggggaggcgggaccacagcaggccgaggaccatccccaaaatccccccgaagatcctaaccaggatccccccgaggacgattccacctgtcagtgccaggcttgtgggccccaccaggcggccggtcctgatttgggcagcagtaacgatggctgccctcaactgtag

SEQ ID NO: 186984 - DNA, 2217 bp, Artificial Sequence
  derived and/or modified sequence
atgcggcggcgggagggccacggcaccgacagcgagatgggccagggccccgtgcgggagtcccaatcgtccgatccacctgccctgcagttccggatcagcgaatacaagccactaaatatggctggagtcgagcaacctccttcccctgaactgcgtcaggagggcgtgactgagtatgaagacggaggagcccccgcgggagatggcgaggcaggcccccaacaggctgaggaccatccccagaatcccccggaggatcccaatcaagaccctccagaggacgattctacctgtcaatgccaggcttgtggtccccaccaagccgccggccccgatctaggaagctcaaatgacggttgccctcagttgtttcaggagcggtctgtgatcgtggagaacagtagcgggagcacgagcgcctccgagctccttaaaccaatgaagaaacgcaaacggagggaataccagagccccagtgaggaggagtccgagcctgaggcgatggagaagcaggaggagggtaaagaccctgaggggcagccgacagctagcacccccgagagcgaggaatggtcatctagtcaaccggctaccggtgaaaaaaaagagtgttggtcatgggaatcctacttggaggagcagaaggccatcactgcaccagtttctctattccaagatagtcaggccgtcacccataataaaaatgggtttaagcttggtatgaaactggagggcattgatcctcagcacccgtcaatgtattttattctgaccgtggccgaagtctgtggatacaggctgagactgcatttcgatggctattcagaatgtcacgacttttgggtgaacgccaactctcccgacatccaccccgcaggctggttcgaaaaaaccggtcacaagctgcagcccccaaagggctataaggaagaggaattcagctggtcacagtacctgaggagcactagggcgcaggccgcaccaaagcacctctttgtgtcgcagagccactcgcctccacctctggggttccaggtgggcatgaagcttgaggctgtcgaccgcatgaatcccagcttggtgtgtgtcgcatccgtcactgacgtggtggattccaggttcttggttcacttcgacaactgggacgatacatacgactattggtgtgacccaagttctccttatatacaccctgtgggttggtgccagaaacaggggaagccactgacccctccccaagattatcccgacccggataatttctgttgggaaaagtatttagaggagactggagccagcgccgttcctacctgggcttttaaagttaggcccccacactcattcctggttaacatgaaactcgaagcagtggatagaaggaatcctgccctaattcgtgtcgctagtgtagaagacgtggaagaccatagaatcaagattcatttcgacggatggagccacggctatgatttctggatcgacgccgatcatcctgacatccatcctgccggctggtgctccaagacagggcacccattacagcctcctctgggacctcgtgaaccatcatcagctagcccagggggatgccctccgcttagttatcggagtttgccacacactcgtacttcaaagtactccttccaccatcgaaaatgccccactcccggttgtgacggtagcgggcatgtcactggaaagtttaccgctcaccactgcctctccggatgccctctggctgagagaaatcagagccgcttgaaagccgaactctcagacagcgaagctagcgcccgcaagaagaatctatctgggttctccccacgcaaaaagccaagacatcacgggcggattggcagacctcctaaataccgcaagataccccaggaggatttccagacgttaactccagacgtcgtgcaccaatcgctgtttatgtctgcactttccgcccaccctgaccggtctctgtccgtctgctgggagcagcattgtaaactgctgccaggtgtggctggtatctccgccagcaccgtggcaaaatggactattgacgaagtgttcggctttgtgcagacactgaccggctgcgaggaccaagccaggctcttcaaggatgaagtgagatgtaagtgccgcgtgggtgaccgggctggggtaaccgttctgaagaccgccgggagcaggtgcccccctcagcggcacttctgttag

SEQ ID NO: 186985 - DNA, 870 bp, Artificial Sequence
  derived and/or modified sequence
tgaaccagcggcagcatgcccacccccctgaccttcaccctgctggcgggctcacggcggcgcgccaccagctgttctctgcccaagtctccccctcccttgggcttccaggtcggaatgaaactcgaagctgtggaccggatgaacccaagcctcgtctgtgtagcctccgtgacagatgtggttgatagtcgattcttagtgcatttcgacaactgggacgatacgtatgattactggtgtgatccctcctctccatacatccaccccgtggggtggtgccagaagcagggtaagccactgaccccccctcaagactacccagatccggataacttctgttgggagaaatatctagaagaaaccggtgccagcgccgtcccaacttgggcctttaaagttcggcccccccactcttttcttgtgaatatgaaactggaggccgttgaccggcgcaatcccgccctgattcgggtggcaagtgtcgaagacgtagaagaccatcggatcaagattcacttcgatggatggtctcatggctacgacttctggatcgacgctgatcaccccgatatacaccccgcaggttggtgctctaagacaggccacccactgcagccaccactcggcccaagggaaccatcttctgccagccctgggggctgtccacctttaagctataggagccttccacacacccgcacatccaagtacagtttccaccacaggaaatgccctacacccggatgcgatgggtccggccatgtgacaggcaaatttaccgctcaccactgtctttccggatgtccattagcagaaaggaaccagagtcgactgaaggcagagctgagtgacagcgaggcatcttag

SEQ ID NO: 186986 - DNA, 1173 bp, Artificial Sequence
  derived and/or modified sequence
atgaaattagaggcagtggacagaatgaatccatccctggtctgtgtggcaagcgtgacagacgtggtcgactctcgcttcctggtgcactttgataattgggacgatacctatgactattggtgcgatccatcatctccatacattcatcccgttgggtggtgtcagaagcaaggtaagcccttaactcccccacaggattacccggacccagacaatttctgttgggaaaaatacttggaggagaccggagcaagcgccgtacctacctgggcgtttaaagtgcggcctccacactctttcttggtgaatatgaaacttgaggcagtggaccgcaggaatccagctctcatacgggtggccagtgttgaagacgtggaagatcaccggatcaaaattcactttgacggatggtctcacggctacgatttctggatagacgcagatcatccagatatccatcccgcaggatggtgcagcaagactggacacccactgcagccccctctaggcccaagggagccatcatccgcctcaccagggggatgcccgccactgagctaccgaagtttgccccacaccagaacatcgaaatactcttttcaccatcggaaatgcccgacacccggatgcgacgggagtggacatgtgaccggcaagttcacagcccaccactgtttgagcggctgccctttagccgagcggaaccaaagtaggctgaaggctgagctttctgattcagaagcgtcagcacgaaaaaaaaacctgagcgggttcagccccagaaaaaagcctcgtcaccacggccgtatcggacgcccacctaaatacaggaagattccacaagaagactttcaaactcttacacccgacgtggtgcaccagtccctcttcatgtctgcattgtctgcacatccagaccgcagcctcagcgtgtgctgggagcaacattgtaaactgctgccaggggtcgcagggattagcgccagtaccgtcgctaagtggaccatcgatgaggtgttcggatttgttcagacgctgactggttgcgaagaccaggcaagactttttaaggatgaggttaggtgcaaatgtcgggttggagatagggctggcgtcaccgtgctcaaaacggctggaagtcggtgccccccacagcgacatttctgttag

SEQ ID NO: 186987 - DNA, 2232 bp, Artificial Sequence
  derived and/or modified sequence
atgagacgtagggaagggcacgggaccgactccgagatgggccaagggccagtccgggaaagtcagtcctcagaccctcccgctttgcagtttaggattagtgaatacaaacctctgaatatggccggagtggagcagccacctagccccgagttgcgtcaggagggggtgacagagtacgaggatgggggtgcacctgcaggcgatggggaagctgggcctcagcaggcagaggaccatccgcaaaaccctccagaggatcctaaccaagaccctcctgaggacgatagtacatgccaatgtcaggcctgcgggccacaccaagcagcaggccctgatctcgggtccagcaacgatggctgtccacagctgttccaggaaagatctgtcatcgtcgagaactcatccgggtccacatccgcatcagaactgttaaaacctatgaagaaacgcaagaggagagaataccaatccccttcagaggaagaatccgagcctgaagcaatggaaaagcaagaagagggcaaggaccccgagggtcaaccgaccgcatcaacaccagaatcagaagagtggtcctcgagccagcccgctaccggggaaaagaaggaatgctggtcttgggaaagttaccttgaggagcagaaagccataacagccccagtgtccctgttccaggatagtcaggctgtcacacataacaaaaacggctttaagctaggaatgaaactcgaaggtatcgaccctcaacatccgagcatgtacttcatcttaactgtggcagaagtgtgtggataccggctgcgactccactttgatggatacagcgaatgccatgatttttgggtgaatgcaaactcccccgatatccatcccgctgggtggttcgagaaaaccggccataagttgcagccgcctaagggctataaagaggaagaattctcgtggagccagtacctaagatccacccgagcccaggccgctcctaagcacttgtttgtatcccagtcccactcgccaccacccctgggattccaggtgggaatgaaacttgaagccgttgataggatgaaccctagcttggtgtgcgtggcctccgtgaccgacgtggtggatagcagatttctggtgcacttcgataactgggatgacacgtatgactactggtgtgacccctctagtccctatatccaccctgtgggctggtgtcagaagcagggaaagcccctgactccaccccaggactatccagatccagataatttctgctgggagaagtacttagaagaaactggcgcttccgctgtgcccacctgggcttttaaagtacgccctccccattcatttctggtgaatatgaagttggaggctgtcgatcgcagaaacccagctctaatccgagtcgcctctgtggaagacgtggaggatcaccggattaaaatacattttgatgggtggagccatgggtatgatttctggatcgatgcagaccatcctgatatccatccagccggatggtgttccaagacaggccacccgctgcagccccctctgggacctcgggagccgtcatccgcctctccaggtggctgccccccactctcgtaccgctcattaccccacacccgcacctctaagtacagtttccaccaccggctgttcttcccaagaaaatgcccgaccccgggatgtgacgggtctggacacgtgaccggtaaattcacagctcatcactgcctgagtggctgtcctctggccgagagaaatcaaagtaggctgaaagccgagctttccgactccgaggccagtgcccgaaagaaaaatctctctggtttcagccccagaaaaaaacctcgacaccacgggaggataggaaggcccccaaaatacagaaagatcccccaggaggacttccagacactgacacctgatgtcgtccatcagtcactctttatgtctgccttatctgcgcatcccgaccgttcgttgagtgtttgctgggagcagcactgtaaactgctgccaggcgttgccggtatatcagcatccaccgttgcgaagtggactatagatgaggtattcgggtttgtgcagacgcttaccggttgcgaggaccaggccaggctattcaaagatgaggtacgatgcaagtgtcgcgtgggcgaccgagctggggtgaccgtgctgaaaacagcaggttcacgatgcccacctcagaggcatttctgctag

SEQ ID NO: 186988 - DNA, 2319 bp, Artificial Sequence
  derived and/or modified sequence
atgaggagacgcgaaggccatggtaccgatagcgaaatggggcaaggcccagtccgcgaatctcagagcagcgaccctccggctcttcagtttagaatcagcgaatacaaacccctcaacatggcaggggtggaacaacccccttcaccagagctgcggcaggagggtgtcactgagtatgaggatggcggtgcccctgccggtgatggcgaggctggcccacagcaagccgaggaccaccctcagaatcccccagaggatccgaaccaagacccaccggaggacgattcgacctgtcagtgccaagcctgcgggccacaccaggcagcgggtcccgacctggggtcctctaacgacggttgtcctcaactattccaggagagaagtgtgattgtagagaacagctcaggctctacttccgcatccgaactcctaaagcccatgaaaaaaagaaagaggcgggagtaccagagcccatccgaagaggaatcagaaccggaagcaatggagaaacaagaggaggggaaagaccccgaggggcaacctaccgccagcacccctgagtccgaagaatggtcctccagccagcccgctactggcgagaaaaaagagtgctggtcctgggaaagctacctcgaagagcagaaggccatcacagccccagtgtccctgttccaggatagccaggccgtgactcataataagaacggtttcaagttgggaatgaagctggaaggaatcgacccacaacaccccagcatgtacttcattctgaccgttgccgaggtgtgcgggtacagactcagactgcacttcgatggatatagcgaatgtcacgacttctgggtgaatgccaatagtcctgatatccatccggcaggctggtttgagaagaccgggcacaagttgcagcccccaaagggctacaaagaggaagagttcagttggagccagtatctacgatctacgcgggctcaggccgcacctaagcacctgttcgtctcacagtcacattccccgccacctctcgggtttcaggtcggcatgaaacttgaggccgttgaccgtatgaaccccagcctagtgtgcgtcgcgagcgttacagatgtagtcgatagccgattcctggtccactttgacaactgggacgacacatatgactactggtgtgacccatcctctccctatatccaccctgtggggtggtgccagaaacaggggaagcctcttacacctccacaagattatccggatcctgataacttctgttgggagaaataccttgaggaaaccggggcaagtgcagtccctacctgggcattcaaggtgcggccacctcacagcttcctggtcaatatgaagctggaggctgtagatagacggaatcccgcacttattagggtggcctcagtggaggacgtcgaggaccatcggatcaagatacacttcgatgggtggtcccatgggtatgacttctggattgacgctgaccatccggacatacaccccgcaggatggtgctctaaaacaggccacccattgcagccgccacttggaccaagggaacccagttccgcttctcccggagggtgtccacccctgagctatagatccctgcctcatacccgcacaagtaagtacagctttcaccatcgcaaatgcccaacacccggttgtgacgggtcgggccacgtcacaggcaaattcaccgcccaccattgcctatccggctgccctctggctgagaggaaccagagcaggctcaaggccgagttaagtgatagcgaggcctccgcccgaaaaaaaaacctttctggcttttctcctcggaaaaagcccagacaccacggtaggattggaaggccgcctaagtatcgtaagatccctcaggaggatttccaaactcttactcccgatgtcgtgcaccagtctcttttcatgtctgccttgagcgcacaccctgacagatccctttccgtgtgctgggaacagcattgcaaactgttaccaggcgtggcgggaataagtgcctccaccgttgctaagtggacaattgacgaggtgttcgggtttgtccaaactcttaccggttgcgaggatcaggcccgactcttcaaagacgaagcccgtatagtgcgcgttacccacgtttcaggcaaaacactggtctggaccgttgcacaactgggtgatttggtttgctctgaccatctccaggagggtaagggaatcttagaaactggggttcactccctcctctgttcgctgccgacccacctgctggcaaagctttccttcgcctcggatagtcagtattag

SEQ ID NO: 186989 - DNA, 255 bp, Artificial Sequence
  derived and/or modified sequence
atggcgggtgtcgaacaaccaccttcaccagagctgagacaggaaggcgtgactgagtatgaagatggcggagctccagccggtgacggtgaggccggacctcagcaggccgaggaccacccgcaaaacccaccagaggatcccaaccaggatccaccagaagatgactcaacgtgccagtgccaggcatgcgggcctcatcaggcagccggtcccgacctgggatcgtcgaatgacggttgccctcagctatag

SEQ ID NO: 186990 - DNA, 2217 bp, Artificial Sequence
  derived and/or modified sequence
atgcgacggcgtgaaggacatggtacagacagcgagatgggccagggtccagtccgggagagccaatcatccgaccctccagctttgcagtttagaattagtgaatataaaccattgaacatggccggagtagaacagcccccaagtcctgaactgcgtcaggagggcgtgaccgaatacgaggatggcggagcaccagcaggagacggagaggccggacctcagcaggccgaggaccaccctcaaaatcctccggaggatccgaatcaggatcctccagaggatgattccacgtgccagtgccaggcctgtgggccacatcaggcagccggtccggatctcggcagcagtaacgatggctgtccacagctgttccaagagcgcagcgtcattgtggagaacagctctggcagtacgagcgcatctgaactgctcaaacccatgaagaaaagaaaaagacgagaatatcagtcaccttctgaggaggagtctgaacctgaggctatggagaagcaggaggagggtaaagacccagaaggacagcccaccgctagcactcctgaaagcgaggaatggagtagcagccaaccagcaaccggcgaaaaaaaggagtgctggtcgtgggagagttatttggaggagcagaaggctataaccgcgccagtgagcctctttcaagatagtcaagccgtgactcacaataagaacggctttaaattgggcatgaagcttgaggggatcgacccacagcatccttcaatgtacttcattctgacagttgccgaagtatgcggatatcggctacgcctgcattttgatggctatagtgagtgtcatgatttttgggtaaacgcaaacagccctgacatacaccctgcaggctggttcgagaagacaggccataaattacagccacccaaagggtacaaagaggaggagttctcctggtctcagtatcttcggtcaactagggctcaggccgcaccaaagcatctctttgtgagtcagtctcacagtcctcccccactcgggtttcaggtggggatgaagctggaggcagtggacaggatgaacccctctctggtctgcgtcgctagtgtaaccgatgttgtggatagtaggtttctggtccacttcgataattgggacgatacctatgattattggtgcgacccttcttcaccatacatccatcctgtggggtggtgtcaaaagcagggaaagcccctgacccctccccaagactatccagaccctgacaacttttgctgggagaagtacctcgaggagactggggcttcagcggtgcctacctgggccttcaaagtccggccacctcactcttttctggtcaacatgaagttggaggcggtagacaggagaaatcctgccctgattagagtggctagcgtcgaagacgtggaggaccaccgtatcaagatccattttgacgggtggtcccatggatatgatttctggatcgacgccgatcaccccgatattcatcctgctggctggtgctcgaaaaccggccatccccttcaaccacccctcggaccgcgagagccttcctcagcttcacccggagggtgtcctcctctgtcctatcggtctctccctcacaccagaactagtaagtactcttttcaccacagaaagtgtcctactccaggatgcgacgggagtggccacgtgacaggcaagtttaccgcccatcattgcctatccgggtgtcctctagcagaacggaaccaatcccgattaaaagctgagctatcagacagcgaagcctcggctcggaagaagaaccttagtgggttcagcccccgaaaaaaacctagacaccacggaaggatcggaaggccacctaaatatagaaagatccctcaggaggacttccagaccctcacccccgatgtggtgcaccagtcattgtttatgtctgctctcagtgctcatccagatcggtcactgtccgtctgctgggaacagcattgtaaactgcttcctggggtggcgggaatcagtgcaagcaccgttgcaaagtggactattgatgaagtgtttgggttcgtgcagaccctgaccggctgtgaagatcaagctcggcttttcaaggatgaggtcaggtgcaagtgcagggtgggggatcgtgcaggagtaacagtgcttaagacagccggatccaggtgccccccacaaagacacttctgctag

SEQ ID NO: 186991 - DNA, 870 bp, Artificial Sequence
  derived and/or modified sequence
tgaacgtctggtagtatgccaactccattgaccttcacactcttagccggtagcagacgacgtgccacctcatgctctctgcccaaatccccacctccactgggattccaggtaggcatgaagttggaggccgtagacaggatgaacccctctctggtctgtgtggccagtgtcaccgacgtagtagattcccgctttcttgttcactttgacaattgggatgacacctacgattactggtgcgacccgtcttcaccctacatacatcctgtcgggtggtgtcagaagcagggcaagccattgactcctcctcaagattacccagaccctgataatttctgttgggaaaaatatctggaggaaaccggagcaagcgccgtcccgacatgggcctttaaagtccgacctccacattcctttctcgttaacatgaaacttgaagcggttgatagaaggaaccctgccctaattagagttgcctcagttgaggacgtggaagaccacaggatcaagatccatttcgacggctggagccatgggtatgacttttggattgacgcagatcatcccgacatccatcctgccggatggtgcagtaagaccgggcaccccttgcagccgcctctcggcccaagagagccatcttccgcctccccagggggatgtccccctctctcataccggtctctgccacatactaggacaagcaagtacagctttcaccataggaagtgccccacacctggctgcgatggatctggccacgtgactggcaaattcactgcgcaccactgcctctcaggttgccccttggcagagaggaaccagagtagattgaaggcagagttgagcgactcagaggcttcctag

SEQ ID NO: 186992 - DNA, 1173 bp, Artificial Sequence
  derived and/or modified sequence
atgaagctggaggccgtggacagaatgaaccccagcctggtgtgcgtggccagcgtgaccgacgtggtggacagcagattcctggtgcacttcgacaactgggacgacacctacgactactggtgcgaccccagcagcccctacatccaccccgtgggctggtgccagaagcagggcaagcccctgacccccccccaggactaccccgaccccgacaacttctgctgggagaagtacctggaggagaccggcgccagcgccgtgcccacctgggccttcaaggtgagacccccccacagcttcctggtgaacatgaagctggaggccgtggacagaagaaaccccgccctgatcagagtggccagcgtggaggacgtggaggaccacagaatcaagatccacttcgacggctggagccacggctacgacttctggatcgacgccgaccaccccgacatccaccccgccggctggtgcagcaagaccggccaccccctgcagccccccctgggccccagagagcccagcagcgccagccccggcggctgcccccccctgagctacagaagcctgccccacaccagaaccagcaagtacagcttccaccacagaaagtgccccacccccggctgcgacggcagcggccacgtgaccggcaagttcaccgcccaccactgcctgagcggctgccccctggccgagagaaaccagagcagactgaaggccgagctgagcgacagcgaggccagcgccagaaagaagaacctgagcggcttcagccccagaaagaagcccagacaccacggcagaatcggcagaccccccaagtacagaaagatcccccaggaggacttccagaccctgacccccgacgtggtgcaccagagcctgttcatgagcgccctgagcgcccaccccgacagaagcctgagcgtgtgctgggagcagcactgcaagctgctgcccggcgtggccggcatcagcgccagcaccgtggccaagtggaccatcgacgaggtgttcggcttcgtgcagaccctgaccggctgcgaggaccaggccagactgttcaaggacgaggtgagatgcaagtgcagagtgggcgacagagccggcgtgaccgtgctgaagaccgccggcagcagatgccccccccagagacacttctgctag

SEQ ID NO: 186993 - DNA, 2232 bp, Artificial Sequence
  derived and/or modified sequence
atgagaagaagagagggccacggcaccgacagcgagatgggccagggccccgtgagagagagccagagcagcgacccccccgccctgcagttcagaatcagcgagtacaagcccctgaacatggccggcgtggagcagccccccagccccgagctgagacaggagggcgtgaccgagtacgaggacggcggcgcccccgccggcgacggcgaggccggcccccagcaggccgaggaccacccccagaacccccccgaggaccccaaccaggacccccccgaggacgacagcacctgccagtgccaggcctgcggcccccaccaggccgccggccccgacctgggcagcagcaacgacggctgcccccagctgttccaggagagaagcgtgatcgtggagaacagcagcggcagcaccagcgccagcgagctgctgaagcccatgaagaagagaaagagaagagagtaccagagccccagcgaggaggagagcgagcccgaggccatggagaagcaggaggagggcaaggaccccgagggccagcccaccgccagcacccccgagagcgaggagtggagcagcagccagcccgccaccggcgagaagaaggagtgctggagctgggagagctacctggaggagcagaaggccatcaccgcccccgtgagcctgttccaggacagccaggccgtgacccacaacaagaacggcttcaagctgggcatgaagctggagggcatcgacccccagcaccccagcatgtacttcatcctgaccgtggccgaggtgtgcggctacagactgagactgcacttcgacggctacagcgagtgccacgacttctgggtgaacgccaacagccccgacatccaccccgccggctggttcgagaagaccggccacaagctgcagccccccaagggctacaaggaggaggagttcagctggagccagtacctgagaagcaccagagcccaggccgcccccaagcacctgttcgtgagccagagccacagccccccccccctgggcttccaggtgggcatgaagctggaggccgtggacagaatgaaccccagcctggtgtgcgtggccagcgtgaccgacgtggtggacagcagattcctggtgcacttcgacaactgggacgacacctacgactactggtgcgaccccagcagcccctacatccaccccgtgggctggtgccagaagcagggcaagcccctgacccccccccaggactaccccgaccccgacaacttctgctgggagaagtacctggaggagaccggcgccagcgccgtgcccacctgggccttcaaggtgagacccccccacagcttcctggtgaacatgaagctggaggccgtggacagaagaaaccccgccctgatcagagtggccagcgtggaggacgtggaggaccacagaatcaagatccacttcgacggctggagccacggctacgacttctggatcgacgccgaccaccccgacatccaccccgccggctggtgcagcaagaccggccaccccctgcagccccccctgggccccagagagcccagcagcgccagccccggcggctgcccccccctgagctacagaagcctgccccacaccagaaccagcaagtacagcttccaccacagactgttcttccccagaaagtgccccacccccggctgcgacggcagcggccacgtgaccggcaagttcaccgcccaccactgcctgagcggctgccccctggccgagagaaaccagagcagactgaaggccgagctgagcgacagcgaggccagcgccagaaagaagaacctgagcggcttcagccccagaaagaagcccagacaccacggcagaatcggcagaccccccaagtacagaaagatcccccaggaggacttccagaccctgacccccgacgtggtgcaccagagcctgttcatgagcgccctgagcgcccaccccgacagaagcctgagcgtgtgctgggagcagcactgcaagctgctgcccggcgtggccggcatcagcgccagcaccgtggccaagtggaccatcgacgaggtgttcggcttcgtgcagaccctgaccggctgcgaggaccaggccagactgttcaaggacgaggtgagatgcaagtgcagagtgggcgacagagccggcgtgaccgtgctgaagaccgccggcagcagatgccccccccagagacacttctgctag

SEQ ID NO: 186994 - DNA, 2319 bp, Artificial Sequence
  derived and/or modified sequence
atgagaagaagagagggccacggcaccgacagcgagatgggccagggccccgtgagagagagccagagcagcgacccccccgccctgcagttcagaatcagcgagtacaagcccctgaacatggccggcgtggagcagccccccagccccgagctgagacaggagggcgtgaccgagtacgaggacggcggcgcccccgccggcgacggcgaggccggcccccagcaggccgaggaccacccccagaacccccccgaggaccccaaccaggacccccccgaggacgacagcacctgccagtgccaggcctgcggcccccaccaggccgccggccccgacctgggcagcagcaacgacggctgcccccagctgttccaggagagaagcgtgatcgtggagaacagcagcggcagcaccagcgccagcgagctgctgaagcccatgaagaagagaaagagaagagagtaccagagccccagcgaggaggagagcgagcccgaggccatggagaagcaggaggagggcaaggaccccgagggccagcccaccgccagcacccccgagagcgaggagtggagcagcagccagcccgccaccggcgagaagaaggagtgctggagctgggagagctacctggaggagcagaaggccatcaccgcccccgtgagcctgttccaggacagccaggccgtgacccacaacaagaacggcttcaagctgggcatgaagctggagggcatcgacccccagcaccccagcatgtacttcatcctgaccgtggccgaggtgtgcggctacagactgagactgcacttcgacggctacagcgagtgccacgacttctgggtgaacgccaacagccccgacatccaccccgccggctggttcgagaagaccggccacaagctgcagccccccaagggctacaaggaggaggagttcagctggagccagtacctgagaagcaccagagcccaggccgcccccaagcacctgttcgtgagccagagccacagccccccccccctgggcttccaggtgggcatgaagctggaggccgtggacagaatgaaccccagcctggtgtgcgtggccagcgtgaccgacgtggtggacagcagattcctggtgcacttcgacaactgggacgacacctacgactactggtgcgaccccagcagcccctacatccaccccgtgggctggtgccagaagcagggcaagcccctgacccccccccaggactaccccgaccccgacaacttctgctgggagaagtacctggaggagaccggcgccagcgccgtgcccacctgggccttcaaggtgagacccccccacagcttcctggtgaacatgaagctggaggccgtggacagaagaaaccccgccctgatcagagtggccagcgtggaggacgtggaggaccacagaatcaagatccacttcgacggctggagccacggctacgacttctggatcgacgccgaccaccccgacatccaccccgccggctggtgcagcaagaccggccaccccctgcagccccccctgggccccagagagcccagcagcgccagccccggcggctgcccccccctgagctacagaagcctgccccacaccagaaccagcaagtacagcttccaccacagaaagtgccccacccccggctgcgacggcagcggccacgtgaccggcaagttcaccgcccaccactgcctgagcggctgccccctggccgagagaaaccagagcagactgaaggccgagctgagcgacagcgaggccagcgccagaaagaagaacctgagcggcttcagccccagaaagaagcccagacaccacggcagaatcggcagaccccccaagtacagaaagatcccccaggaggacttccagaccctgacccccgacgtggtgcaccagagcctgttcatgagcgccctgagcgcccaccccgacagaagcctgagcgtgtgctgggagcagcactgcaagctgctgcccggcgtggccggcatcagcgccagcaccgtggccaagtggaccatcgacgaggtgttcggcttcgtgcagaccctgaccggctgcgaggaccaggccagactgttcaaggacgaggccagaatcgtgagagtgacccacgtgagcggcaagaccctggtgtggaccgtggcccagctgggcgacctggtgtgcagcgaccacctgcaggagggcaagggcatcctggagaccggcgtgcacagcctgctgtgcagcctgcccacccacctgctggccaagctgagcttcgccagcgacagccagtactag

SEQ ID NO: 186995 - DNA, 255 bp, Artificial Sequence
  derived and/or modified sequence
atggccggcgtggagcagccccccagccccgagctgagacaggagggcgtgaccgagtacgaggacggcggcgcccccgccggcgacggcgaggccggcccccagcaggccgaggaccacccccagaacccccccgaggaccccaaccaggacccccccgaggacgacagcacctgccagtgccaggcctgcggcccccaccaggccgccggccccgacctgggcagcagcaacgacggctgcccccagctgtag

SEQ ID NO: 186996 - DNA, 2217 bp, Artificial Sequence
  derived and/or modified sequence
atgagaagaagagagggccacggcaccgacagcgagatgggccagggccccgtgagagagagccagagcagcgacccccccgccctgcagttcagaatcagcgagtacaagcccctgaacatggccggcgtggagcagccccccagccccgagctgagacaggagggcgtgaccgagtacgaggacggcggcgcccccgccggcgacggcgaggccggcccccagcaggccgaggaccacccccagaacccccccgaggaccccaaccaggacccccccgaggacgacagcacctgccagtgccaggcctgcggcccccaccaggccgccggccccgacctgggcagcagcaacgacggctgcccccagctgttccaggagagaagcgtgatcgtggagaacagcagcggcagcaccagcgccagcgagctgctgaagcccatgaagaagagaaagagaagagagtaccagagccccagcgaggaggagagcgagcccgaggccatggagaagcaggaggagggcaaggaccccgagggccagcccaccgccagcacccccgagagcgaggagtggagcagcagccagcccgccaccggcgagaagaaggagtgctggagctgggagagctacctggaggagcagaaggccatcaccgcccccgtgagcctgttccaggacagccaggccgtgacccacaacaagaacggcttcaagctgggcatgaagctggagggcatcgacccccagcaccccagcatgtacttcatcctgaccgtggccgaggtgtgcggctacagactgagactgcacttcgacggctacagcgagtgccacgacttctgggtgaacgccaacagccccgacatccaccccgccggctggttcgagaagaccggccacaagctgcagccccccaagggctacaaggaggaggagttcagctggagccagtacctgagaagcaccagagcccaggccgcccccaagcacctgttcgtgagccagagccacagccccccccccctgggcttccaggtgggcatgaagctggaggccgtggacagaatgaaccccagcctggtgtgcgtggccagcgtgaccgacgtggtggacagcagattcctggtgcacttcgacaactgggacgacacctacgactactggtgcgaccccagcagcccctacatccaccccgtgggctggtgccagaagcagggcaagcccctgacccccccccaggactaccccgaccccgacaacttctgctgggagaagtacctggaggagaccggcgccagcgccgtgcccacctgggccttcaaggtgagacccccccacagcttcctggtgaacatgaagctggaggccgtggacagaagaaaccccgccctgatcagagtggccagcgtggaggacgtggaggaccacagaatcaagatccacttcgacggctggagccacggctacgacttctggatcgacgccgaccaccccgacatccaccccgccggctggtgcagcaagaccggccaccccctgcagccccccctgggccccagagagcccagcagcgccagccccggcggctgcccccccctgagctacagaagcctgccccacaccagaaccagcaagtacagcttccaccacagaaagtgccccacccccggctgcgacggcagcggccacgtgaccggcaagttcaccgcccaccactgcctgagcggctgccccctggccgagagaaaccagagcagactgaaggccgagctgagcgacagcgaggccagcgccagaaagaagaacctgagcggcttcagccccagaaagaagcccagacaccacggcagaatcggcagaccccccaagtacagaaagatcccccaggaggacttccagaccctgacccccgacgtggtgcaccagagcctgttcatgagcgccctgagcgcccaccccgacagaagcctgagcgtgtgctgggagcagcactgcaagctgctgcccggcgtggccggcatcagcgccagcaccgtggccaagtggaccatcgacgaggtgttcggcttcgtgcagaccctgaccggctgcgaggaccaggccagactgttcaaggacgaggtgagatgcaagtgcagagtgggcgacagagccggcgtgaccgtgctgaagaccgccggcagcagatgccccccccagagacacttctgctag

SEQ ID NO: 186997 - DNA, 870 bp, Artificial Sequence
  derived and/or modified sequence
tgaaccagcggcagcatgcccacccccctgaccttcaccctgctggccggcagcagaagaagagccaccagctgcagcctgcccaagagccccccccccctgggcttccaggtgggcatgaagctggaggccgtggacagaatgaaccccagcctggtgtgcgtggccagcgtgaccgacgtggtggacagcagattcctggtgcacttcgacaactgggacgacacctacgactactggtgcgaccccagcagcccctacatccaccccgtgggctggtgccagaagcagggcaagcccctgacccccccccaggactaccccgaccccgacaacttctgctgggagaagtacctggaggagaccggcgccagcgccgtgcccacctgggccttcaaggtgagacccccccacagcttcctggtgaacatgaagctggaggccgtggacagaagaaaccccgccctgatcagagtggccagcgtggaggacgtggaggaccacagaatcaagatccacttcgacggctggagccacggctacgacttctggatcgacgccgaccaccccgacatccaccccgccggctggtgcagcaagaccggccaccccctgcagccccccctgggccccagagagcccagcagcgccagccccggcggctgcccccccctgagctacagaagcctgccccacaccagaaccagcaagtacagcttccaccacagaaagtgccccacccccggctgcgacggcagcggccacgtgaccggcaagttcaccgcccaccactgcctgagcggctgccccctggccgagagaaaccagagcagactgaaggccgagctgagcgacagcgaggccagctag

SEQ ID NO: 186998 - protein, 549 aa, Artificial Sequence
  derived and/or modified sequence
MARTLRPSPLCPGGGKAQLSSASLLGAGLLLQPPTPPPLLLLLFPLLLFSRLCGALAGPIIVEPHVTAVWGKNVSLKCLIEVNETITQISWEKIHGKSSQTVAVHHPQYGFSVQGEYQGRVLFKNYSLNDATITLHNIGFSDSGKYICKAVTFPLGNAQSSTTVTVLVEPTVSLIKGPDSLIDGGNETVAAICIAATGKPVAHIDWEGDLGEMESTTTSFPNETATIISQYKLFPTRFARGRRITCVVKHPALEKDIRYSFILDIQYAPEVSVTGYDGNWFVGRKGVNLKCNADANPPPFKSVWSRLDGQWPDGLLASDNTLHFVHPLTFNYSGVYICKVTNSLGQRSDQKVIYISDPPTTTTLQPTIQWHPSTADIEDLATEPKKLPFPLSTLATIKDDTIATIIASVVGGALFIVLVSVLAGIFCYRRRRTFRGDYFAKNYIPPSDMQKESQIDVLQQDELDSYPDSVKKENKNPVNNLIRKDYLEEPEKTQWNNVENLNRFERPMDYYEDLKMGMKFVSDEHYDENEDDLVSHVDGSVISRREWYV

SEQ ID NO: 186999 - DNA, 1650 bp, Artificial Sequence
  derived and/or modified sequence
atggcccgcacactgcgaccctccccattgtgccctggcggtgggaaggcgcagttgagcagcgccagtctgctgggcgctgggctgcttttgcaaccgcccaccccacctccgctgcttctgctactgttcccgttgttattattttcccggttgtgcggcgctctggctgggcccattatcgttgagccccatgtcacagctgtttggggcaagaatgtttcattaaagtgtctgatcgaggtgaacgaaaccataacccagatttcctgggaaaaaattcacggcaagtcgtcccagacagttgcagtgcatcaccctcagtacggcttctcggtacagggggagtatcaaggcagagtgctcttcaaaaactactccctaaacgacgcaaccattacattgcataacattggcttctccgactctgggaaatatatctgtaaggccgtgactttccctctgggaaatgcccagtcatccaccactgtcacagtcttggtagaacccacggtgagtctgattaaaggccctgacagcctgatcgacggtggcaatgagaccgtggctgcaatttgcatcgctgccacaggcaaacccgtagcccacatagactgggagggggatttgggggagatggagtctaccaccacatccttcccgaatgagaccgcgaccatcatctcacagtataaactcttccccacaagatttgctcgcgggagacgcattacttgtgttgtgaaacatcccgcactggaaaaggacattagatattccttcatcctggatattcagtatgcgcctgaagtgagtgtgactggatacgacggcaattggttcgtgggtaggaaaggggtgaatctgaagtgcaatgcggatgccaaccctccacccttcaagagtgtctggagtagacttgacgggcagtggccggacgggttgcttgctagcgataatacactgcacttcgtccaccccctgacctttaactacagtggagtctatatatgcaaggtgaccaattccctggggcagcggagtgatcagaaagtgatatatatctcagaccctccaacaactaccacattgcaaccaactattcagtggcatcctagtactgctgatatcgaagacctcgcaactgagccaaaaaagttaccatttcccttaagcacactggctacaatcaaagatgatacaatcgcaacaatcatcgcatccgtcgttgggggtgccttgttcatcgttctagtcagtgtcctggccggcattttctgttatcgccgcagacgaacattcagaggcgattattttgctaagaactacatacccccctctgatatgcagaaggaatcacagatcgatgtcctacaacaggacgagctcgattcataccccgattccgtcaaaaaggaaaacaagaatccagtgaacaatctaattcggaaagactacctggaagagccggagaagacccagtggaacaatgtcgaaaatctgaaccgattcgaacgacctatggattattacgaagatctgaagatggggatgaaattcgtctctgatgagcactacgatgagaacgaagacgacctagtctcccacgttgacggttccgttatcagtcggcgggagtggtacgtgtag

SEQ ID NO: 187000 - DNA, 1650 bp, Artificial Sequence
  derived and/or modified sequence
atggcccggaccctgcggcccagccccctgtgccctgggggcggcaaggcccagctgagcagcgccagcctgctgggcgccggcctgctgctgcagccccccaccccaccacccctgctgctgctgctcttccccctgctgctcttcagccggctgtgtggggccctggccggccccatcatcgtggagccccacgtgacagctgtgtggggcaagaatgtgtccctgaagtgcctgattgaggtgaatgagaccatcacccagatctcctgggagaagatccacggcaagagcagccagacagtggccgtgcaccacccccagtatggcttctctgtgcagggcgagtaccagggccgggtgctcttcaagaactacagcctgaatgatgccaccatcaccctgcacaacatcggcttcagtgacagcggcaagtacatctgcaaggctgtgaccttccccctgggcaatgcccagagcagcaccaccgtgacagtgctggtggagcccaccgtgtccctcatcaagggccctgacagcctgattgatggcggcaatgagaccgtggccgccatctgcatcgccgccaccgggaagcctgtggcccacatcgactgggagggggacctgggggagatggagagcaccaccaccagcttccccaatgaaacagccaccatcatcagccagtacaagctgttccccaccaggtttgcccggggccgccgcatcacctgtgtggtgaagcacccagccctggagaaggacatccgctacagcttcatcctggacatccagtatgcccctgaggtgtctgtgacaggctatgatggcaactggtttgtgggcaggaaaggagtgaacctgaagtgcaatgctgatgccaaccccccacccttcaagtctgtgtggagccggctggatggccagtggccagatggcctgctggccagtgacaacaccctgcactttgtgcaccccctgaccttcaactacagcggcgtgtacatctgcaaggtgaccaacagcctgggccagaggagtgaccagaaggtgatctacatcagtgacccccccaccaccaccaccctgcagcccaccatccagtggcaccccagcacagctgacatcgaggacctggccacagagcccaagaagctgcccttccccctgagcaccctggccaccatcaaggatgacaccatcgccaccatcatcgcctctgtggtgggcggggccctcttcatcgtgctggtgtctgtgctggccggcatcttctgctacagaagaagaaggaccttccggggggactactttgccaagaactacatccccccaagtgacatgcagaaggagagccagattgatgtgctgcagcaggatgagctggacagctacccagattctgtgaagaaggagaacaagaaccctgtgaacaacctgatcaggaaggactacctggaggagcctgagaagacccagtggaacaacgtggagaacctgaacagatttgagcggcccatggactactatgaggacctgaagatgggcatgaagtttgtgtctgatgagcactatgatgaaaatgaagatgacctggtgagccacgtggatggcagcgtcatcagccggcgggagtggtacgtgtag

SEQ ID NO: 187001 - DNA, 1650 bp, Artificial Sequence
  derived and/or modified sequence
atggcccggaccctgcggcccagccccctgtgccccggcggcggcaaggcacagcttagcagcgcttccctgttgggcgctggacttctcctccaaccccctacacctccacccctgctcctccttctttttcccctgctcttattttctaggctgtgtggcgcgctggctgggccaattatcgttgaaccacacgtaaccgcagtctggggcaaaaacgtgtccctgaagtgcctgattgaggtgaatgagaccattacacagatcagctgggaaaagatccatggcaaatcctcacagactgtagccgtccaccacccacagtatgggtttagcgtgcagggcgaataccagggacgcgtacttttcaagaactattctttaaacgatgccactatcaccctccacaacatcggattcagtgattctggcaagtatatttgcaaagccgtcacctttcctctgggaaacgcgcagtcctcaactacagtgacagtgcttgttgagcctacagtgtcactgatcaaaggacctgatagcctcattgacggaggtaacgagactgttgccgctatctgcatagcggcaaccggaaaaccggtggctcacattgattgggagggggatttgggcgagatggagtctacaaccacaagttttccaaacgaaacagctaccatcatttcccaatataaactgtttcctaccagatttgcccggggacgaaggatcacctgtgtggtcaagcaccctgcgctggagaaggacatccgttatagctttatcctggacattcaatacgcacccgaggtttctgtgacgggctatgatggaaactggtttgtaggacgaaagggggttaacttgaagtgtaatgccgacgcaaacccccctccattcaaaagtgtgtggtctcggctcgacggccagtggcctgatggcctgctggcgagtgataatacgttgcacttcgtgcatcctcttacctttaactactctggggtgtacatttgcaaagtcactaattcccttggtcagcggagtgatcagaaagtgatttatattagtgatccgcctactacaacaaccttgcaacccacaatccagtggcatccctccacagcagacatcgaggacttggccacagaacccaaaaaactgccttttcctctctctactctggctactataaaggacgatacaatagccaccattatcgcatcagtggtgggaggtgcactgtttatcgtgctggtcagcgtgttggctggcatcttctgttaccggcgaagacgcacattccgaggggattatttcgcaaaaaactacatccccccgagcgacatgcagaaggaatcgcagatagatgtgttgcaacaggacgaactggatagttaccccgatagcgttaagaaggagaacaagaacccagttaataatctgatacgcaaagactatcttgaggaacctgagaagacccagtggaacaatgttgagaatttgaaccgattcgagcgccccatggattactatgaagacctgaaaatgggtatgaaatttgtgtcagatgagcactatgatgagaatgaggatgacttagtgtcccacgtcgatggatccgtgattagtcgtagagaatggtacgtgtag

SEQ ID NO: 187002 - DNA, 3664 bp, Artificial Sequence
  derived and/or modified sequence
agttcccaggagttcgacgcgggcgggtgccgaggggaggggagtggcggcggcggcgggcggctcccgcttcagcctcggcagtggcgtcggcgacggcggtgtcgaggcagccgccagcgttcggccaagtgtcagccggcagcgacggcgctagagctgggagctggggacgcgcgcgccggaccttccacagcctccgcccagagcctgaggcgccggggccgggggagccggggggcgggcgggcgagcgggccggggggagggtgggggatggcgcggaccctgcggccgtccccgctgtgtcctggaggcggcaaagcacaactttcctccgcttctctcctcggagccgggctcctgctgcagcccccgacgccacctccgctgctgctgctgctcttcccgctgctgctcttctccaggctctgtggtgccttagctggaccaattattgtggagccacatgtcacagcagtatggggaaagaatgtttcattaaagtgtttaattgaagtaaatgaaaccataacacagatttcatgggagaagatacatggcaaaagttcacagactgttgcagttcaccatccccaatatggattctctgttcaaggagaatatcagggaagagtcttgtttaaaaattactcacttaatgatgcaacaattactctgcataacataggattctctgattctggaaaatacatctgcaaagctgttacattcccgcttggaaatgcccagtcctctacaactgtaactgtgttagttgaacccactgtgagcctgataaaagggccagattctttaattgatggaggaaatgaaacagtagcagccatttgcatcgcagccactggaaaacccgttgcacatattgactgggaaggtgatcttggtgaaatggaatccactacaacttcttttccaaatgaaacggcaacgattatcagccagtacaagctatttccaaccagatttgctagaggaaggcgaattacttgtgttgtaaaacatccagccttggaaaaggacatccgatactctttcatattagacatacagtatgctcctgaagtttcggtaacaggatatgatggaaattggtttgtaggaagaaaaggtgttaatctcaaatgtaatgctgatgcaaatccaccacccttcaaatctgtgtggagcaggttggatggacaatggcctgatggtttattggcttcagacaatactcttcattttgtccatccattgactttcaattattctggtgtttatatctgtaaagtgaccaattcccttggtcaaagaagtgaccaaaaagtcatctacatttcagatcctcctactactaccacccttcagcctacaattcagtggcatccctcaactgctgacatcgaggatctagcaacagaacctaaaaaattgcccttcccattgtcaactttggcaacaattaaggatgacacaattgccacgatcattgctagtgtagtgggtggggctctcttcatagtacttgtaagtgttttggctggaatattctgctataggagaagacggacgtttcgtggagactactttgccaagaactacattccaccatcagatatgcaaaaagaatcacaaatagatgttcttcaacaagatgagcttgattcttacccagacagtgtaaaaaaagaaaacaaaaatccagtgaacaatctaatacgtaaagactatttagaagagcctgaaaaaactcagtggaacaatgtagaaaatctcaataggtttgaaagaccaatggattattatgaagatctaaaaatgggaatgaagtttgtcagtgatgaacattatgatgaaaacgaagatgacttagtttcacatgtagatggttccgtaatttccaggagggagtggtatgtttagcaaccactgaatgtgacttaactatgtacaatgttcattcacactagttgatcattttcagattgttcatactttttcttgaggaagaataagctttttcaagttgattttcaagcttactttttatattctaatctgacaaatgaaaatgtaaaatctgagttcagtgtatctaagctgctttacaattttttttcaatgctgtactactgtctcaagatttaaattttaatgcagagtactttattggtgtgaggcacacaggtaagaagaaatgtcaacattaaatgtatgacttacttggtacaaaaattttttaaaaagggaactaccttgacattgtgtattaaatgtttacctaagactataatctcaagtatgatgtttgtttaacatatacctctcaaaatttatcaccactcaatgacactgcatcaaaattgactataaaactaattcaagaaatatttatatatattttttaatatacaaaaaatatttagcctgatggaatggctttccttttcaaacattattttctaagtttctatacaaatgaaatctttacctctgcatattaatgagccttgccataattactgtagagtggcttttcaaagatattttgttgcactaaaactgtggtagtaaactcagtgaacatgatgtgtggaagagcataattagctggtcaatatttttgtccaaaatacctgcaagagtaataaaatacatacctttcaaacatgataattattagtttttttttttcctttctggaacatggattttggtacattagcagtagccttattttaatgctttatgtcctaaacatactaatagaaatgaaaagacgcagagagagcatttcggaatactgaagtactagttttagaaatgagactttcagccaacaatctatagaaagaattttatggaccatcttgttttagttatttaatgttgatgttgttcaaatgggtaaatgtacagaaagaaaattttagagtaaacttggaactttggatataactagaaaaaactagattatagaattagtcggtaacacttgctaatggacattggcattcatctcctttttcctcctaagtgtatgtatgtgttttaagatttctgtttttacgattaaaactggaaacatgaggttttttgtttttgtttttttacataattacatatattccttctgaatcatttatcttttgagaaagaaatgttacctaaacttcaaatgtgctttttgtttgtgaggtaattaaattgcttctacagtggaggcttacaaaattattgtgacaactattttgaagctgaaaggatagtttttctattgctaagtcatttgaaaaagtgaccattttgccagtgaaatgaagtggaagttagtaggagaatcataaattaaatatattattttgttaataaaaaggcaaagtagtaggtactttttaaaccctcccaaccagccctttctcaatattcatcaaatctaaaacatttagggggcaaaattctaacatgttcatggtatcttgcaaatagtgaaagctttattctgaaggattataaactagttttcttcattttaactagcactattttgtggaaattagaaacctcttttatttctcttcccaaaagtaatacttattataaggctgtagtatcaggttaaggatacagataaataaagttcacttatatcttcttacaaa

SEQ ID NO: 187003 - DNA, 1650 bp, Artificial Sequence
  derived and/or modified sequence
atggctcgcaccctgcggcctagccctctatgccctgggggaggtaaagcccagctcagctctgccagtcttttgggcgctggcttgttgttacagccgccaacccctccaccgctgctcttactcctgttccccctgctcctgttctcaaggctgtgtggggcactggcaggaccaatcatcgtggagccacacgtgactgccgtgtgggggaagaacgtgtcactgaagtgtcttatcgaagttaatgaaacaattactcaaatatcctgggaaaaaatccacggaaaatcttctcaaaccgtggcagttcatcacccccagtacggcttttcagtgcagggcgagtatcaggggagggtgctgtttaagaattacagcctcaacgacgccacaatcacgctgcacaatatcggtttctcagacagcggtaaatacatatgcaaagccgtcaccttcccactgggtaacgcgcaaagctccacaacagtgacggtcttggtcgaacccactgtgtctctcattaaagggcctgatagcctcatcgatggaggcaatgaaaccgtcgccgctatctgcatcgcggctaccgggaagcctgtggcacacattgactgggagggagacctgggcgagatggagtcaactactacaagcttccctaatgaaaccgcgacaattatcagccagtacaaactctttccgacccgcttcgcaaggggcaggagaatcacctgcgtggtaaaacacccagctcttgaaaaggacatcagatacagctttattttagatatccagtacgccccagaagtgtccgtgaccggttacgacggtaactggttcgtggggaggaagggagtcaatctgaagtgtaacgccgacgcgaacccccctcccttcaagtctgtctggtccaggcttgacggacagtggccagatgggctactggcctccgacaacaccttgcacttcgtgcaccctttaactttcaattacagcggcgtatatatatgtaaggtgaccaactctctcggccaacgctctgaccagaaggtgatctatattagcgacccgcctacaacgaccactcttcagccaacaatccagtggcacccatccaccgcggatatcgaggacctagctaccgagccaaaaaaactgcccttcccattgagcacgcttgcaactataaaggatgatacgatcgccacaatcattgcctctgtagttggcggagcgctcttcatcgtgctcgtgagtgttctcgcaggtattttttgctatcgcaggcggcgaaccttcagaggcgattattttgccaaaaattacattccaccttctgacatgcaaaaagaatctcagatcgatgttcttcaacaggatgaacttgattcttaccctgactctgtgaaaaaagaaaataagaaccccgtgaataatctcataagaaaggactacctggaagagccagagaaaacccaatggaacaatgtggagaatctgaataggtttgagcgtcccatggactattacgaggatttaaagatgggaatgaagtttgtttctgacgagcattatgacgagaatgaggacgatttggtttctcacgtggacggaagcgtgattagtcggagagaatggtacgtatag

SEQ ID NO: 187004 - DNA, 1650 bp, Artificial Sequence
  derived and/or modified sequence
atggccagaaccctgagacccagccccctgtgccccggcggcggcaaggcccagctgagcagcgccagcctgctgggcgccggcctgctgctgcagccccccacccccccccccctgctgctgctgctgttccccctgctgctgttcagcagactgtgcggcgccctggccggccccatcatcgtggagccccacgtgaccgccgtgtggggcaagaacgtgagcctgaagtgcctgatcgaggtgaacgagaccatcacccagatcagctgggagaagatccacggcaagagcagccagaccgtggccgtgcaccacccccagtacggcttcagcgtgcagggcgagtaccagggcagagtgctgttcaagaactacagcctgaacgacgccaccatcaccctgcacaacatcggcttcagcgacagcggcaagtacatctgcaaggccgtgaccttccccctgggcaacgcccagagcagcaccaccgtgaccgtgctggtggagcccaccgtgagcctgatcaagggccccgacagcctgatcgacggcggcaacgagaccgtggccgccatctgcatcgccgccaccggcaagcccgtggcccacatcgactgggagggcgacctgggcgagatggagagcaccaccaccagcttccccaacgagaccgccaccatcatcagccagtacaagctgttccccaccagattcgccagaggcagaagaatcacctgcgtggtgaagcaccccgccctggagaaggacatcagatacagcttcatcctggacatccagtacgcccccgaggtgagcgtgaccggctacgacggcaactggttcgtgggcagaaagggcgtgaacctgaagtgcaacgccgacgccaaccccccccccttcaagagcgtgtggagcagactggacggccagtggcccgacggcctgctggccagcgacaacaccctgcacttcgtgcaccccctgaccttcaactacagcggcgtgtacatctgcaaggtgaccaacagcctgggccagagaagcgaccagaaggtgatctacatcagcgacccccccaccaccaccaccctgcagcccaccatccagtggcaccccagcaccgccgacatcgaggacctggccaccgagcccaagaagctgcccttccccctgagcaccctggccaccatcaaggacgacaccatcgccaccatcatcgccagcgtggtgggcggcgccctgttcatcgtgctggtgagcgtgctggccggcatcttctgctacagaagaagaagaaccttcagaggcgactacttcgccaagaactacatcccccccagcgacatgcagaaggagagccagatcgacgtgctgcagcaggacgagctggacagctaccccgacagcgtgaagaaggagaacaagaaccccgtgaacaacctgatcagaaaggactacctggaggagcccgagaagacccagtggaacaacgtggagaacctgaacagattcgagagacccatggactactacgaggacctgaagatgggcatgaagttcgtgagcgacgagcactacgacgagaacgaggacgacctggtgagccacgtggacggcagcgtgatcagcagaagagagtggtacgtgtag

SEQ ID NO: 187005 - protein, 686 aa, Artificial Sequence
  derived and/or modified sequence
MAIDRRREAAGGGPGRQPAPAEENGSLPPGDAAASAPLGGRAGPGGGAEIQPLPPLHPGGGPHPSCCSAAAAPSLLLLDYDGSVLPFLGGLGGGYQKTLVLLTWIPALFIGFSQFSDSFLLDQPNFWCRGAGKGTELAGVTTTGRGGDMGNWTSLPTTPFATAPWEAAGNRSNSSGADGGDTPPLPSPPDKGDNASNCDCRAWDYGIRAGLVQNVVSKWDLVCDNAWKVHIAKFSLLVGLIFGYLITGCIADWVGRRPVLLFSIIFILIFGLTVALSVNVTMFSTLRFFEGFCLAGIILTLYALRIELCPPGKRFMITMVASFVAMAGQFLMPGLAALCRDWQVLQALIICPFLLMLLYWSIFPESLRWLMATQQFESAKRLILHFTQKNRMNPEGDIKGVIPELEKELSRRPKKVCIVKVVGTRNLWKNIVVLCVNSLTGYGIHHCFARSMMGHEVKVPLLENFYADYYTTASIALVSCLAMCVVVRFLGRRGGLLLFMILTALASLLQLGLLNLIGKYSQHPDSGMSDSVKDKFSIAFSIVGMFASHAVGSLSVFFCAEITPTVIRCGGLGLVLASAGFGMLTAPIIELHNQKGYFLHHIIFACCTLICIICILLLPESRDQNLPENISNGEHYTRQPLLPHKKGEQPLLLTNAELKDYSGLHDAAAAGDTLPEGATANGMKAM

SEQ ID NO: 187006 - DNA, 2061 bp, Artificial Sequence
  derived and/or modified sequence
atggcgatcgatagaagacgggaagcagccggtgggggtcccgggcgtcaaccggcccccgccgaagagaatggctcccttccaccgggagatgctgccgcctccgcccctctcggcgggagggccgggcccggagggggagccgaaatacagcccctcccaccccttcaccccgggggaggtccacatccttcctgttgcagtgccgcggctgctccaagtttactcctgctggactatgatgggagcgtgctgcccttcctgggtggcttgggtggggggtaccagaagacgcttgtcctgctgacttggataccagccctttttataggcttctcacaattttctgattcatttttgctcgatcagcctaacttttggtgtagaggggccgggaaggggactgaactcgcaggagtgactaccacgggcagggggggcgatatgggaaattggaccagtctgcccacgacacctttcgcaacagctccatgggaggcagcgggtaaccggagtaattctagtggagctgatggtggagacacccctcctctgccttcacctccagataagggcgataatgcctccaattgtgattgcagagcctgggactacggcattcgggcaggtctggtccagaacgtcgtctcaaaatgggatctggtctgcgacaacgcttggaaagttcatattgcaaaattttccctgttagtgggccttatcttcggatatcttataactgggtgcatagccgactgggtaggacgcagaccggttctcctgttttccattatcttcatactcatctttggcctgacggtggccctttccgttaatgtaaccatgttcagcaccctgcggttctttgaaggcttttgcctggcggggattatcctgaccttgtacgcactgaggatcgagttatgtcctcctggcaaacgattcatgattaccatggtcgccagcttcgtggctatggcggggcaattcctaatgcctgggctggccgctctctgccgcgactggcaggtccttcaggcactcatcatctgtcctttcctgctcatgttgctatattggagcatattcccggagagtttgagatggttgatggccacgcaacagtttgagtctgccaaacgcttgattctgcactttactcagaagaaccggatgaatcccgagggcgacattaagggagtgattcccgagctcgagaaagaactcagccggaggcctaaaaaggtgtgtatcgtcaaagtcgttggaaccagaaacctctggaagaacatcgtggttctgtgcgtgaattcactcacgggctacggcatccaccattgttttgctaggtcaatgatgggacatgaggtcaaagtcccactactggaaaacttctacgcagactactatactacagccagcattgccctagtgagctgcctggccatgtgcgtggtagtccgattcctgggtcggcgaggaggcctgttattgtttatgatcctgaccgccctagcttctctgttgcagctgggtctgctgaacctcattggcaaatacagtcagcaccccgacagtggcatgtctgattcagtcaaggataaattctcaatagccttttctattgttggcatgttcgcctctcacgccgttggcagcctgtcggttttcttctgtgcggaaataacacctacggtgatacgctgtggaggactgggattggtgctcgcttcagccggcttcggaatgttgacagcaccaatcatcgagctgcacaatcagaaggggtattttttgcatcacatcatattcgcctgctgcacactgatctgcatcatttgtattttacttctgcccgaatcacgagatcagaatctcccagagaacatctcaaatggggaacattacacccgtcaacctctgctgccgcacaagaagggggaacaacctctcctgcttacaaatgccgagcttaaggactactcagggctccatgacgcagctgccgccggagacactctccctgagggtgccactgcaaacgggatgaaagccatgtag

SEQ ID NO: 187007 - DNA, 2061 bp, Artificial Sequence
  derived and/or modified sequence
atggccatcgacagaagaagagaagctgctgggggcggccctggccggcagcctgccccagcagaagaaaatggcagcctgcccccaggagatgctgctgccagcgcccccctgggcggccgggccggccctgggggcggcgctgagatccagcccctgccccccctgcaccctgggggcggcccccaccccagctgctgcagcgctgctgctgcccccagcctgctgctgctggactatgatggctctgtgctgcccttcctgggcggcctgggcggcggctaccagaagaccctggtgctgctgacctggatcccagccctcttcatcggcttcagccagttcagtgacagcttcctgctggaccagcccaacttctggtgcagaggagctggaaaaggaacagagctggccggcgtgaccaccaccggccggggcggggacatgggcaactggaccagcctgcccaccaccccatttgccacagccccctgggaggccgccggcaacagaagcaacagcagtggagcagatggaggagacaccccacccctgcccagccccccagacaagggggacaatgccagcaactgtgactgccgggcctgggactatggcatccgggccggcctggtgcagaatgtggtgtccaagtgggacctggtgtgtgacaatgcctggaaggtgcacatcgccaagttcagcctgctggtgggcctcatcttcggctacctgatcaccggctgcatcgctgactgggtgggccggcggcctgtgctgctcttcagcatcatcttcatcctgatcttcggcctgactgtggccctgtctgtgaatgtgaccatgttcagcaccctgcgcttctttgagggcttctgcctggccggcatcatcctgaccctgtatgccctgcgcatcgagctgtgccccccaggcaagcgcttcatgatcaccatggtggccagctttgtggccatggccggccagttcctgatgcctggcctggccgccctgtgccgggactggcaggtgctgcaggccctgatcatctgccccttcctgctgatgctgctgtactggagcatcttccctgagagcctgcgctggctgatggccacccagcagtttgagagcgccaagaggctcatcctgcacttcacccagaagaacaggatgaaccctgagggggacatcaagggcgtcatccctgagctggagaaggagctgagcagaagacccaagaaggtgtgcatcgtgaaggtggtgggcaccaggaacctgtggaagaacatcgtggtgctgtgtgtgaacagcctgaccggctacggcatccaccactgctttgcccgctccatgatgggccacgaggtgaaggtgcccctgctggagaacttctatgctgactactacaccacagccagcatcgccctggtgtcctgcctggccatgtgtgtggtggtgcgcttcctgggccggcggggcggcctgctgctcttcatgatcctgacagccctggccagcctgctgcagctgggcctgctgaacctgattggcaagtacagccagcacccagacagcggcatgtctgattctgtgaaggacaagttcagcatcgccttcagcatcgtgggcatgtttgccagccatgctgtgggcagcctgtctgtgttcttctgtgccgagatcacccccaccgtcatccgctgtggcggcctgggcctggtgctggccagcgctggcttcggcatgctgacagcccccatcatcgagctgcacaaccagaagggctacttcctgcaccacatcatctttgcctgctgcaccctcatctgcatcatctgcatcctgctgctgcctgagagccgggaccagaacctgcctgagaacatcagcaatggagagcactacacccggcagcccctgctgccccacaagaagggggagcagcccctgctgctgaccaatgctgagctgaaggactacagcggcctgcatgatgctgctgctgctggggacaccctgcctgagggcgccacagccaacggcatgaaggccatgtag

SEQ ID NO: 187008 - DNA, 2061 bp, Artificial Sequence
  derived and/or modified sequence
atggccatcgaccggcggcgggaggccgccggcggcggccccggccgccagccagcccctgccgaggaaaacgggtctctcccgccaggcgacgctgcagcttcagcaccactgggcgggcgggccggcccaggcggaggtgctgagattcagcctctcccccccctgcacccaggtgggggccctcatcctagctgttgtagcgctgcagccgctccatctcttctgctcctggattacgacggcagtgtgctcccgtttctgggcgggcttgggggaggctaccagaagacattggtacttcttacttggatccccgccctctttatcggcttctctcagttctcagatagtttcttgctggaccagcctaatttttggtgcaggggcgcggggaaggggacagagttagccggggttactaccacaggtcggggtggcgacatgggtaactggacctcacttccaaccaccccctttgccactgccccgtgggaggccgctgggaaccgatcaaacagcagcggcgctgatggcggagatacgccacccctccctagtccccccgacaaaggcgacaacgcctcaaactgcgactgccgagcatgggattacgggattcgcgccggtctcgtgcagaatgtggtatcaaaatgggatctggtgtgtgataatgcctggaaagtccacattgctaagtttagcttgttagtggggttgattttcgggtacctcatcaccggctgtatcgcagattgggttgggcgccgccccgttttgctcttcagcatcattttcatcctgattttcggcctgacagtggccttgtcagtcaacgtgactatgtttagcaccttaagattctttgaaggtttttgtctagcgggcatcattctgactctgtacgctttgcggattgaattgtgtccaccaggtaagcggttcatgataacgatggttgcttctttcgtggctatggccggtcagttccttatgccaggactagccgcattatgccgcgactggcaagtcctccaagccttgatcatttgtcctttcttactgatgcttctgtattggagcatctttccggagagtcttagatggctgatggccacccagcagtttgagtccgccaaacggttaatcctccactttacacaaaaaaatcgcatgaacccggagggcgacattaagggtgtgattcccgagctggaaaaagagctgtcccggaggccaaagaaagtatgcattgtcaaggtagtgggcacaagaaatctgtggaagaatatcgttgtgctgtgcgttaacagcctgactggctatggaattcaccactgtttcgctcggtctatgatgggccacgaggttaaagtgcccctcctcgaaaacttctatgcagactattacacgacggcctccattgcattagtgtcatgccttgctatgtgtgtcgttgttaggttcctggggaggcggggcggactgctgctttttatgatcctgaccgctctcgcgtcactgctgcagctgggactgctcaacctgatcggcaagtactcccagcatcctgattctggcatgtccgattctgtgaaggataaatttagcattgcatttagtatagtcgggatgttcgctagtcacgcggtgggaagcctgtcagtcttcttctgcgccgagattacaccaaccgtgattagatgcggaggtctgggtctagtgctggctagcgccgggttcgggatgttgaccgcccccatcatcgagctccataatcagaagggctacttcctgcaccacatcatctttgcatgctgcacactgatttgtattatttgcatcctcctgctgcccgagagtagggatcagaatttgcccgagaatatctctaacggagagcactacaccaggcaaccattgctgccgcacaagaaaggagagcaacccttgctgctgactaatgcagaactgaaggactacagcggcctccatgatgctgccgccgctggggatacgctgcccgagggtgccaccgcaaatggaatgaaggcgatgtag

SEQ ID NO: 187009 - DNA, 2061 bp, Artificial Sequence
  derived and/or modified sequence
atggccatcgaccggagacgggaggctgccggtggaggaccaggaaggcagccggctcctgcggaagagaatggttcccttcctccaggggatgccgcagcctctgccccactaggaggcagagctggtcctggtggtggggctgagattcaaccactgccccctctgcatcctggtgggggtccccacccttcttgctgttccgcagccgcagctccttccctgcttttactcgattacgacggatctgtgctgccgtttctgggtgggctgggcggagggtaccagaagactctcgtcctgctgacctggattccggctttgtttattggttttagtcagttcagcgactcctttttgctggatcaacccaatttctggtgtcgtggagccggaaagggaaccgagctcgccggagtgaccaccaccggacgcggaggggacatgggcaactggacctcactgcccaccactccgttcgccactgccccatgggaagccgctgggaaccgtagtaactcatcaggagcagatggcggagacactccacccctgccctcccccccagacaaaggagataacgcaagcaattgtgactgtcgggcatgggactatggtattcgcgctgggttggttcagaacgtcgtttctaaatgggatctcgtctgtgacaacgcgtggaaagtgcatatcgctaagttctctctgctggtggggctgattttcggttacctgatcacagggtgcattgccgactgggtcgggaggcggcctgtgctgctgttctctattatctttatcctgatttttggcctgacagtggctcttagcgttaacgtgactatgttcagcaccctccggttctttgagggtttttgcctagctggtatcatcttgactctgtatgccctgcggatagaactatgccctccgggaaagagattcatgattacgatggtggcaagcttcgtggctatggctggccaatttttgatgccaggacttgctgcactttgccgagactggcaggtattacaggccctcattatttgccctttcctcctgatgcttctgtactggtccatctttccagagtcgctgcgttggttaatggccactcagcagttcgagtccgctaagcgactgattctacactttactcaaaaaaacagaatgaaccccgaaggggatattaagggtgtcattcccgagttggaaaaggaactttctaggagacctaagaaagtctgtattgtaaaggtggtggggaccagaaacctctggaaaaacattgtagtgctgtgtgtgaactcgctgaccggatacggcattcaccattgttttgcgcgttctatgatgggacacgaggtgaaagtgccactactggaaaacttctacgcagattattacaccactgcttccattgccctcgttagttgcctcgccatgtgcgtagtggtgagattcttggggagaagaggcggactgcttcttttcatgatactgaccgctttggctagcctcctccagctgggcctcttgaacctgattggtaagtattcacagcaccccgattctggcatgagcgattctgtcaaagacaaattttccattgctttcagcatcgttggtatgtttgcttcccatgctgtgggttcgttgagtgtgttcttctgtgccgagatcaccccaaccgtcatccgctgtgggggattagggctggtgctggcttccgctggtttcggaatgctgaccgccccaatcatagaactccataatcagaaaggatatttcctgcaccacataatttttgcctgttgcactctgatatgcataatttgcatcctgctgctccccgagtctcgcgatcagaacctccctgaaaatatctcaaacggagagcactatacgcggcaacctctgttacctcacaaaaagggcgaacaacctctcctgctgaccaatgccgagctcaaagactattctggactgcatgatgccgctgcagccggtgacacactgcccgagggagccacggccaacggtatgaaggcaatgtag

SEQ ID NO: 187010 - DNA, 2883 bp, Artificial Sequence
  derived and/or modified sequence
aaacagcccccaccctggaagcctcaggtgccttccttcctccccttggtggggtgaggacgaccgggatgagtcgtctgagaagcactttgaggggggaggagctgaaggccacacctggaagggcgatttattccttgggcgctgccaggtgtctgccgccttcacccagaaaccgatgatgttcggagccagtgggatcttgtgtgtgataatgcctggaaggtccatatcgctaagttctccttactggttggattaatctttggctacctaataactggatgcattgctgactgggtcggccggcggcctgtgctgctgttttccatcatcttcattctgatctttggactgactgtggcactgtcagtgaatgtgacaatgttcagcacactcaggttctttgaaggattttgcctggctggaatcattctcaccttgtatgctttacgaatagagctgtgcccccctggaaaacggttcatgattacgatggtggcgagcttcgtggccatggcgggccagttcctcatgcctgggctagccgccctgtgccgggattggcaggtgctgcaggccctcatcatctgccccttcctgctcatgctgctctactggtcgatattccccgagtccctccggtggctaatggccacccagcagtttgagtctgcaaagaggctgatcctccacttcacacagaagaatcgcatgaaccctgagggcgacatcaagggtgtgataccagagctggagaaagagctttcccggaggcccaagaaggtctgcatcgtgaaggtggtggggacacggaacctgtggaagaacattgtggtcctgtgtgtgaactcgctgacggggtacgggatccaccactgctttgccaggagcatgatgggccacgaggtgaaggtgccgctcctggagaacttctatgctgactactataccacggccagcatcgcgctggtgtcctgcctggccatgtgcgtggtggtccgattcctcgggcgcaggggagggctgctgctcttcatgatcctcaccgccctggcctcactcctgcagctcggcctcctcaacctgattggaaagtacagccagcacccagactcagggatgagtgacagcgtcaaggacaaattttccatcgcgttttccatcgtgggcatgtttgcctcccatgcggtggggagcctcagcgtgttcttctgtgcggagatcaccccgacggtgataaggtgtggcgggctggggctggtgctggccagcgcgggcttcggcatgctgacggcacccatcatcgagctgcacaaccagaaaggctacttcctgcaccacatcatctttgcctgctgcacgctcatctgcatcatctgcatcctcctgctgcccgagagcagggaccagaacctgcctgagaacatttctaacggggagcactacacgcgccagccgctgctgccgcacaagaagggggagcagccactgctgctcaccaacgccgagctcaaggactactcgggcctccacgatgccgcagccgcgggtgacacactgcccgagggtgccacggccaacggcatgaaggccatgtagcccggcctgcggaacccggggctccagggtctggggcagcttgggcacaggtttacagaccagggaccgaacacgcagccaggggtgggaaagctgcctcagccaagctgagcctctcaactggtgtggggaaatcctgtctttccaaaagtccaaggagcgcgggtcggaggagacaaactctttggaaataaccctttcaagactttcttttctgccgttaaatgtgtgtatttattttggtcatttttacgagaagcactttattccctctccctctcactgatcacaaatggaatcacctccctgggcagcgagacgcagttgctctgggaagatgccacagtgaccagggccatggccggtccctctggggagatgggacacggctcctggcagcacccaggagccccccaggctgcctgcctgcgtgcagaggcaggagaggaccgtggagcgtttccgggactgcattttagacggagtgaaatgtacatgaatttggcttttgctagagtctgtgtatggttttttaaggtcctttttccctttctgtttgtaaggtaagagcttctgttcgtgtgcagggaaagcagctcacagacgccgttaaaaccagcttcatctttccttcaggatcatccttttgtacttgatgctggaagctcttggagaaaaagcttaaacatttcaccagaaatcttaattgagcagcagtcatatcgccacagctttgtgagtacacagctaacagatgcgtcgagacctgagatgtgctcgtttttattcctcctctcccagattggctccagcagaaaagtccctcgtgcacaggcagctcttgtgccggcactacttgaaaacatggctactttctaagctacaaaccattagaaaataactcaaaaagatggcagaggcaaatccacagaaggggggctgccctccacacacacacgcccgtcacccacaccttgagcacacaccatgaagatcaccagcttggatggccgtcacctcagacatcactccagggagcacccgcaggagctgggccccctcacgcctgccttcctgggccagcttcctgcttgcagtcactcgcatagcacagaggtggggcttcgggcagggagcggagattcctcataggtgagtccaaatgacctccagcctctcgaaggcatcaagacaaattgaaagaaagcaataactcaccaaagctcaacgctgcccctgcctcgacctccatgggtctcttcgtgttcctcgtttcacccc

SEQ ID NO: 187011 - DNA, 5658 bp, Artificial Sequence
  derived and/or modified sequence
atggccatagaccggcggcgcgaggcggcgggcggcgggcctgggcggcagccggccccggccgaggagaacggctccctgccgcccggggacgcggcggcctcggcgcccctcgggggacgcgcgggccccggcggcggcgcggagatccagccgctgcccccactgcatcctggaggcggcccgcacccgagctgctgctccgcggctgcggccccgagcctcttgttgctggactatgacgggtcggtgctgcccttcctcgggggcctgggcgggggctatcagaagaccctcgtgctgctcacctggatcccggcgctgttcatcggcttcagccagttctcggactcgttcctcctggaccagcccaacttctggtgccgcggggccggcaaaggcaccgagctggcaggggtcaccaccacaggccggggcggggacatgggcaactggaccagcctccccaccacccccttcgccactgccccctgggaggctgcgggcaaccggagcaacagcagcggcgcggacggaggcgacacaccacccctgccatcccctccggacaagggggacaacgcctccaactgtgactgccgcgcatgggactacggcatccgcgccggcctcgtccagaacgtggtcagcaagtgggatcttgtgtgtgataatgcctggaaggtccatatcgctaagttctccttactggttggattaatctttggctacctaataactggatgcattgctgactgggtcggccggcggcctgtgctgctgttttccatcatcttcattctgatctttggactgactgtggcactgtcagtgaatgtgacaatgttcagcacactcaggttctttgaaggattttgcctggctggaatcattctcaccttgtatgctttacgaatagagctgtgcccccctggaaaacggttcatgattacgatggtggcgagcttcgtggccatggcgggccagttcctcatgcctgggctagccgccctgtgccgggattggcaggtgctgcaggccctcatcatctgccccttcctgctcatgctgctctactggtcgatattccccgagtccctccggtggctaatggccacccagcagtttgagtctgcaaagaggctgatcctccacttcacacagaagaatcgcatgaaccctgagggcgacatcaagggtgtgataccagagctggagaaagagctttcccggaggcccaagaaggtctgcatcgtgaaggtggtggggacacggaacctgtggaagaacattgtggtcctgtgtgtgaactcgctgacggggtacgggatccaccactgctttgccaggagcatgatgggccacgaggtgaaggtgccgctcctggagaacttctatgctgactactataccacggccagcatcgcgctggtgtcctgcctggccatgtgcgtggtggtccgattcctcgggcgcaggggagggctgctgctcttcatgatcctcaccgccctggcctcactcctgcagctcggcctcctcaacctgattggaaagtacagccagcacccagactcagggatgagtgacagcgtcaaggacaaattttccatcgcgttttccatcgtgggcatgtttgcctcccatgcggtggggagcctcagcgtgttcttctgtgcggagatcaccccgacggtgataaggtgtggcgggctggggctggtgctggccagcgcgggcttcggcatgctgacggcacccatcatcgagctgcacaaccagaaaggctacttcctgcaccacatcatctttgcctgctgcacgctcatctgcatcatctgcatcctcctgctgcccgagagcagggaccagaacctgcctgagaacatttctaacggggagcactacacgcgccagccgctgctgccgcacaagaagggggagcagccactgctgctcaccaacgccgagctcaaggactactcgggcctccacgatgccgcagccgcgggtgacacactgcccgagggtgccacggccaacggcatgaaggccatgtagcccggcctgcggaacccggggctccagggtctggggcagcttgggcacaggtttacagaccagggaccgaacacgcagccaggggtgggaaagctgcctcagccaagctgagcctctcaactggtgtggggaaatcctgtctttccaaaagtccaaggagcgcgggtcggaggagacaaactctttggaaataaccctttcaagactttcttttctgccgttaaatgtgtgtatttattttggtcatttttacgagaagcactttattccctctccctctcactgatcacaaatggaatcacctccctgggcagcgagacgcagttgctctgggaagatgccacagtgaccagggccatggccggtccctctggggagatgggacacggctcctggcagcacccaggagccccccaggctgcctgcctgcgtgcagaggcaggagaggaccgtggagcgtttccgggactgcattttagacggagtgaaatgtacatgaatttggcttttgctagagtctgtgtatggttttttaaggtcctttttccctttctgtttgtaaggtaagagcttctgttcgtgtgcagggaaagcagctcacagacgccgttaaaaccagcttcatctttccttcaggatcatccttttgtacttgatgctggaagctcttggagaaaaagcttaaacatttcaccagaaatcttaattgagcagcagtcatatcgccacagctttgtgagtacacagctaacagatgcgtcgagacctgagatgtgctcgtttttattcctcctctcccagattggctccagcagaaaagtccctcgtgcacaggcagctcttgtgccggcactacttgaaaacatggctactttctaagctacaaaccattagaaaataactcaaaaagatggcagaggcaaatccacagaaggggggctgccctccacacacacacgcccgtcacccacaccttgagcacacaccatgaagatcaccagcttggatggccgtcacctcagacatcactccagggagcacccgcaggagctgggccccctcacgcctgccttcctgggccagcttcctgcttgcagtcactcgcatagcacagaggtggggcttcgggcagggagcggagattcctcataggtgagtccaaatgacctccagcctctcgaaggcatcaagacaaattgaaagaaagcaataactcaccaaagctcaacgctgcccctgcctcgacctccatgggtctcttcgtgttcctcgtttcaccccagaaagtggaggtttcctcttggcattttcggaggaaacttgtaggacacccaaggcgactaagagacagcctccttggcaagggcaggcaccactttgtagcaacttgggcaccagcttttctggacagcctggcttcttactggcattgtccaactcatcccttctcgaagcatgtctttgccatgggctgtgtccttccagggaaattgtggtctcgggcctgggtgagacaatgaagtgacttccaaccgacagttgctagaattcacagggcagaaaaggggttgaccttctccccttctggctttccacccggcctgctgcttgctgtcgccactcatgtctcctccacatgcggtccacacatcagtaagggcctggagatgtgtaaagacacagcaaggggcaagcagactcttggccacgtgtttccagtggctggaccacgccgacacctgggatcttgagatacccaggaagggaggctgtctggccagcctctccctgcctccacttgctccacgtccagctcctcaccttccctcttttttaaagtcacatttccatgtttcaacattagtttgcattcacctttacaaaggcctttctttagatctgtgcagcctttgcgtgccaaacttgtgaaattccttttaccttttttggagtacttgctataaagccacctgtcaacaaacccccattatgtacagaataggacctatccagtagccaggccagtaggcagttggggaaggtgggaaggatccagcgaggcccctgagcctgcacctggacaggtgtacgtctgcacccatcaccctcagcaccaggccaccctgcagtccacttactgtactgtgttgtggaaggatatgctaagtgatgaaagttgcgagcagtctcactggtcgtgtaaacttttttttttttttggaaattgaagctgtagagtgctgcccgaaatctctaggaagttggtggcaagggacagcactcacactcttctggtcatgatctctgatctccacctcaaatgacaataaaaaactggtccaacgaagacactgctcagcacttcagccatcaggactaatccatcgatgactggaaaagaggctagctttgaggaaaacagcctgggctcttgggagcagagtccagtgggtgtgaggctgacttgccgacggtcggcaggtaatggctctcagccggcgaggcggtcccacagctctcctcccagggcagcctgaggaggaggaggccgggtgcctgtttggtggcagcttcagcctagggatacctgaagctgttgagcaacacctttatgaaatgttgccagagcagcaacacttccctgtgggcacagccccgggaaatccggtaccaagtgagcaaggtggcaggacccacccaagcctgatacgcatctgggcccgccgggctcagcaggggaggctgctacggctgcccacttcccagcaccgtctgtcacgcttgaacccctctgtgctgttcccttcctggctaatagggagacccttcgcaggcacccactgtttcaacttgaccctcccaccccctgctactctcctccacacacccctccgttccgctagcctaccctgtcagcctttcaataaaagttatgcacaaatgtgaacacctgagatggagctgaacatttcttcactttgttctttttctgaagtcaaactcttatcaaatgccctaaaattattaccacccaagagaaacaggaaaaaggttacatgtttttgtttactgagagtaagatcacctgcatctggaagacgggctggtaaattggtttggctacagaacagaaagaaaacaaaaacaaacctcgtaagggaagtatcacactcagacaccaccgcttcctagagccaaatgagcaatcccaaactgcaagtgccataagtgggcctgtgaggtcacaccgcccggcccgaggtatcgcatgtgcgggggaggtccacactacagctgtcctctcgtctagaaggcaccacctcgctttcatgtcccgtgtgttttggaaaagcagtatggtgtgtcatgtctagcggcgaacacttccctccctgtccttgaggttgtaatataaaaactgtgtttctgtacgtgtgggtgggaattctctgacggtgctcgttcatagcacaagcttacgctgagttctgaactgtcgttcacagctgcgtgtctgcatggtgtcgcatctgttgtacctttggggaaaatttgtatgtaaatgtacagaaataaaaacgttgccccattaacaga

SEQ ID NO: 187012 - DNA, 2043 bp, Artificial Sequence
  derived and/or modified sequence
gccttccttcctccccttggtggggtgaggacgaccgggatgagtcgtctgagaagcactttgaggggggaggagctgaaggccacacctggaagggcgatttattccttgggcgctgccaggtgtctgccgccttcacccagaaaccgatgatgttcggagccaggcttcttcaaagtctcacagccagcctaccctcaaagcctgagtgattgtggaaggagccagcgttcactcagcagaggaacagagctttcctgccgcaggctctcagtgaagatccagggagcagaggcgtgggcaaggagcactgggctcagatgcaggagaaccggtttgaaccctagcactaccgcctctacactgaggaaccttggggattactcagccccctggaacctaatttccaagtgggatcttgtgtgtgataatgcctggaaggtccatatcgctaagttctccttactggttggattaatctttggctacctaataactggatgcattgctgactgggtcggccggcggcctgtgctgctgttttccatcatcttcattctgatctttggactgactgtggcactgtcagtgaatgtgacaatgttcagcacactcaggttctttgaaggattttgcctggctggaatcattctcaccttgtatgctttacgaatagagctgtgcccccctggaaaacggttcatgattacgatggtggcgagcttcgtggccatggcgggccagttcctcatgcctgggctagccgccctgtgccgggattggcaggtgctgcaggccctcatcatctgccccttcctgctcatgctgctctactggtcgatattccccgagtccctccggtggctaatggccacccagcagtttgagtctgcaaagaggctgatcctccacttcacacagaagaatcgcatgaaccctgagggcgacatcaagggtgtgataccagagctggagaaagagctttcccggaggcccaagaaggtctgcatcgtgaaggtggtggggacacggaacctgtggaagaacattgtggtcctgtgtgtgaactcgctgacggggtacgggatccaccactgctttgccaggagcatgatgggccacgaggtgaaggtgccgctcctggagaacttctatgctgactactataccacggccagcatcgcgctggtgtcctgcctggccatgtgcgtggtggtccgattcctcgggcgcaggggagggctgctgctcttcatgatcctcaccgccctggcctcactcctgcagctcggcctcctcaacctgattggaaagtacagccagcacccagactcagggatgagtgacagcgtcaaggacaaattttccatcgcgttttccatcgtgggcatgtttgcctcccatgcggtggggagcctcagcgtgttcttctgtgcggagatcaccccgacggtgataaggtgtggcgggctggggctggtgctggccagcgcgggcttcggcatgctgacggcacccatcatcgagctgcacaaccagaaaggctacttcctgcaccacatcatctttgcctgctgcacgctcatctgcatcatctgcatcctcctgctgcccgagagcagggaccagaacctgcctgagaacatttctaacggggagcactacacgcgccagccgctgctgccgcacaagaagggggagcagccactgctgctcaccaacgccgagctcaaggactactcgggcctccacgatgccgcagccgcgggtgacacactgcccgagggtgccacggccaacggcatgaaggccatgtagcccggcctgcggaacccggggctccagggtctggggcagcttgggcacaggtttacagaccagggaccgaacacgcagccaggggtgggaaagctgcctcagccaagctgagcctctcaactggtgtggggaaatcctgtctttccaaaagtccaaggagcgcgggtcggaggagacaaactctttggaaataaccctttcaagactttcttttctgccgttaaa

SEQ ID NO: 187013 - DNA, 2061 bp, Artificial Sequence
  derived and/or modified sequence
atggccatcgacagaagaagagaggccgccggcggcggccccggcagacagcccgcccccgccgaggagaacggcagcctgccccccggcgacgccgccgccagcgcccccctgggcggcagagccggccccggcggcggcgccgagatccagcccctgccccccctgcaccccggcggcggcccccaccccagctgctgcagcgccgccgccgcccccagcctgctgctgctggactacgacggcagcgtgctgcccttcctgggcggcctgggcggcggctaccagaagaccctggtgctgctgacctggatccccgccctgttcatcggcttcagccagttcagcgacagcttcctgctggaccagcccaacttctggtgcagaggcgccggcaagggcaccgagctggccggcgtgaccaccaccggcagaggcggcgacatgggcaactggaccagcctgcccaccacccccttcgccaccgccccctgggaggccgccggcaacagaagcaacagcagcggcgccgacggcggcgacaccccccccctgcccagcccccccgacaagggcgacaacgccagcaactgcgactgcagagcctgggactacggcatcagagccggcctggtgcagaacgtggtgagcaagtgggacctggtgtgcgacaacgcctggaaggtgcacatcgccaagttcagcctgctggtgggcctgatcttcggctacctgatcaccggctgcatcgccgactgggtgggcagaagacccgtgctgctgttcagcatcatcttcatcctgatcttcggcctgaccgtggccctgagcgtgaacgtgaccatgttcagcaccctgagattcttcgagggcttctgcctggccggcatcatcctgaccctgtacgccctgagaatcgagctgtgcccccccggcaagagattcatgatcaccatggtggccagcttcgtggccatggccggccagttcctgatgcccggcctggccgccctgtgcagagactggcaggtgctgcaggccctgatcatctgccccttcctgctgatgctgctgtactggagcatcttccccgagagcctgagatggctgatggccacccagcagttcgagagcgccaagagactgatcctgcacttcacccagaagaacagaatgaaccccgagggcgacatcaagggcgtgatccccgagctggagaaggagctgagcagaagacccaagaaggtgtgcatcgtgaaggtggtgggcaccagaaacctgtggaagaacatcgtggtgctgtgcgtgaacagcctgaccggctacggcatccaccactgcttcgccagaagcatgatgggccacgaggtgaaggtgcccctgctggagaacttctacgccgactactacaccaccgccagcatcgccctggtgagctgcctggccatgtgcgtggtggtgagattcctgggcagaagaggcggcctgctgctgttcatgatcctgaccgccctggccagcctgctgcagctgggcctgctgaacctgatcggcaagtacagccagcaccccgacagcggcatgagcgacagcgtgaaggacaagttcagcatcgccttcagcatcgtgggcatgttcgccagccacgccgtgggcagcctgagcgtgttcttctgcgccgagatcacccccaccgtgatcagatgcggcggcctgggcctggtgctggccagcgccggcttcggcatgctgaccgcccccatcatcgagctgcacaaccagaagggctacttcctgcaccacatcatcttcgcctgctgcaccctgatctgcatcatctgcatcctgctgctgcccgagagcagagaccagaacctgcccgagaacatcagcaacggcgagcactacaccagacagcccctgctgccccacaagaagggcgagcagcccctgctgctgaccaacgccgagctgaaggactacagcggcctgcacgacgccgccgccgccggcgacaccctgcccgagggcgccaccgccaacggcatgaaggccatgtag

SEQ ID NO: 187014 - protein, 385 aa, Artificial Sequence
  derived and/or modified sequence
MAAVVAATALKGRGARNARVLRGILAGATANKASHNRTRALQSHSSPEGKEEPEPLSPELEYIPRKRGKNPMKAVGLAWYSLYTRTWLGYLFYRQQLRRARNRYPKGHSKTQPRLFNGVKVLPIPVLSDNYSYLIIDTQAQLAVAVDPSDPRAVQASIEKEGVTLVAILCTHKHWDHSGGNRDLSRRHRDCRVYGSPQDGIPYLTHPLCHQDVVSVGRLQIRALATPGHTQGHLVYLLDGEPYKGPSCLFSGDLLFLSGCGRTFEGNAETMLSSLDTVLGLGDDTLLWPGHEYAEENLGFAGVVEPENLARERKMQWVQRQRLERKGTCPSTLGEERSYNPFLRTHCLALQEALGPGPGPTGDDDYSRAQLLEELRRLKDMHKSK

SEQ ID NO: 187015 - DNA, 1158 bp, Artificial Sequence
  derived and/or modified sequence
atggctgccgtcgtcgctgcaacagcgcttaaggggcgcggtgcgaggaacgccagggtcctgcgcggaatactagccggcgccactgcgaacaaagcgtctcacaacaggactcgggctctccagagccattctagccctgaaggtaaagaggaaccagagccactcagtcctgagctggagtacatcccgcggaaacggggaaagaacccaatgaaggccgtcggtttagcctggtactccctctacacacgaacttggctgggatacctcttttacagacagcagctgaggagggcaaggaatcgctaccctaagggacattccaagactcagccaaggcttttcaatggcgttaaagtcctgcctatccccgtccttagcgacaactactcatatctcattatcgatactcaggcccagctggccgtagccgttgatccatccgaccctagggccgttcaggcttcaattgagaaggaaggggttactctcgtggcgatcctgtgcacacataaacattgggaccactccggtggcaacagagacctaagtcgccgtcatagagactgcagggtctatggcagtccccaggatggtattccttatctgactcacccactatgccaccaggatgtcgtctcagttggacgcctgcagatccgggcactcgcaacgccaggacatacccaaggccacctggtatatctgctggatggggaaccgtataaaggtcccagctgtctgttctcaggagatctgctgtttctgagtggctgtggccggaccttcgagggcaacgctgaaaccatgctgtcgtccctggacactgttttgggtctgggagacgatacgcttctttggcccggccatgagtatgctgaagaaaatcttgggttcgcgggggtcgtagagccagagaatctggcccgcgagcgtaagatgcaatgggtgcagaggcagcggctggagagaaaagggacatgccccagcacactcggagaagagaggagctataatcccttcctgaggacgcactgccttgcactccaagaagccctgggtcctggaccaggtcctacaggtgatgacgactattctagggcacaactgctcgaggagctcaggcggttgaaggatatgcacaaatctaagtag

SEQ ID NO: 187016 - DNA, 1158 bp, Artificial Sequence
  derived and/or modified sequence
atggctgctgtggtggccgccacagccctgaagggccgcggggccagaaatgcccgggtgctgcggggcatcctggccggggccacagccaacaaggccagccacaacagaacccgggccctgcagagccacagcagccctgagggcaaggaggagcctgagcccctgagccctgagctggagtacatccccaggaagaggggcaagaaccccatgaaggctgtgggcctggcctggtacagcctgtacaccaggacctggctgggctacctgttctaccggcagcagctgcggcgggccaggaaccgctaccccaagggccacagcaagacccagcccaggctcttcaatggagtgaaggtgctgcccatccctgtgctgagtgacaactacagctacctgatcatcgacacccaggcccagctggccgtggccgtggaccccagcgaccccagggctgtgcaggccagcattgagaaggagggcgtgaccctggtggccatcctgtgcacccacaagcactgggaccacagcggcggcaacagagacctgagccgccgccaccgggactgccgggtgtatggcagcccccaggacggcatcccctacctgacccaccccctgtgccaccaggatgtggtgtctgtgggccgcctgcagatccgggccctggccaccccaggccacacccagggccacctggtgtacctgctggatggagagccctacaagggccccagctgcctcttcagcggggacctgctcttcctgagcggctgcggccgcacctttgagggcaatgctgagaccatgctgagcagcctggacacagtgctgggcctgggagatgacaccctgctgtggccaggccatgaatatgcagaggagaacctgggctttgctggggtggtggagcctgagaacctggcccgggagaggaagatgcagtgggtgcagaggcagaggctggagaggaagggcacctgccccagcaccctgggggaggagaggagctacaaccccttcctgcggacccactgcctggccctgcaggaggccctgggccctggccctggccccactggagatgatgactacagccgggcccagctgctggaggagctgcggcggctgaaggacatgcacaagagcaagtag

SEQ ID NO: 187017 - DNA, 1158 bp, Artificial Sequence
  derived and/or modified sequence
atggccgccgtggtggccgccaccgccctgaagggccggggcgcccgtaacgcccgggttcttcgggggatcctggcaggtgcaactgcaaataaggcctctcacaacagaacccgcgcactgcaatcacacagctcgccagagggcaaggaagagcccgaaccactgagtcccgagctggagtatattccgaggaagcggggcaaaaatcccatgaaagctgtgggtctggcctggtattccctctacacaaggacttggttgggatatctgttctacagacagcagcttagacgggccagaaacaggtatccgaaggggcacagtaagacacagccccggctatttaacggcgttaaagtcctgcctataccagtgctgtcagacaactactcatacttgatcattgacactcaggcccagctggcagtggctgtagatccctccgacccaagagccgtccaggcgtctatcgagaaggaaggtgtcacactggtcgcgatcctctgcacccacaaacattgggaccactccggcggtaacagagatctctctagacgccacagagattgcagagtgtacggcagcccccaggacggcattccatacctgacccatccactgtgtcatcaagatgtcgttagcgtcggacggttacagattagggcgcttgcgacgccagggcatacacagggccacctcgtatatcttctcgatggagagccgtataagggtccctcctgtttgttttcaggcgatctcctattcctgtccggttgcggcagaacattcgaagggaatgctgagaccatgctttcttccctcgacactgtgctggggttaggagatgacacactgctctggccaggccatgagtacgcagaagaaaatttgggcttcgccggcgtggtcgaacctgaaaacctcgccagagaacgcaaaatgcaatgggtccagcggcagcgcctggaaagaaagggaacctgtccatccaccctgggggaggaacgatcttataacccattcctgaggacccattgcctggctcttcaagaagccctaggcccaggacccgggcccacaggggacgacgattatagccgtgctcagctgctcgaggagctgaggcgattaaaagacatgcataagagtaagtag

SEQ ID NO: 187018 - DNA, 3021 bp, Artificial Sequence
  derived and/or modified sequence
aaactacaattcccggcggggagcgcggtgaagcgggggtgggatctgaacatggcggcggtggtagctgctacggcgctgaagggccggggggcgagaaatgcccgcgtcctccgggggattctcgcaggagccacagctaacaaggcttctcataacaggacccgggccctgcaaagccacagctccccagagggcaaggaggaacctgaacccctatccccggagctggaatacattcccagaaagaggggcaagaaccccatgaaagctgtgggactggcctggtacagcctgtacacccgcacctggctcgggtacctcttctaccgacagcagctgcgcagggctcggaatcgctaccctaaaggccactcgaaaacccagccccgcctcttcaatggagtgaaggtgcttcccatccctgtcctctcggacaactacagctacctcatcatcgacacccaggcccagctggctgtggctgtggacccttcagaccctcgggctgtgcaggcttccattgaaaaggaaggggtcaccttggtcgccattctgtgtactcacaagcactgggaccacagtggagggaaccgtgacctcagccggcggcaccgggactgtcgggtgtacgggagccctcaggacggcatcccctacctcacccatcccctgtgtcatcaagatgtggtcagcgtgggacggcttcagatccgggccctggctacacctggccacacacaaggccatctggtctacctactggatggggagccctacaagggtccctcctgcctcttctcaggggacctgctcttcctctctggctgtgggcggacctttgagggcaatgcagagaccatgctgagctcactggacactgtgctggggctaggggatgacacccttctgtggcctggtcatgagtatgcagaggagaacctgggctttgcaggtgtggtggagcccgagaacctggcccgggagaggaagatgcagtgggtgcagcggcagcggctggagcgcaagggcacgtgcccatctaccctgggagaggagcgctcctacaacccgttcctgagaacccactgcctggcgctacaggaggctctggggccggggccgggccccactggggatgatgactactcccgggcccagctcctggaagagctccgccggctgaaggatatgcacaagagcaagtgatgcccccagcgcccccagcccagcccactccccgcatggggaggccgccaccaccaacacctcatcatccttctcatcgctaacaccaccacctccatcggcacccaagcgggcatcatccccccacactgctcaggggaggggagggatcaggcgatgagactgtgaggccaaaagaagggggcctgttggaggctgggaaccccgcagcgcgaggctgcctcatcaacggcaagaggaaaggaggggtctcgggacatctccagaccctaccaactgggagggtcccctcctccttccctactcctgggacggcagcaaggacatgggggctgctgttagcttctccgtcaggaggcctcatctcactgtagccctggaacccagggtccatcttgcccttcccccatccatggttgggaaagaagctcagcccctcacagtggcctcaagtgtgatgccttacaaaagcaccactcagatgggcagctggactctggtgtcctgagactctgccctcttcccacagcctccctgccccacccatccctgcaaagccatttttcagacagagccattcctaagaacactgaagggctggaatgctggctggccactctctgcctcagtggcctccctacagcctggaagaaggagggtcctgattgccaaggaaacctcctcattgggctaaggagacactggagtctggagtgtggagccccacagtcttgcaggtcacatgctctccttgcacatctggcctggttgtacccactggcctctgcctctgccctgggccaaaagggcccctccttgccaggggagagacagccacggtcctctttggccgatgctgtattctcattttggcccttgttcttaggcccgtctgcccgccttcctccatctaacctttcctgttttatccgcagcccttttcttctttgagttagtaaagatttattctgtaacctgacactcatctggccctttgcagtttgccagccatattcccatgtgatttcccactggatccaggcccccatccggctggcaggagggggctctgacgtgcaggttggaaatcagaagtctgtgagagcgcgggagtgcatggcagctctgggtcccagacctggcccgacccctctgcttcacctccagctctgctgctcctctactcttgggtcgagatccctttggagccacagcgaggaaccctgtggtcctcaggcaggtgtaccttgagtcagccaggagccctcttttcctgtgtcaaagcctgccctcgggctctgctcacctctggtgaccctccaagatgcccctgccctcagtttcccctcatgatctggcctctgcccccttctctagccacagcctctagtacactttagcaataccaccagactagttagagttccccactcaccaagcaagacatgcagtttcatgcctctgtgccttcgctcatgctgtttcttccgactggaatgccttcccctgctcctcctgccttgtctgcctggcaagttcatctctcacgatcccctcaaaggccccctcctccaggaaggcaacccctgtgcccctcccctccaggctacctctgcactttgtcaatgcttctcttgtggcacttatcacactgtattttacttgtttacatgtttgtctccccttctagactgtgaatccttaagggcatggactgtatcttatgcatctctgtatttctgcgcctagcacggtgcctagcacacagtaggcgctcaataaatgttgaatgaatgaatgatttaatcaaga

SEQ ID NO: 187019 - DNA, 1158 bp, Artificial Sequence
  derived and/or modified sequence
atggctgcagtggtcgcagcaacagccttgaagggcagaggagccagaaacgccagggttttgagaggcatcctggccggagccactgccaataaagctagccacaatcgtacccgggctcttcaaagccactcatccccggaaggcaaagaggagccagaacctctgtctcctgagctggagtacataccacgcaagcgcggaaagaatccaatgaaggcagtgggcctggcgtggtactccttatatacacgtacttggctgggataccttttttacaggcaacagctgcggagagcaaggaaccgctatcccaagggtcattcaaaaacacagccgcgattatttaatggcgtaaaagtcttgccaattcccgttctctctgacaattatagctatctgatcattgatacacaggcacagctcgccgtggccgtggatccatcagacccccgagccgttcaggcgtccatagagaaggaaggggtgactctggtggctatcctgtgcactcacaagcattgggatcactccggtggcaaccgcgacctttctaggaggcacagagactgtcgggtgtatggatcacctcaggacggcattccttatctcacgcacccactgtgtcatcaggatgtggtgtctgtcggcaggctccagattcgggcactcgccacgcccggtcatactcagggtcatctcgtctatttgttggatggagagccttataagggcccttcctgcctcttttctggtgatttgttgtttctgtcggggtgcggtcggacatttgaaggcaacgcagagacaatgctttccagtctggataccgttctgggcctcggagacgataccctgctatggccaggtcacgaatacgccgaggaaaacctggggtttgctggtgtcgttgagccagaaaaccttgccagagaacgaaagatgcagtgggtgcagaggcagcgacttgagcgcaaaggcacatgccctagtacactgggcgaagaaaggagctacaacccctttctgaggacgcattgtctggccttacaggaggctctagggccaggaccaggaccaactggcgacgatgattacagcagggcgcaactgctggaagagctccgacggctcaaagacatgcataagtccaaatag

SEQ ID NO: 187020 - DNA, 1158 bp, Artificial Sequence
  derived and/or modified sequence
atggccgccgtggtggccgccaccgccctgaagggcagaggcgccagaaacgccagagtgctgagaggcatcctggccggcgccaccgccaacaaggccagccacaacagaaccagagccctgcagagccacagcagccccgagggcaaggaggagcccgagcccctgagccccgagctggagtacatccccagaaagagaggcaagaaccccatgaaggccgtgggcctggcctggtacagcctgtacaccagaacctggctgggctacctgttctacagacagcagctgagaagagccagaaacagataccccaagggccacagcaagacccagcccagactgttcaacggcgtgaaggtgctgcccatccccgtgctgagcgacaactacagctacctgatcatcgacacccaggcccagctggccgtggccgtggaccccagcgaccccagagccgtgcaggccagcatcgagaaggagggcgtgaccctggtggccatcctgtgcacccacaagcactgggaccacagcggcggcaacagagacctgagcagaagacacagagactgcagagtgtacggcagcccccaggacggcatcccctacctgacccaccccctgtgccaccaggacgtggtgagcgtgggcagactgcagatcagagccctggccacccccggccacacccagggccacctggtgtacctgctggacggcgagccctacaagggccccagctgcctgttcagcggcgacctgctgttcctgagcggctgcggcagaaccttcgagggcaacgccgagaccatgctgagcagcctggacaccgtgctgggcctgggcgacgacaccctgctgtggcccggccacgagtacgccgaggagaacctgggcttcgccggcgtggtggagcccgagaacctggccagagagagaaagatgcagtgggtgcagagacagagactggagagaaagggcacctgccccagcaccctgggcgaggagagaagctacaaccccttcctgagaacccactgcctggccctgcaggaggccctgggccccggccccggccccaccggcgacgacgactacagcagagcccagctgctggaggagctgagaagactgaaggacatgcacaagagcaagtag

SEQ ID NO: 187021 - protein, 859 aa, Artificial Sequence
  derived and/or modified sequence
MAQVLHVPAPFPGTPGPASPPAFPAKDPDPPYSVETPYGYRLDLDFLKYVDDIEKGHTLRRVAVQRRPRLSSLPRGPGSWWTSTESLCSNASGDSRHSAYSYCGRGFYPQYGALETRGGFNPRVERTLLDARRRLEDQAATPTGLGSLTPSAAGSTASLVGVGLPPPTPRSSGLSTPVPPSAGHLAHVREQMAGALRKLRQLEEQVKLIPVLQVKLSVLQEEKRQLTVQLKSQKFLGHPTAGRGRSELCLDLPDPPEDPVALETRSVGTWVRERDLGMPDGEAALAAKVAVLETQLKKALQELQAAQARQADPQPQAWPPPDSPVRVDTVRVVEGPREVEVVASTAAGAPAQRAQSLEPYGTGLRALAMPGRPESPPVFRSQEVVETMCPVPAAATSNVHMVKKISITERSCDGAAGLPEVPAESSSSPPGSEVASLTQPEKSTGRVPTQEPTHREPTRQAASQESEEAGGTAPPLSSPPGGPPAGVRSIMKRKEEVADPTAHRRSLQFVGVNGGYESSSEDSSTAENISDNDSTENEAPEPRERVPSVAEAPQLRPAGTAAAKTSRQECQLSRESQHIPTAEGASGSNTEEEIRMELSPDLISACLALEKYLDNPNALTERELKVAYTTVLQEWLRLACRSDAHPELVRRHLVTFRAMSARLLDYVVNIADSNGNTALHYSVSHANFPVVQQLLDSGVCKVDKQNRAGYSPIMLTALATLKTQDDIETVLQLFRLGNINAKASQAGQTALMLAVSHGRVDVVKALLACEADVNVQDDDGSTALMCACEHGHKEIAGLLLAVPSCDISLTDRDGSTALMVALDAGQSEIASMLYSRMNIKCSFAPMSDDESPTSSSAEE

SEQ ID NO: 187022 - DNA, 2580 bp, Artificial Sequence
  derived and/or modified sequence
atggcccaggtgctgcacgtgcccgcccccttccccggcacccccggccccgccagcccccccgccttccccgccaaggaccccgaccccccctacagcgtggagaccccctacggctacagactggacctggacttcctgaagtacgtggacgacatcgagaagggccacaccctgagaagagtggccgtgcagagaagacccagactgagcagcctgcccagaggccccggcagctggtggaccagcaccgagagcctgtgcagcaacgccagcggcgacagcagacacagcgcctacagctactgcggcagaggcttctacccccagtacggcgccctggagaccagaggcggcttcaaccccagagtggagagaaccctgctggacgccagaagaagactggaggaccaggccgccacccccaccggcctgggcagcctgacccccagcgccgccggcagcaccgccagcctggtgggcgtgggcctgcccccccccacccccagaagcagcggcctgagcacccccgtgccccccagcgccggccacctggcccacgtgagagagcagatggccggcgccctgagaaagctgagacagctggaggagcaggtgaagctgatccccgtgctgcaggtgaagctgagcgtgctgcaggaggagaagagacagctgaccgtgcagctgaagagccagaagttcctgggccaccccaccgccggcagaggcagaagcgagctgtgcctggacctgcccgacccccccgaggaccccgtggccctggagaccagaagcgtgggcacctgggtgagagagagagacctgggcatgcccgacggcgaggccgccctggccgccaaggtggccgtgctggagacccagctgaagaaggccctgcaggagctgcaggccgcccaggccagacaggccgacccccagccccaggcctggcccccccccgacagccccgtgagagtggacaccgtgagagtggtggagggccccagagaggtggaggtggtggccagcaccgccgccggcgcccccgcccagagagcccagagcctggagccctacggcaccggcctgagagccctggccatgcccggcagacccgagagcccccccgtgttcagaagccaggaggtggtggagaccatgtgccccgtgcccgccgccgccaccagcaacgtgcacatggtgaagaagatcagcatcaccgagagaagctgcgacggcgccgccggcctgcccgaggtgcccgccgagagcagcagcagcccccccggcagcgaggtggccagcctgacccagcccgagaagagcaccggcagagtgcccacccaggagcccacccacagagagcccaccagacaggccgccagccaggagagcgaggaggccggcggcaccgccccccccctgagcagcccccccggcggcccccccgccggcgtgagaagcatcatgaagagaaaggaggaggtggccgaccccaccgcccacagaagaagcctgcagttcgtgggcgtgaacggcggctacgagagcagcagcgaggacagcagcaccgccgagaacatcagcgacaacgacagcaccgagaacgaggcccccgagcccagagagagagtgcccagcgtggccgaggccccccagctgagacccgccggcaccgccgccgccaagaccagcagacaggagtgccagctgagcagagagagccagcacatccccaccgccgagggcgccagcggcagcaacaccgaggaggagatcagaatggagctgagccccgacctgatcagcgcctgcctggccctggagaagtacctggacaaccccaacgccctgaccgagagagagctgaaggtggcctacaccaccgtgctgcaggagtggctgagactggcctgcagaagcgacgcccaccccgagctggtgagaagacacctggtgaccttcagagccatgagcgccagactgctggactacgtggtgaacatcgccgacagcaacggcaacaccgccctgcactacagcgtgagccacgccaacttccccgtggtgcagcagctgctggacagcggcgtgtgcaaggtggacaagcagaacagagccggctacagccccatcatgctgaccgccctggccaccctgaagacccaggacgacatcgagaccgtgctgcagctgttcagactgggcaacatcaacgccaaggccagccaggccggccagaccgccctgatgctggccgtgagccacggcagagtggacgtggtgaaggccctgctggcctgcgaggccgacgtgaacgtgcaggacgacgacggcagcaccgccctgatgtgcgcctgcgagcacggccacaaggagatcgccggcctgctgctggccgtgcccagctgcgacatcagcctgaccgacagagacggcagcaccgccctgatggtggccctggacgccggccagagcgagatcgccagcatgctgtacagcagaatgaacatcaagtgcagcttcgcccccatgagcgacgacgagagccccaccagcagcagcgccgaggagtag

SEQ ID NO: 187023 - DNA, 2580 bp, Artificial Sequence
  derived and/or modified sequence
atggctcaggtgttgcatgtgcccgctccctttccaggtacaccaggaccggcaagtccgcctgccttccccgctaaagacccagatccaccctatagcgtagaaaccccgtatggctatcgacttgatttggactttcttaagtacgtcgacgacattgaaaaggggcacacccttcggagagtggcagtgcagagaagacctcgcctctcctctttgcctcgcgggccgggatcttggtggacgtctacggagagcctttgcagtaatgcctcaggggactccaggcacagcgcctactcttactgcgggaggggattctacccccaatacggcgctctggaaacacgcggaggcttcaatccgcgagtggagagaacactgctcgatgccagacgccgcctcgaagaccaggcagctacaccaaccggattgggatctctgactccgtcagccgccggatctaccgcctctttggtgggagttggccttccgcctcctacacctcggagctcaggcctcagcacaccagttcctcccagtgctggtcacctggcacacgtccgggagcaaatggcaggagctctccgaaagctccgtcagctggaggaacaagttaagctgattcccgtgctacaagtgaaattgtctgttttacaggaagagaaacggcagttaacagtgcagcttaagtcccagaagttcctgggccaccccaccgccggaagaggacgatctgaactctgccttgacttgccagatcctccagaagacccagtggctctcgaaacccggagcgtgggaacctgggtccgggaaagagatctgggaatgccagatggagaggctgctctagccgccaaggtagccgtgcttgaaacacagctcaagaaggctctccaagaactgcaggccgcacaggcacgccaggcagatccacagccacaggcctggcccccgcccgattcacccgtcagggtggatacagttagggtcgtcgaaggaccaagagaggtagaagtggtcgcctccaccgctgcaggtgcaccagcccagcgggcccagtcactggagccttacggaacaggactgcgagctttagctatgcccggccgccctgagagcccccccgtcttccgtagtcaggaggtggtggaaacgatgtgccccgttcccgcggcagcaacttccaacgtccacatggtgaagaagatttcaatcacagagaggtcctgcgacggcgccgctgggttgcccgaggtgccagcagagtcctcaagctcccccccgggcagcgaagtggcctcgctgacacaacctgaaaaatccactggcagggttcctacacaggagcccacgcacagggagcccactcgacaggcagcctcccaggagtctgaggaggcaggcggaactgcacctcctctatctagcccacccgggggaccaccggctggggtgagaagcattatgaagcggaaagaggaagtcgcagacccaactgcccatagaaggtccctgcagttcgtgggggtgaacggcgggtatgagagctcctctgaagactcatccactgcagaaaacatctcagacaacgacagcaccgaaaatgaggcgccagagcctagggagagagtgcccagtgtggcagaggccccccaattgcggcccgccggaactgcagcagcaaaaaccagcaggcaggaatgccaattgagcagagagtcccaacatatccctaccgcagagggtgccagcggcagtaacacggaagaagagattcggatggagctgtcccctgacttgatttctgcctgtctggctctggaaaagtacctggacaatcctaatgccttaacagaacgggagttaaaggttgcttacacgaccgtgcttcaagagtggctccggctggcttgtcggagcgacgcacatccggaactcgtgcgccggcacttagtgaccttccgggcgatgtcggcacggttgctggattacgtcgtcaacatcgccgattctaacggcaatacggcgctgcactactccgtctctcatgccaatttccccgtggtgcaacaacttttagactccggtgtgtgcaaggtggacaagcagaaccgcgccggatactcaccaatcatgctcacagcactcgcaaccctgaagacgcaagatgacatcgagacagtgctccagctgttcagattgggcaatataaatgctaaggcctcacaggccggacaaaccgccttaatgctggctgtaagtcacgggcgagtcgatgtggtgaaggcactcctggcatgcgaggccgacgtcaacgtgcaggatgacgatgggtcaaccgcacttatgtgtgcctgcgaacacggacacaaggagatcgccggcctcctgttggccgtaccctcatgcgacataagcctgactgacagagacggttcaaccgccctcatggtggctctggatgctggtcaatcagagatagcatcaatgctctacagccgcatgaacattaagtgctcctttgctccaatgtctgacgatgaatccccaacttctagctctgctgaagagtag

SEQ ID NO: 187024 - DNA, 2580 bp, Artificial Sequence
  derived and/or modified sequence
atggcccaggtgctgcacgtgcctgcccccttccctggcaccccaggccctgccagccccccagccttccctgccaaggaccctgaccccccctacagcgtggagaccccctacggctaccgcctggacctggacttcctgaagtatgtggatgacatcgagaagggccacaccctgcggcgggtggccgtgcagaggcggccccggctgagcagcctgccccggggccctggctcctggtggaccagcacagagagcctgtgcagcaatgccagcggggacagccgccacagcgcctacagctactgcggccggggcttctacccccagtatggagccctggagacccggggcggcttcaacccccgggtggagaggaccctgctggatgcccggcggcggctggaggaccaggccgccacccccaccggcctgggcagcctgaccccatctgctgctggcagcacagccagcctggtgggcgtgggcctgcccccacccacccccaggagcagcggcctgagcacccctgtgcccccatctgctggccacctggcccacgtgcgggagcagatggccggggccctgaggaagctgcggcagctggaggagcaggtgaagctgatccctgtgctgcaggtgaagctgtctgtgctgcaggaggagaagaggcagctgactgtgcagctgaagagccagaagttcctgggccaccccacagctggccggggccgctctgagctgtgcctggacctgcctgaccccccagaagatcctgtggccctggagaccaggtctgtgggcacctgggtgcgggagcgggacctgggcatgccagatggagaggccgccctggccgccaaggtggccgtgctggagacccagctgaagaaggccctgcaggagctgcaggccgcccaggcccggcaggccgacccccagccccaggcctggcccccaccagacagccctgtgcgggtggacacagtgcgggtggtggagggcccccgggaggtggaggtggtggccagcacagctgctggggccccagcccagagggcccagagcctggagccctacggcaccggcctgcgggccctggccatgcctggccggcctgagagcccccctgtgttccgcagccaggaggtggtggagaccatgtgccctgtgcctgctgctgccaccagcaatgtgcacatggtgaagaagatcagcatcacagagaggagctgtgatggagctgctggcctgcctgaggtgcctgctgagagcagcagcagccccccaggcagcgaggtggccagcctgacccagcctgagaagagcacaggccgggtgcccacccaggagcccacccaccgggagcccacccggcaggccgccagccaggagagcgaggaggccggcggcacagccccacccctgagcagccccccaggcggccccccagctggggtgcgcagcatcatgaagaggaaggaggaggtggccgaccccacagcccaccggcgcagcctgcagtttgtgggcgtgaatggaggctatgagagcagcagcgaggacagcagcacagctgagaacatcagtgacaatgacagcacagaaaatgaggcccctgagccccgggagcgggtgcccagcgtggccgaggccccccagctgcggcctgctggaacagctgctgccaagaccagccggcaggagtgccagctgagccgggagagccagcacatccccacagctgagggcgccagcggcagcaacacagaggaggagatccgcatggagctgagcccagacctgatcagcgcctgcctggccctggagaagtacctggacaaccccaatgccctgacagagcgggagctgaaggtggcctacaccaccgtgctgcaggagtggctgcggctggcctgccgcagtgatgcccaccctgagctggtgcggcggcacctggtgaccttccgggccatgtctgcccggctgctggactatgtggtgaacattgctgacagcaatggaaacacagccctgcactacagcgtgtcccatgccaacttccctgtggtgcagcagctgctggacagcggcgtgtgcaaggtggacaagcagaacagagctggctacagccccatcatgctgacagccctggccaccctgaagacccaggatgacattgaaacagtgctgcagctgttccggctgggcaacatcaatgccaaggccagccaggccggccagacagccctgatgctggccgtgagccacggccgggtggatgtggtgaaggccctgctggcctgtgaggctgatgtgaatgtgcaggatgatgatggcagcacagccctgatgtgtgcctgtgagcacggccacaaggagattgctggcctgctgctggccgtgcccagctgtgacatcagcctgacagacagagatggcagcacagccctgatggtggccctggatgctggccagagcgagatcgcctccatgctgtacagcaggatgaacatcaagtgcagctttgcccccatgtctgatgatgagagccccaccagcagcagcgctgaggagtag

SEQ ID NO: 187025 - DNA, 5231 bp, Artificial Sequence
  derived and/or modified sequence
gagggccgggcgcccaggctgcggcgcgcgcgaagacgctcgggcggcgggacccagggaaggcagcggccggagcgcgcaaggtgttgaaagacagagaagcgaagacagagacgtggaaagacagggagagagacacggagagagacgcagaaggacagagacgtggagagagacgcagagagacagagacgtggagagacacagagagacgtggagagacacagagagacttggagagagacaaagcaagacaggacgggagaacaaggacaagctcaggtaagcctcagccggtgctgcaggcagtctgactcgcagtccctcaagtgacttccaaggagcatctgtagaaaagaagatggcccaggtcctgcacgtgcctgctcccttcccagggacccctggcccagcctccccacctgccttccctgccaaggaccccgatccaccctactccgtggagaccccctatggctaccgcctggacctggacttcctcaagtacgtggatgacatcgagaagggccacacgctgcgacgcgtggcagtgcagcgccgcccccgcctgagctcgctgccccgtggccctggctcctggtggacgtccactgagtcgctgtgctccaatgccagtggggacagccgccactcagcctattcctactgcggccgtggcttctaccctcagtatggtgctctggagacccgcggtggcttcaatccgcgggtggagcgcacgctgctggatgcccgtcgccgtctcgaggaccaggcggccacacccaccggcctgggctccctgacccccagtgcggccggctcgacagcctccctggtgggcgtggggttgccacccccgacaccacggagttcaggactgtccacaccggtgcctcccagtgccgggcacctggcccacgtgcgggagcagatggcgggtgccctgcggaagctgcggcagctggaggagcaggtgaagctgatccctgtgctccaggtgaagctctcggtgctccaggaggaaaagcggcagctcacagtacaacttaagagccagaagttcctgggccaccccacagcgggccggggtcgcagcgagctctgcctggacctccccgatcccccagaggacccagtggcactggagacccggagtgtgggcacctgggttcgagaacgggacttgggcatgcctgatggggaggctgccctcgccgccaaggtcgctgtgctggagacccagctcaagaaggcgctgcaggagctgcaggcagctcaggcccggcaggctgacccccagccccaggcctggccaccgccggacagcccggtccgcgtggatacagtccgggtggtagaagggccacgggaggtggaggtggtggccagcacagccgctggcgcccccgcacagcgggcccagagcctggagccttacggcacagggctgagggccctggcaatgcctggtaggcctgagagcccacctgtgttccgcagccaggaggtggtggagacaatgtgcccagtgcccgctgcagctaccagcaacgtccatatggtgaagaagattagcatcacagagcgaagctgcgatggagcagcaggcctcccagaagttcctgccgaatcgtcttcgtcacccccggggtccgaggtagcctcccttacacagcctgagaagagcacaggccgagtgcccacccaggagcccacccacagggagcccaccaggcaagcagcctcccaagagtccgaggaggccgggggcaccgcacctccgctgtcctcccctccaggcgggcccccggcaggcgtgcgatctatcatgaaacggaaagaggaggttgcagaccccacggcccaccggaggagcctccagttcgtgggggtcaacggcgggtatgagtcgtcatccgaggactccagcacagcagagaacatctcagacaacgacagcacagagaacgaggccccagagccgagggagagggttccgagtgtggccgaagccccccagctcaggcctgcagggacggcagcggccaagaccagccggcaggagtgtcagctgtctcgagaatctcagcacatacccactgctgagggggcatcaggatcaaacacggaggaggagatcaggatggagctaagccctgacctcatctcagcctgcttggccctggaaaagtacctggacaatcccaacgccctcacagagcgggagctgaaagtggcctacaccacagtgctgcaggagtggctgcgcctggcctgccgcagcgacgcacaccccgagctggtgcggcggcacctggtcacgttccgggccatgtctgcgcggctgctggactacgtggtcaacatcgccgacagcaacggcaacacagccctgcactactccgtgtctcatgccaacttccccgtggtgcagcagctgctcgacagcggtgtctgcaaggtggacaaacagaaccgtgctggctacagccctattatgctcaccgccctggccaccctgaagacccaggacgacatcgagactgtccttcagctcttccggcttggcaacatcaatgccaaagccagccaggcaggacagacggccctgatgctggccgtcagccacgggcgggtggacgttgtcaaagccctgctggcctgtgaggcagatgtcaacgtgcaagatgatgacggctccacggccctcatgtgcgcctgtgagcacggccacaaggagatcgcggggctgctgctggccgtgcccagctgtgacatctcactcacagatcgcgatgggagcacagctctgatggtggccttggacgcagggcagagtgagattgcgtccatgctgtattcccgcatgaacatcaagtgctcgtttgccccaatgtcagatgacgagagccctacatcatcctcggcagaagagtagccgtgagggaggcggggaccagccagaccgggagcaaaccgtcccttgtccccgtctcctccctgttcccgttcctccctggcccaccccactcacactccccaaggcccacggctcaaaggcaagcgagctctccctctgcttccctgggggagccccgacggccacaggactccagctccaagtgggttttcttggctcccctgttcaaagtggccacagcgcagaccgaagcaaaattcttgtatacattggcgccagggctgatgctggggtgtgggttttatgaagaacattgagaacaatcagctggtaattatggatggaggaagagggagaggaaaaaaatattgtatttttgaatcattgttgcaggagggggtgggaatcttaggatttgttgccagatttgaaagtcactggaacttgcatattttcattttaatcctaagtgttattacgcaccagttggggttcacccttcatcccccacatttaattgtctgatatagaatagtgttgtgtccactgccccgctagacggctttcttaggggaattttcttctggttgtttcacaagacagattctgtccttgtcacccgggacagaaaactcagtcttttcaccctcattcagatgaagggactcaggacaggctctgtgacttacagggacccaatcaattcacaatgagaaattaccggccaggcgtggtgactcacgtctgtaatcccagcactttgggagggcaaggcaagagcttgagcttgagcctagacgttaaagaccagcctgggcaacacagcaagacccatctctacaagaaatttaaaaactagccaggcgtggtggtgcgcgcctgtagtcccagctacttgggaggctgagccctggaggtcgaggctacagtgagctatgatcacaccattgcacttcagcctgggcgacacagcgagaccctgtctcaagaaagaaaagaaaaagagacaaattacccagaaacccctcccttccccacatggaggccttggcaaatgttaattttcctagaaaatccttcagacctgaagacgcaggaaaagaatctggctctcagggtggcttctgcgtccccgccgccaggccccagactatggtcacagggccgtcctgttcctccccgggactccagaatttctctcctcaaaggaaagaaaacagggcatgcgcttgttggcaaaacgcagggccggctcccaaaaaccccatgtgtgtacgattaaaagttggccgtccccaggcctcccagcgcaaacttcaagagacagggctttgctgaaaaccaaacatgggccagctgggctttttaacaacctagagactttccggagctgcctggaacagagcctgcgggaaacggggcttgccagagacactcacagtttccttcatggcctgttttggtcccctaagaatctccacatcattgtctttcttgtgccttttccttggtgagcaacagaaagggaagggttccaagcctctaaaaatgtgctttgtgatcaggagtgcgctccaaaccaaatacgcgcgctgccctttcgaggccagtgagctcagcctccaaggctttaaagccacatttcagcaagagaaagcgctgagagctcgcaggttcattaaagaaggcaaagcactggtttctctccttagaaaagtaggtttcttggcttgatgtagactggcttgctttgatttttagtgaagggaatgtacgtaaaacaaaatagggcttggctggtcaaaggagacaagcaggatggatggatggatggatggatggatggatggatggatggatggatgaatagatagatggtgtttgcatgtaaattgcagagaaaacaaaaccaaagctgattggaaacaattaattgtgggtgtctgagggggaaggtcgcagctttgggcagctttgagaagcggtacaagagttctgtgcctgtgtgtccagccctggagccagccagtgcatttattttaagctcttagaagcaactccttggcccaggaatgcgtgacccctgagatgggtccacgcatctctctacacttccttctctccgtgggatactggactcgtgcctctgcgcccattctcttctcacgcatatccatgagctttaatttcactttctgatcacggtacgtccataaagccagtattacacttaaatgaagtattcttttttgtaatcgttttttttagaaggtaaacaaatttaataaagctaccaataatgttgatg

SEQ ID NO: 187026 - DNA, 2580 bp, Artificial Sequence
  derived and/or modified sequence
atggcccaggtgctgcacgtgcccgcccccttccccggcacccccggcccagcctcaccaccagccttccctgcaaaagatcccgatcccccctactctgttgaaacgccttacggatatcgcctggacctcgattttctgaagtatgtcgacgacattgagaagggtcataccctgcgccgtgtggcggtgcagagaagaccacgattaagttcactccccagaggcccaggcagctggtggacctccaccgagtcactgtgttctaacgccagcggcgattccaggcattcagcctacagttactgtggaagggggttctaccctcagtatggcgcactggagacaagagggggattcaatcccagagttgagaggacgctgcttgatgcccgccgccggctcgaggatcaggcagccacacccaccggcctaggttcactcacgccgagcgctgcaggctccacagcgtctcttgtgggggtgggcctgcctcctccgacgccccggtcatcagggctcagcactcccgttccgccgagcgccggccacctcgctcacgtgcgagagcagatggcaggggcgcttaggaaattacggcagttggaggaacaggtgaaattgattcccgtgttgcaagtcaaattatcagttctgcaggaggagaaacggcagctgacagtgcaactgaagtcccagaaatttttgggacacccaacagcaggccgaggacgctccgagctgtgtctggatctgcccgatccacccgaagaccccgtcgcccttgaaacccgatcagtgggcacctgggtcagggaacgcgacctaggcatgcctgatggcgaggctgcactcgccgctaaggtggcagtactggagactcagctcaagaaagccctgcaggagttgcaggctgcccaggcaaggcaggctgaccctcagccacaggcctggccgccgccggacagccccgtcagagtggataccgttagagtggtagaaggacctcgggaagtcgaagtggtggccagcaccgccgccggggctcctgcccagagggcacaatctctggagccctatggaacagggctgcgtgcactagccatgccaggcagacccgagagtcccccagtgtttcgctcacaggaagttgttgaaacaatgtgtccggttcctgccgccgccacctccaacgtgcatatggtaaagaagatcagtattacagagcgcagctgtgacggcgccgcaggcctgcccgaagtgcctgcggaatcctcttccagcccacccggcagtgaagtggcctctttgacccagccggagaagagtactggcagagtgcctacgcaggagccaacccacagagagcccacgcgccaggctgcctcccaggagagtgaagaggcaggagggaccgcgcctccactgtcaagccctcccggaggcccaccagccggcgtgcgatctatcatgaaacgaaaggaggaagtggctgaccctacggctcataggagatccctgcagtttgtgggagtgaatggcggctatgagtctagttccgaggattccagcacagcagaaaatataagtgacaacgacagtactgagaatgaggcaccagagccaagggaacgggtgcctagcgttgccgaggcaccacagcttcggccagctgggacggccgccgccaagacttcacggcaggagtgtcagttgtcacgcgaatcccaacacatccctactgccgaaggcgcatccgggtcaaataccgaggaggagattcggatggagctgtctcctgatcttattagcgcctgtctagccctggagaaatatctcgataacccaaacgcactgacggaacgggaactcaaagtggcctacaccactgttctacaggagtggttgagactagcttgtaggtccgatgcccatcccgagctcgtacggcgtcacctggtaacattccgcgccatgagtgcacgacttttggactacgtggtcaacatagctgacagtaacggaaacaccgcactgcactacagtgtgtcacacgcaaacttccctgtggtccagcaacttctggactcaggcgtatgtaaggttgacaaacaaaatagggcaggttatagcccgattatgctcaccgccttggccaccctgaagacccaggacgacattgaaaccgtgctccagctgttccgcctgggaaatattaacgccaaggcttctcaggcagggcagacggccctgatgttggctgtatctcatggcagggtggatgtggttaaagcactgttagcatgtgaagctgatgtgaacgtgcaagatgatgatggcagtactgccctgatgtgtgcatgcgaacacgggcacaaggagatcgctgggcttctattggccgtgccgagctgtgatattagtctcacagaccgagacggaagcacagctttgatggtcgccctggacgccgggcaatccgagatcgcttccatgctgtactcccggatgaacattaaatgttctttcgcccccatgtccgacgacgaaagcccgacttccagctctgccgaggagtag

SEQ ID NO: 187027 - DNA, 2580 bp, Artificial Sequence
  derived and/or modified sequence
atggcccaagttctgcacgttcctgcgccttttcccggaactcctggaccggcaagccctccggcattccctgccaaggaccctgacccaccgtactccgtggagacaccatatggctataggcttgatctggactttctgaaatatgtcgacgacattgaaaaaggtcacactttgagacgggtggctgtccagagaagaccccgtctgtcatctcttccaagagggcctggctcatggtggacttccacggaatccctgtgttctaatgcttcaggggattcgcgacatagcgcatactcttattgtggtcggggattttatccccaatacggagccttagagactcgcggagggtttaatccgagagtggagaggactctactcgatgctaggagacgcctcgaggaccaagctgctacccctacagggctgggctctctcaccccatcagcagccggaagcaccgcctcgctcgtgggggtgggtttgccccctcctacccccaggagcagtggcctctctacgcctgttcctccatctgctggccatcttgcccacgtaagagagcagatggccggtgccctgcggaaactccggcaactcgaggagcaggtcaaactgattccagtcctgcaggtcaagctgagtgtgctccaagaagagaagcggcagctgactgtgcaactcaaatctcagaagttcctcggccatcccacagccggaagaggcagatccgagttatgcctggacctgccggaccccccagaagatccagttgcattggaaacccgctccgtgggaacatgggtacgcgaacgcgacttaggcatgcccgacggagaagccgctctggccgcaaaagtggccgtgttagaaacacagctcaaaaaggccctgcaggaacttcaggcagcccaggctaggcaggctgacccacagccgcaggcctggcccccacccgactcgcctgtgcgagtggatacggtgagagtggtggaagggcctcgcgaggtcgaggtagtggccagcaccgctgccggagcccctgcccagagggcacagtcactcgaaccgtatgggaccgggctgcgagctttagccatgcctggtcgaccggagtcgcctcctgtgtttcgatcccaagaagtggttgaaactatgtgccccgttccggctgccgcaacctcaaatgtgcatatggtgaaaaaaatatccattaccgagagatcatgcgatggagctgctggactccccgaggttcccgctgaatctagctcaagcccacctggcagtgaagtggcctccctgacacagccagagaagtctacgggaagagttcctacacaggagccaacccaccgcgagcccacgaggcaggccgcatcacaggagtcagaagaggccggtggcacagcgccacccctgagctcgccccctggaggaccccctgcgggagttcgctctatcatgaagaggaaagaagaggtggcagaccccaccgcccatcgcaggtctctgcagttcgttggcgtgaatggcggatacgagtcatcatccgaagattcctctacagccgaaaacatctctgataacgactctactgaaaatgaagctccagagcctcgcgaaagggtccctagcgttgcagaggcgccacaactccgaccagcaggcactgctgcagctaaaaccagtcggcaagagtgccagctgagtagggaatcccagcacatccccactgccgagggtgccagtggatctaacaccgaggaggagattcgcatggagctgtctccagacctgatctccgcatgtctcgcacttgagaaatatctagacaatcccaacgcgctgaccgagagggagctgaaggtggcctacaccactgtgctgcaggaatggctacggctggcatgccgatcggacgctcacccagagctcgtgcgccgtcatctggtaactttccgcgcaatgtcggcacgtctgctggactacgtcgtcaacattgccgactccaacggcaacactgcactccactacagtgtgtcccatgccaattttccagtagtgcagcagctccttgatagcggcgtgtgtaaggttgataagcagaatagagcaggatactctccaataatgctgaccgctctggcaacactgaaaacacaggatgatattgagaccgtgctgcagctctttcggctaggcaatatcaatgccaaggccagtcaggctgggcagacggcccttatgctggcggtttctcacggacgcgtcgatgtggttaaggcactccttgcatgtgaagccgatgtcaatgtgcaggatgatgatggctctacagccttgatgtgtgcgtgcgagcacggacataaggaaatagcaggactcctcctcgcggtaccgagctgtgatatttctctgactgacagggatggcagcacagccctaatggtcgctctggatgctggacagagcgaaatcgcttcaatgctatactcaagaatgaacatcaagtgtagcttcgcacctatgtctgatgacgaaagtccaacttcgagcagcgctgaggagtag

SEQ ID NO: 187028 - protein, 555 aa, Artificial Sequence
  derived and/or modified sequence
MAAAAWLQVLPVILLLLGAHPSPLSFFSAGPATVAAADRSKWHIPIPSGKNYFSFGKILFRNTTIFLKFDGEPCDLSLNITWYLKSADCYNEIYNFKAEEVELYLEKLKEKRGLSGKYQTSSKLFQNCSELFKTQTFSGDFMHRLPLLGEKQEAKENGTNLTFIGDKTAMHEPLQTWQDAPYIFIVHIGISSSKESSKENSLSNLFTMTVEVKGPYEYLTLEDYPLMIFFMVMCIVYVLFGVLWLAWSACYWRDLLRIQFWIGAVIFLGMLEKAVFYAEFQNIRYKGESVQGALILAELLSAVKRSLARTLVIIVSLGYGIVKPRLGVTLHKVVVAGALYLLFSGMEGVLRVTGAQTDLASLAFIPLAFLDTALCWWIFISLTQTMKLLKLRRNIVKLSLYRHFTNTLILAVAASIVFIIWTTMKFRIVTCQSDWRELWVDDAIWRLLFSMILFVIMVLWRPSANNQRFAFSPLSEEEEEDEQKEPMLKESFEGMKMRSTKQEPNGNSKVNKAQEDDLKWVEENVPSSVTDVALPALLDSDEERMITHFERSKME

SEQ ID NO: 187029 - protein, 531 aa, Artificial Sequence
  derived and/or modified sequence
MYKRRVVYLSDVSQNPVSPGWIRKGKNYFSFGKILFRNTTIFLKFDGEPCDLSLNITWYLKSADCYNEIYNFKAEEVELYLEKLKEKRGLSGKYQTSSKLFQNCSELFKTQTFSGDFMHRLPLLGEKQEAKENGTNLTFIGDKTAMHEPLQTWQDAPYIFIVHIGISSSKESSKENSLSNLFTMTVEVKGPYEYLTLEDYPLMIFFMVMCIVYVLFGVLWLAWSACYWRDLLRIQFWIGAVIFLGMLEKAVFYAEFQNIRYKGESVQGALILAELLSAVKRSLARTLVIIVSLGYGIVKPRLGVTLHKVVVAGALYLLFSGMEGVLRVTGAQTDLASLAFIPLAFLDTALCWWIFISLTQTMKLLKLRRNIVKLSLYRHFTNTLILAVAASIVFIIWTTMKFRIVTCQSDWRELWVDDAIWRLLFSMILFVIMVLWRPSANNQRFAFSPLSEEEEEDEQKEPMLKESFEGMKMRSTKQEPNGNSKVNKAQEDDLKWVEENVPSSVTDVALPALLDSDEERMITHFERSKME

SEQ ID NO: 187030 - DNA, 1668 bp, Artificial Sequence
  derived and/or modified sequence
atggccgccgccgcctggctgcaggtgctgcccgtgatcctgctgctgctgggcgcccaccccagccccctgagcttcttcagcgccggccccgccaccgtggccgccgccgacagaagcaagtggcacatccccatccccagcggcaagaactacttcagcttcggcaagatcctgttcagaaacaccaccatcttcctgaagttcgacggcgagccctgcgacctgagcctgaacatcacctggtacctgaagagcgccgactgctacaacgagatctacaacttcaaggccgaggaggtggagctgtacctggagaagctgaaggagaagagaggcctgagcggcaagtaccagaccagcagcaagctgttccagaactgcagcgagctgttcaagacccagaccttcagcggcgacttcatgcacagactgcccctgctgggcgagaagcaggaggccaaggagaacggcaccaacctgaccttcatcggcgacaagaccgccatgcacgagcccctgcagacctggcaggacgccccctacatcttcatcgtgcacatcggcatcagcagcagcaaggagagcagcaaggagaacagcctgagcaacctgttcaccatgaccgtggaggtgaagggcccctacgagtacctgaccctggaggactaccccctgatgatcttcttcatggtgatgtgcatcgtgtacgtgctgttcggcgtgctgtggctggcctggagcgcctgctactggagagacctgctgagaatccagttctggatcggcgccgtgatcttcctgggcatgctggagaaggccgtgttctacgccgagttccagaacatcagatacaagggcgagagcgtgcagggcgccctgatcctggccgagctgctgagcgccgtgaagagaagcctggccagaaccctggtgatcatcgtgagcctgggctacggcatcgtgaagcccagactgggcgtgaccctgcacaaggtggtggtggccggcgccctgtacctgctgttcagcggcatggagggcgtgctgagagtgaccggcgcccagaccgacctggccagcctggccttcatccccctggccttcctggacaccgccctgtgctggtggatcttcatcagcctgacccagaccatgaagctgctgaagctgagaagaaacatcgtgaagctgagcctgtacagacacttcaccaacaccctgatcctggccgtggccgccagcatcgtgttcatcatctggaccaccatgaagttcagaatcgtgacctgccagagcgactggagagagctgtgggtggacgacgccatctggagactgctgttcagcatgatcctgttcgtgatcatggtgctgtggagacccagcgccaacaaccagagattcgccttcagccccctgagcgaggaggaggaggaggacgagcagaaggagcccatgctgaaggagagcttcgagggcatgaagatgagaagcaccaagcaggagcccaacggcaacagcaaggtgaacaaggcccaggaggacgacctgaagtgggtggaggagaacgtgcccagcagcgtgaccgacgtggccctgcccgccctgctggacagcgacgaggagagaatgatcacccacttcgagagaagcaagatggagtag

SEQ ID NO: 187031 - DNA, 1596 bp, Artificial Sequence
  derived and/or modified sequence
atgtacaagagaagagtggtgtacctgagcgacgtgagccagaaccccgtgagccccggctggatcagaaagggcaagaactacttcagcttcggcaagatcctgttcagaaacaccaccatcttcctgaagttcgacggcgagccctgcgacctgagcctgaacatcacctggtacctgaagagcgccgactgctacaacgagatctacaacttcaaggccgaggaggtggagctgtacctggagaagctgaaggagaagagaggcctgagcggcaagtaccagaccagcagcaagctgttccagaactgcagcgagctgttcaagacccagaccttcagcggcgacttcatgcacagactgcccctgctgggcgagaagcaggaggccaaggagaacggcaccaacctgaccttcatcggcgacaagaccgccatgcacgagcccctgcagacctggcaggacgccccctacatcttcatcgtgcacatcggcatcagcagcagcaaggagagcagcaaggagaacagcctgagcaacctgttcaccatgaccgtggaggtgaagggcccctacgagtacctgaccctggaggactaccccctgatgatcttcttcatggtgatgtgcatcgtgtacgtgctgttcggcgtgctgtggctggcctggagcgcctgctactggagagacctgctgagaatccagttctggatcggcgccgtgatcttcctgggcatgctggagaaggccgtgttctacgccgagttccagaacatcagatacaagggcgagagcgtgcagggcgccctgatcctggccgagctgctgagcgccgtgaagagaagcctggccagaaccctggtgatcatcgtgagcctgggctacggcatcgtgaagcccagactgggcgtgaccctgcacaaggtggtggtggccggcgccctgtacctgctgttcagcggcatggagggcgtgctgagagtgaccggcgcccagaccgacctggccagcctggccttcatccccctggccttcctggacaccgccctgtgctggtggatcttcatcagcctgacccagaccatgaagctgctgaagctgagaagaaacatcgtgaagctgagcctgtacagacacttcaccaacaccctgatcctggccgtggccgccagcatcgtgttcatcatctggaccaccatgaagttcagaatcgtgacctgccagagcgactggagagagctgtgggtggacgacgccatctggagactgctgttcagcatgatcctgttcgtgatcatggtgctgtggagacccagcgccaacaaccagagattcgccttcagccccctgagcgaggaggaggaggaggacgagcagaaggagcccatgctgaaggagagcttcgagggcatgaagatgagaagcaccaagcaggagcccaacggcaacagcaaggtgaacaaggcccaggaggacgacctgaagtgggtggaggagaacgtgcccagcagcgtgaccgacgtggccctgcccgccctgctggacagcgacgaggagagaatgatcacccacttcgagagaagcaagatggagtag

SEQ ID NO: 187032 - DNA, 1668 bp, Artificial Sequence
  derived and/or modified sequence
atggccgccgctgcatggctgcaggttttgcccgtgatcctcctcctcctaggcgcacatcccagccctttgtccttcttctccgccggtccagctaccgtggccgctgcagatagatcaaaatggcatattcctattcccagcggcaaaaactacttctcctttgggaagattctttttcgaaataccaccatcttcctcaaattcgacggcgagccctgtgacctttcccttaacatcacatggtatctcaagagcgccgactgttataatgagatctacaacttcaaagcagaggaagtggaattatatctagaaaaattaaaagagaagcgcgggctatctggaaagtaccagacatcgtctaagttgttccagaactgttccgaactgtttaagacacagactttctccggcgacttcatgcatcgactgcccctccttggggagaagcaagaggccaaggagaatggaaccaatctgactttcattggcgacaaaactgcaatgcacgagcccctacaaacatggcaggacgcgccttacattttcatcgttcatattggaatttccagcagcaaggagtcgtccaaggagaatagcctgagtaacctgtttactatgaccgtggaggtgaagggtccatacgagtacctaaccctcgaggactatccactcatgatttttttcatggtgatgtgtattgtatatgtgctcttcggggtgttgtggcttgcttggtccgcctgttactggcgggacctcctgcgcatccagttctggataggtgcggtcatctttctgggtatgttagaaaaggccgttttttacgccgagtttcagaacataagatacaagggtgaatcggtgcagggggctctgatcctggctgaacttttgtctgcagttaagcgtagtttagctagaacactagtcatcatcgtctcgttaggctatggcatcgtaaaaccccgcttgggtgtcactttgcacaaggtggtcgttgccggagccctgtacctgttgttctctggcatggaaggcgtgttgcgggttaccggggcgcagacagacctggcatccctggccttcattcccctggccttcttggataccgccttgtgctggtggatatttatctccctgactcagactatgaagctgctcaagctgagaagaaacattgtcaaactttctttgtaccgtcactttactaacactctgatcctggcggttgctgcctcgatagtatttataatctggactactatgaaattcaggatcgtaacttgtcagagcgattggcgggaactctgggtagacgacgcgatttggcggttactgttcagtatgatacttttcgtcattatggtgttatggaggccaagcgccaataatcagcgttttgctttttctccgctcagcgaggaggaagaagaggatgagcaaaaagaacccatgctgaaggagagtttcgaaggcatgaaaatgcgatccactaagcaggaaccaaatggcaattccaaagtcaacaaggcacaagaagacgatttaaagtgggtcgaagagaacgttcctagtagcgtcaccgacgtcgccctgcccgcactgttggactcagacgaagaacgaatgattacacacttcgaaaggagcaaaatggagtag

SEQ ID NO: 187033 - DNA, 1596 bp, Artificial Sequence
  derived and/or modified sequence
atgtataagcgacgggtcgtatatctgtcagacgtctcacagaatcctgtgtctccagggtggatcagaaagggaaagaactatttctcatttggaaagatactcttcaggaacaccaccatttttttgaagttcgacggtgagccctgtgacctgtccctcaacattacatggtatctgaaatctgcagactgttacaatgagatctacaacttcaaggcagaggaggtggagctgtacctcgaaaaactcaaggagaaacggggactcagcggaaagtatcaaacaagttctaaattgtttcagaattgctccgaactcttcaaaacccagacgttttccggggacttcatgcatagactgcccctgctcggggaaaaacaggaggcgaaggagaacggaaccaatctgaccttcattggagacaagaccgctatgcacgagccccttcaaacatggcaggatgccccttatatctttatagtacatattggaatcagcagtagcaaggaatccagtaaggaaaactcgctcagtaatttgttcacaatgactgttgaagtcaagggcccttatgagtatttaactttagaagactatcctctcatgatcttttttatggttatgtgtatagtgtatgtcctgtttggggtcctctggctagcctggtctgcctgttactggcgcgacctcctacgcatccagttttggatcggtgctgtcatcttcctgggcatgctcgagaaagccgtcttctatgccgaatttcagaacatacgatacaagggagaatccgtccagggcgccctaatcctggctgaactgctatccgcagtcaaacggtccctcgctaggactcttgtaatcatcgtgagcctagggtacggaatcgttaagccgcgcctcggcgtcacactgcacaaggtggtggtggctggcgccctgtacttgcttttcagtgggatggaaggagtgctgcgagtcacaggcgcacaaaccgatctggcttcattagcatttatcccattagctttcctggacactgcactgtgttggtggatctttatttccttgactcagactatgaagctcctcaaactccgtaggaacattgtaaagctgagcctttatcgacattttacgaacaccttaatattggccgtcgccgcctccatagtgtttataatctggacgactatgaagtttcggatcgtgacttgccagagcgattggagagaactgtgggtggatgatgcaatttggcgacttcttttctccatgattttgtttgtcataatggtcctatggcggccatctgccaataatcaaagattcgccttttcccctctgtccgaagaagaggaagaggatgagcagaaagagcctatgctcaaggaatcgtttgaaggcatgaagatgcggtccactaaacaggagccaaacggaaattccaaggtcaacaaggcccaagaggatgacctcaagtgggtggaggagaacgtgccctcttccgttaccgatgtcgccctgcccgccctcctcgactcagacgaagagcggatgatcacacacttcgaaagatcgaagatggagtag

SEQ ID NO: 187034 - DNA, 1668 bp, Artificial Sequence
  derived and/or modified sequence
atggctgctgctgcctggctgcaggtgctgcctgtgatcctgctgctgctgggcgcccaccccagccccctgtccttcttctctgctggccctgccaccgtggccgctgctgacaggagcaagtggcacatccccatccccagcggcaagaactacttctcctttgggaagatcctcttcaggaacaccaccatcttcctgaagtttgatggagagccctgtgacctgagcctgaacatcacctggtacctgaagtctgctgactgctacaatgagatctacaacttcaaggccgaggaggtggagctgtacctggagaagctgaaggagaagaggggcctgagcggcaagtaccagaccagcagcaagctgttccagaactgcagcgagctgttcaagacccagaccttcagcggggacttcatgcaccggctgcccctgctgggggagaagcaggaggccaaggaaaatggcaccaacctgaccttcatcggggacaagacagccatgcatgagcccctgcagacctggcaggatgccccctacatcttcatcgtgcacatcggcatcagcagcagcaaggagagcagcaaagaaaacagcctgagcaacctcttcaccatgacagtggaggtgaagggcccctatgagtacctgaccctggaggactaccccctgatgatcttcttcatggtgatgtgcatcgtgtatgtgctgtttggagtgctgtggctggcctggagcgcctgctactggagggacctgctgcgcatccagttctggattggagctgtgatcttcctgggcatgctggagaaggctgtgttctacgccgagttccagaacatccgctacaagggggagagcgtgcagggcgccctgatcctggccgagctgctgtctgctgtgaagaggagcctggcccggaccctggtgatcatcgtgtccctgggctatggaattgtgaagccccggctgggcgtgaccctgcacaaggtggtggtggccggggccctgtacctgctcttcagcggcatggagggcgtgctgcgggtgactggagcccagacagacctggccagcctggccttcatccccctggccttcctggacacagccctgtgctggtggatcttcatcagcctgacccagaccatgaagctgctgaagctgcggagaaatattgtgaagctgagcctgtaccgccacttcaccaacaccctcatcctggccgtggccgccagcatcgtgttcatcatctggaccaccatgaagttccgcatcgtgacctgccagagcgactggagggagctgtgggtggatgatgccatctggaggctgctcttctccatgatcctcttcgtcatcatggtgctgtggaggccttctgccaacaaccagagatttgccttcagccccctgtctgaggaggaggaggaggatgagcagaaggagcccatgctgaaggagagctttgagggcatgaagatgaggagcaccaagcaggagcccaatggaaacagcaaggtgaacaaggcccaggaggatgacctgaagtgggtggaggagaatgtgcccagctctgtgacagatgtggccctgcctgccctgctggacagtgatgaggagaggatgatcacccactttgagaggagcaagatggagtag

SEQ ID NO: 187035 - DNA, 1596 bp, Artificial Sequence
  derived and/or modified sequence
atgtacaagagaagagtggtgtacctgagtgatgtgtcccagaaccctgtgtccccaggctggatcaggaagggcaagaactacttctcctttgggaagatcctcttcaggaacaccaccatcttcctgaagtttgatggagagccctgtgacctgagcctgaacatcacctggtacctgaagtctgctgactgctacaatgagatctacaacttcaaggccgaggaggtggagctgtacctggagaagctgaaggagaagaggggcctgagcggcaagtaccagaccagcagcaagctgttccagaactgcagcgagctgttcaagacccagaccttcagcggggacttcatgcaccggctgcccctgctgggggagaagcaggaggccaaggaaaatggcaccaacctgaccttcatcggggacaagacagccatgcatgagcccctgcagacctggcaggatgccccctacatcttcatcgtgcacatcggcatcagcagcagcaaggagagcagcaaagaaaacagcctgagcaacctcttcaccatgacagtggaggtgaagggcccctatgagtacctgaccctggaggactaccccctgatgatcttcttcatggtgatgtgcatcgtgtatgtgctgtttggagtgctgtggctggcctggagcgcctgctactggagggacctgctgcgcatccagttctggattggagctgtgatcttcctgggcatgctggagaaggctgtgttctacgccgagttccagaacatccgctacaagggggagagcgtgcagggcgccctgatcctggccgagctgctgtctgctgtgaagaggagcctggcccggaccctggtgatcatcgtgtccctgggctatggaattgtgaagccccggctgggcgtgaccctgcacaaggtggtggtggccggggccctgtacctgctcttcagcggcatggagggcgtgctgcgggtgactggagcccagacagacctggccagcctggccttcatccccctggccttcctggacacagccctgtgctggtggatcttcatcagcctgacccagaccatgaagctgctgaagctgcggagaaatattgtgaagctgagcctgtaccgccacttcaccaacaccctcatcctggccgtggccgccagcatcgtgttcatcatctggaccaccatgaagttccgcatcgtgacctgccagagcgactggagggagctgtgggtggatgatgccatctggaggctgctcttctccatgatcctcttcgtcatcatggtgctgtggaggccttctgccaacaaccagagatttgccttcagccccctgtctgaggaggaggaggaggatgagcagaaggagcccatgctgaaggagagctttgagggcatgaagatgaggagcaccaagcaggagcccaatggaaacagcaaggtgaacaaggcccaggaggatgacctgaagtgggtggaggagaatgtgcccagctctgtgacagatgtggccctgcctgccctgctggacagtgatgaggagaggatgatcacccactttgagaggagcaagatggagtag

SEQ ID NO: 187036 - DNA, 1668 bp, Artificial Sequence
  derived and/or modified sequence
atggccgccgccgcctggctgcaggtgctgcccgtgatcctgctgttacttggcgcccatccaagtcctctgtcattctttagtgctgggcccgccacagtggccgctgcagataggtccaagtggcacataccgattcccagcggtaaaaactacttctccttcggaaagatactatttaggaacaccaccatttttttgaaatttgacggagagccatgcgaccttagcctaaatatcacatggtacctgaaaagcgccgactgttataacgagatctacaatttcaaggccgaggaggtcgaactctatctcgagaagctcaaagagaaaagagggctgagcgggaaatatcaaacatcctcgaagctttttcaaaactgcagcgaactgtttaaaacccaaacttttagtggagactttatgcatcgcctcccacttttgggagaaaagcaggaagcgaaggagaatggaaccaatctgacctttatcggcgacaaaaccgccatgcacgagccacttcagacttggcaagacgcaccatacatttttattgtgcatatagggatttcgtcatccaaggaaagcagtaaggagaactccctttcaaacctcttcacaatgaccgtcgaggtgaaaggaccctacgagtatctgacacttgaggactaccccctaatgatcttctttatggtgatgtgcatcgtctacgtgctgttcggtgtgctgtggttagcgtggagcgcatgctactggagagatttgctgcggattcagttctggataggcgccgtcatcttcctgggcatgcttgaaaaggccgtgttctacgccgaatttcagaatatccgctacaagggggagtcggttcaaggagctcttattttagccgagcttttgtccgctgttaagcgctccctggctcgaacactcgtgatcattgtgtccctgggctacggaatagttaaaccaaggctcggagtgactttgcacaaagtcgtcgtagctggagcactgtacttgctgttttcaggcatggagggtgtcctccgggttacaggagcacaaaccgatctggcctctctcgcttttattccattggcctttttggacacagctttgtgctggtggatcttcatctcactcactcagactatgaaactgctaaagttgaggcgtaatatagtgaaactgtccttgtatcgccatttcacaaacacattgattctggctgtggccgcaagcatagtttttattatatggacgactatgaaatttagaattgtaacctgtcagtctgactggagggagctgtgggtcgatgacgcgatttggagactcctcttttccatgatcctattcgtaataatggtactgtggagacccagtgctaataaccagcgcttcgcattttctccattgagtgaagaagaagaggaggacgaacagaaagagccaatgctgaaagagtccttcgagggcatgaagatgagatcaacaaaacaagaacctaatggcaattcaaaggtgaacaaagcccaggaggacgatctgaaatgggtggaggagaatgttccgtcaagtgtcacggacgtggcactgccggcgctcctcgactcagacgaagagagaatgattacacattttgaaaggtctaagatggagtag

SEQ ID NO: 187037 - DNA, 1596 bp, Artificial Sequence
  derived and/or modified sequence
atgtacaagcggcgggtggtgtacctgagcgacgtgagccagaacccagtgtcacctggctggattcgcaaaggcaagaactacttcagtttcggcaagatcctttttcgcaacaccactatcttcctgaagtttgacggcgaaccctgtgacctgagtcttaacatcacctggtatctgaagagcgccgactgctataatgaaatttataatttcaaggccgaagaggtagaactttacctagagaaacttaaagaaaagaggggcctttccggaaaatatcagaccagctctaaactattccagaattgctcagagctgtttaagacacagaccttcagcggagatttcatgcaccgccttcctctcctgggagagaagcaggaagctaaggagaacgggactaacctgacattcattggggacaagaccgctatgcatgagccgctgcagacgtggcaagatgcaccgtatattttcattgtgcacataggaatatccagcagcaaagagagttccaaggagaactctctgagtaatctttttactatgactgtggaggtgaagggaccctatgagtatctgactttggaggattatccattaatgatcttttttatggtgatgtgtattgtctacgtcctgttcggggttctgtggctggcatggagcgcgtgttactggcgggatcttctgcgaatccaattctggatcggcgccgtgatattcctcggtatgttagagaaagctgtattctatgcagagtttcaaaacattcgttacaagggcgagtccgttcaaggggccctgatactagcagagctgctgtccgcagtcaaacgctccctggcgaggacattggtgatcatcgtctccctgggctatggcatcgtaaagccccgcctcggcgtcaccctgcacaaggtggtggtggccggggctttatacctgctgtttagtgggatggagggagtgctacgcgtgacaggggcacagacggacctggcatctttggcatttattcccctagcgtttttggacacagccttgtgctggtggatcttcatttccttgacccagacaatgaaacttctgaagctgcgccggaacatcgtgaagctttcgctttatagacactttactaataccctaatcctggcagtcgccgcctccatcgtgtttatcatctggaccactatgaaatttaggatcgttacctgtcagagcgattggagggaactgtgggttgacgatgcgatctggcggctcctattttccatgatcctcttcgtgatcatggtgctgtggcggccctccgctaataaccagcgttttgccttttcccctctgtctgaggaagaggaggaggatgaacagaaggagcccatgctcaaagagtcttttgaaggcatgaagatgcgttctacaaaacaggagcccaacggcaactccaaggtgaacaaggcccaagaggacgatctgaagtgggtggaagagaatgtgccctctagtgtaacagatgtggcccttccagcactgctcgacagtgatgaggagcggatgataacccacttcgagagaagcaaaatggagtag

SEQ ID NO: 187038 - DNA, 1668 bp, Artificial Sequence
  derived and/or modified sequence
atggcagccgctgcttggctgcaggtcctcccggttatccttctgctgctcggcgctcatcccagcccattgagctttttcagcgcgggacctgccactgtggctgctgcagaccgcagcaaatggcacatccccatccctagcggcaagaattattttagtttcggcaagattctcttccgtaatactacgattttcctgaagtttgatggagagccttgtgatctgtccttaaatatcacctggtatcttaagtccgccgactgctataatgaaatttataactttaaggccgaagaagtcgaactgtatttagagaagcttaaagagaagagaggtctgtccggtaagtatcaaacttcttcaaagctgttccaaaactgttcggaactgtttaagactcagaccttctcaggggacttcatgcacagattgccgctgttgggagagaagcaggaagctaaagaaaatggtactaacctcacttttataggagacaagaccgcaatgcatgagccactgcagacgtggcaagacgccccatatattttcatcgtccacatcggaatcagctcttctaaggaatctagtaaggaaaactccctgagcaatctcttcaccatgactgtggaagtcaaagggccatatgagtacttgactctggaggattacccgctgatgatctttttcatggtgatgtgtatagtctacgtccttttcggtgtgctctggctcgcctggtctgcttgctactggcgggatctccttagaatacaattttggattggcgctgtgatttttctgggcatgctcgagaaggcagtcttctatgccgagtttcagaacatccgttacaaaggcgaatctgtgcagggggcactgatcctcgctgagctgctgtccgcagtgaaacggtccttggcacgtacactggtgatcattgtctctttggggtacggtattgtgaaaccacggctgggagtgaccttgcacaaggttgtggtcgcgggagcactgtatctcctgttctctgggatggaaggggttctgcgggtgaccggcgcacagaccgatctcgcgtcactcgcgttcatccccctggcctttcttgacacagcactgtgttggtggattttcattagccttactcagaccatgaaattgcttaaactccgcaggaatattgtaaagttgtccctctacagacactttacaaacaccctgatcctggccgtagccgcttctatagtgtttataatttggactaccatgaagtttcggatcgtgacctgccagagtgactggcgagaactgtgggtggacgatgccatttggcgactgctgttctcaatgatattattcgtgattatggtcttgtggcggccatccgctaacaaccagaggttcgcattttctcccttaagtgaagaggaagaagaagacgaacagaaggagcccatgctgaaagagagtttcgaaggaatgaaaatgcgttctaccaagcaggagcctaatgggaactccaaggtgaacaaagcccaagaggacgacctcaaatgggtcgaagaaaatgttccaagctcagtgacggacgtagccctgcctgcccttttggactcggacgaggaaagaatgattacacacttcgaacgcagcaagatggagtag

SEQ ID NO: 187039 - DNA, 1596 bp, Artificial Sequence
  derived and/or modified sequence
atgtataagcggagagtggtgtacctttctgacgtgtcacagaacccagtgagcccaggctggatcaggaaaggtaaaaattacttctctttcggaaagattctgtttagaaataccacaattttccttaagttcgatggcgaaccctgtgacttgtcactgaatattacatggtatctgaagagcgctgattgctacaacgagatatacaacttcaaggccgaggaagtggagctttatctggaaaaactaaaggaaaaacgcggactctccggtaagtatcaaacctcctctaaactgtttcagaactgcagcgagttgttcaagactcagacttttagcggcgacttcatgcacagacttccactcttaggtgagaaacaggaagctaaggagaacggcaccaatttaacctttattggggacaaaaccgcaatgcatgagcccctgcagacatggcaggatgccccttatattttcattgtccacatcggtattagttcaagcaaagaaagttcaaaggagaactctctgtcaaatttgttcacaatgactgtggaggtaaaaggcccatatgaatatctgacactggaagattacccgttaatgatcttctttatggttatgtgtattgtgtatgtcttgttcggagtgctttggttggcctggtctgcttgttattggcgcgatctgctccggatccaattctggattggtgctgtgatttttttgggaatgctcgagaaggccgtcttttatgccgagtttcagaacatccgatacaaaggggaaagcgtacagggcgcacttattttagcagaattgttatccgctgtcaagaggtcactcgcccgtacactcgtgatcatagtgtccctgggatacgggatcgtaaaaccacgcctgggcgtcacattgcataaggtcgttgtagctggcgcactgtatttactcttttctgggatggaaggcgtcctgcgcgtcactggggcacagaccgacctcgctagtctggcctttatcccactggcttttcttgatactgcactgtgttggtggatcttcatcagcctgacccagacaatgaaactgcttaaactgcgacgtaacattgttaaacttagcctatatcgacactttacaaacacattgattctggccgtggccgcttcaatagtattcataatctggaccacgatgaagtttagaattgttacgtgccagtcagattggagggagttgtgggtagatgacgccatatggcggctgttgttcagtatgatcctgttcgtaatcatggttctgtggagacccagcgccaacaaccagaggttcgctttttccccgctgtcagaagaggaagaagaggacgagcagaaggaaccaatgctcaaggagtctttcgagggtatgaaaatgcggtcgacaaaacaggaacccaatggcaacagcaaagtgaataaggctcaggaggatgatcttaagtgggtggaagagaatgtcccttcctccgtgaccgatgtggctctacccgctctgctggattctgacgaagagagaatgatcacacactttgagcgatcgaaaatggagtag

SEQ ID NO: 187040 - DNA, 3005 bp, Artificial Sequence
  derived and/or modified sequence
gacgactgtctgagagaggggccgctacgccgcacagcaaacaagctccgcgacgtttccaggacccggataatcccgcccttagagcagagccggaagaaggcgggacgaaccggaagagggtgaaatgctttcggtaggcactccacggctgtgaagatggcggcggctgcgtggcttcaggtgttgcctgtcattcttctgcttctgggagctcacccgtcaccactgtcgtttttcagtgcgggaccggcaaccgtagctgctgccgaccggtccaaatggcacattccgataccgtcggggaaaaattattttagttttggaaagatcctcttcagaaataccactatcttcctgaagtttgatggagaaccttgtgacctgtctttgaatataacctggtatctgaaaagcgctgattgttacaatgaaatctataacttcaaggcagaagaagtagagttgtatttggaaaaacttaaggaaaaaagaggcttgtctgggaaatatcaaacatcatcaaaattgttccagaactgcagtgaactctttaaaacacagaccttttctggagattttatgcatcgactgcctcttttaggagaaaaacaggaggctaaggagaatggaacaaaccttacctttattggagacaaaaccgcaatgcatgaaccattgcaaacttggcaagatgcaccatacatttttattgtacatattggcatttcatcctcaaaggaatcatcaaaagaaaattcactgagtaatctttttaccatgactgttgaagtgaagggtccctatgaatacctcacacttgaagactatcccttgatgatttttttcatggtgatgtgtattgtatatgtcctgtttggtgttctgtggctggcatggtctgcctgctactggagagatctcctgagaattcagttttggattggtgctgtcatcttcctgggaatgcttgagaaagctgtcttctatgcggaatttcagaatatccgatacaaaggagaatctgtccagggtgctttgatccttgcagagctgctttcagcagtgaaacgctcactggctcgaaccctggtcatcatagtcagtctgggatatggcatcgtcaagccacgccttggagtcactcttcataaggttgtagtagcaggagccctctatcttttgttctctggcatggaaggggtcctcagagttactggggcccagactgatcttgcttccttggcctttatccccttggctttcctagacactgccttgtgctggtggatatttattagcctgactcaaacaatgaagctattaaaacttcggaggaacattgtaaaactctctttgtatcggcatttcaccaacacgcttattttggcagtggcagcatccattgtgtttatcatctggacaaccatgaagttcagaatagtgacatgtcagtcggactggcgggagctgtgggtagacgatgccatctggcgcttgctgttctccatgatcctctttgtcatcatggttctctggcgaccatctgcaaacaaccagaggtttgccttttcaccattgtctgaggaagaggaggaggatgaacaaaaggagcctatgctgaaagaaagctttgaaggaatgaaaatgagaagtaccaaacaagaacccaatggaaatagtaaagttaacaaagcacaggaagatgatttgaagtgggtagaagagaatgttccttcttctgtgacagatgtagcacttccagcccttctggattcagatgaggaacgaatgatcacacactttgaaaggtccaaaatggagtaaggaatgggaagatttgcagttaaagatggctaccatcagggaagagatcagcatctgtgtcagtcttctgtacggctccatgggattaaaggaagcaatgacatcctgatctgttccttgatctttgggcattggagttggcgagaggtgtcagaacaaagagaacatcttactgaaaacaagttcataagatgagaaaaatctacgagcttcttatttacaacactgctgccccctttcctcccagactctgacatggatgttcatgcaacttaagtgtgttgttcctgaactttctgtaatgtttcattttttaaatctgacaaactaaaaagtttaacgtcttctaaaagattgtcatcaacaccataatatgtaatctccaggagcaactgcctgtaatttttatttatttagggagttacataggtgatgggggaaattgttaactacctttcattttcctgggaagtcaaggttacatcttgcagaggttgttttgagaaaaaagggcccttctgagttaaggagccatagttctatcaatgatcaaaagaaaaaaaaaaaaagagaaactgttacagtatgattcagatcatttaaaaaagcaaaatcaagtgcaattttgtttacaaatggtgtatattaaagatttttctatttcagatgtactttaaagagaaatattagcttaactcttttgacatctgctattgtgacacatcccattgctggcaatgtggtgcacactccgaaacttttaactactgttttgtaagcctccaagggtggcattgcagggtccttaggcaatgttttgtttgcctttatgcagagaggtgctccaagtgctgtgattgagcaccgtgctagaggaactgtaatgcttcagaagttgtagcttatacaaaggaaacaggtcctgctggcttaatttaaacagttattgcatgaagtagcgtggaggccctggactgctgctcgttctttaggatggactgttctggtatctggtattggtttagagactgttaataagggacatcacaaggtgatgggattcatttgaagcactctatttctgttttaatggttttatccaattttgccttcccaagatttttgttctacataaaaagttcatgccactttttaatataaaaaaatttaacaaaatt

SEQ ID NO: 187041 - DNA, 2072 bp, Artificial Sequence
  derived and/or modified sequence
tagcgggaatgtaagggccacttcagcaacagaaaggagtggtggagcggcttctcatcagaaaaacagaactttcagtgcctgacttgagatgtaaacttgatgtacaaacggagagttgtttatctttcagatgtttcacagaatccagtgtccccgggttggataagaaaggggaaaaattattttagttttggaaagatcctcttcagaaataccactatcttcctgaagtttgatggagaaccttgtgacctgtctttgaatataacctggtatctgaaaagcgctgattgttacaatgaaatctataacttcaaggcagaagaagtagagttgtatttggaaaaacttaaggaaaaaagaggcttgtctgggaaatatcaaacatcatcaaaattgttccagaactgcagtgaactctttaaaacacagaccttttctggagattttatgcatcgactgcctcttttaggagaaaaacaggaggctaaggagaatggaacaaaccttacctttattggagacaaaaccgcaatgcatgaaccattgcaaacttggcaagatgcaccatacatttttattgtacatattggcatttcatcctcaaaggaatcatcaaaagaaaattcactgagtaatctttttaccatgactgttgaagtgaagggtccctatgaatacctcacacttgaagactatcccttgatgatttttttcatggtgatgtgtattgtatatgtcctgtttggtgttctgtggctggcatggtctgcctgctactggagagatctcctgagaattcagttttggattggtgctgtcatcttcctgggaatgcttgagaaagctgtcttctatgcggaatttcagaatatccgatacaaaggagaatctgtccagggtgctttgatccttgcagagctgctttcagcagtgaaacgctcactggctcgaaccctggtcatcatagtcagtctgggatatggcatcgtcaagccacgccttggagtcactcttcataaggttgtagtagcaggagccctctatcttttgttctctggcatggaaggggtcctcagagttactggggcccagactgatcttgcttccttggcctttatccccttggctttcctagacactgccttgtgctggtggatatttattagcctgactcaaacaatgaagctattaaaacttcggaggaacattgtaaaactctctttgtatcggcatttcaccaacacgcttattttggcagtggcagcatccattgtgtttatcatctggacaaccatgaagttcagaatagtgacatgtcagtcggactggcgggagctgtgggtagacgatgccatctggcgcttgctgttctccatgatcctctttgtcatcatggttctctggcgaccatctgcaaacaaccagaggtttgccttttcaccattgtctgaggaagaggaggaggatgaacaaaaggagcctatgctgaaagaaagctttgaaggaatgaaaatgagaagtaccaaacaagaacccaatggaaatagtaaagttaacaaagcacaggaagatgatttgaagtgggtagaagagaatgttccttcttctgtgacagatgtagcacttccagcccttctggattcagatgaggaacgaatgatcacacactttgaaaggtccaaaatggagtaaggaatgggaagatttgcagttaaagatggctaccatcagggaagagatcagcatctgtgtcagtcttctgtacggctccatgggattaaaggaagcaatgacatcctgatctgttccttgatctttgggcattggagttggcgagaggtgtcagaacaaagagaacatcttactgaaaacaagttcataagatgagaaaaatctacgagcttcttatttacaacactgctgccccctttcctcccagactctgacatggatgttcatgcaacttaagtgtgttgttcctgaactttctgtaatgtttcattttttaaatctgacaaactaaaaagtttaacgtcttctaaaagattgtcatcaacaccataata

SEQ ID NO: 187042 - protein, 671 aa, Artificial Sequence
  derived and/or modified sequence
MNGAPSPEDGASPSSPPLPPPPPPSWREFCESHARAAALDFARRFRLYLASHPQYAGPGAEAAFSRRFAELFLQHFEAEVARASGSLSPPILAPLSPGAEISPHDLSLESCRVGGPLAVLGPSRSSEDLAGPLPSSVSSSSTTSSKPKLKKRFSLRSVGRSVRGSVRGILQWRGTVDPPSSAGPLETSSGPPVLGGNSNSNSSGGAGTVGRGLVSDGTSPGERWTHRFERLRLSRGGGALKDGAGMVQREELLSFMGAEEAAPDPAGVGRGGGVAGPPSGGGGQPQWQKCRLLLRSEGEGGGGSRLEFFVPPKASRPRLSIPCSSITDVRTTTALEMPDRENTFVVKVEGPSEYIMETVDAQHVKAWVSDIQECLSPGPCPATSPRPMTLPLAPGTSFLTRENTDSLELSCLNHSESLPSQDLLLGPSESNDRLSQGAYGGLSDRPSASISPSSASIAASHFDSMELLPPELPPRIPIEEGPPTGTVHPLSAPYPPLDTPETATGSFLFQGEPEGGEGDQPLSGYPWFHGMLSRLKAAQLVLTGGTGSHGVFLVRQSETRRGEYVLTFNFQGKAKHLRLSLNEEGQCRVQHLWFQSIFDMLEHFRVHPIPLESGGSSDVVLVSYVPSSQRQQGREQAGSHAGVCEGDGCHPDASCTLMPFGASDCVTDHLP

SEQ ID NO: 187043 - protein, 335 aa, Artificial Sequence
  derived and/or modified sequence
MPDRENTFVVKVEGPSEYIMETVDAQHVKAWVSDIQECLSPGPCPATSPRPMTLPLAPGTSFLTRENTDSLELSCLNHSESLPSQDLLLGPSESNDRLSQGAYGGLSDRPSASISPSSASIAASHFDSMELLPPELPPRIPIEEGPPTGTVHPLSAPYPPLDTPETATGSFLFQGEPEGGEGDQPLSGYPWFHGMLSRLKAAQLVLTGGTGSHGVFLVRQSETRRGEYVLTFNFQGKAKHLRLSLNEEGQCRVQHLWFQSIFDMLEHFRVHPIPLESGGSSDVVLVSYVPSSQRQQGREQAGSHAGVCEGDGCHPDASCTLMPFGASDCVTDHLP

SEQ ID NO: 187044 - DNA, 2271 bp, Artificial Sequence
  derived and/or modified sequence
atgaatggcgctccctcgcccgaagatggcgcatccccaagctcacctccattgccacctcctcccccacctagttggcgcgagttctgcgagagccatgcacgcgctgcagcgcttgactttgctagacggtttagactgtacctagctagccaccctcagtacgccggtcctggcgccgaagcagcattctcccggaggttcgcagagctgtttctgcagcatttcgaggctgaggtggcaagagcaagcggaagtctaagcccccccatactggccccacttagcccgggagccgaaatctcacctcacgatctcagcctggaaagctgccgcgtcgggggcccactggccgtcctcggccctagtcggtcttctgaagatcttgctggacctctaccctcctccgtcagcagttcatctacaacgtcctccaaaccgaagctaaaaaagcggttttctctgaggagcgttgggagaagtgttcggggatctgtacgggggatactccagtggaggggcacggttgacccaccttcatctgccggcccactcgagacttcctcaggacctccagtcctgggaggaaacagtaattctaattcaagtggcggagcagggacagtcgggcgggggctcgtttcggatggaacctcacctggcgagcggtggacacacaggtttgagagattgagattgtcacgcggtggcggcgccttgaaggacggcgcaggcatggtccagcgagaggagctgctgagtttcatgggggccgaagaggccgctccagaccccgctggcgtggggagaggcggcggagtggctggtccaccctctggcggcggcggtcagccccagtggcaaaagtgtcggctattgctcagatccgaaggggagggaggcggcgggagccggctggagttcttcgtgccgccaaaggcttctagacctagactttccattccttgctcttccatcaccgatgttagaacaacaacagctctggagatgccggaccgggaaaacacctttgtcgtaaaagttgagggccccagcgagtacatcatggagacagtcgatgcccagcacgtgaaagcctgggtctccgatatccaggaatgcctctcccctgggccatgtcccgctactagtccccggcccatgacactgcctttggccccaggaactagctttctgacccgtgagaatactgactccttggaacttagttgtttgaaccactccgagtctttgcctagtcaggatttgttgctcggaccatccgagagtaatgatcgcttgtcccagggtgcttatggggggctgtctgatagaccttcagccagcatctctccttcctccgctagcattgccgctagtcacttcgattcaatggaactcctgccccccgagttgccacctaggatcccgatcgaagagggtccaccgaccggtactgtgcacccactcagcgcaccctaccctcctcttgatacaccagagacagcgacaggctcctttctcttccaaggggagccagaggggggggagggagatcaacccctgtctggctacccctggttccacggaatgctgtcaagattaaaggccgcccaacttgtcctgacaggaggaactggatctcacggcgtgttcctcgttcgccagtccgaaacccgccgcggcgaatatgtgctcacgtttaactttcagggcaaagcgaaacatctccgtctcagtctaaatgaagaagggcagtgtcgcgtacagcacctgtggtttcagtccattttcgacatgcttgagcattttcgagtccaccctatcccactggaatcaggtggcagctccgatgtggtactggtgagctatgtgccgagctcacagagacagcaagagccgacaaccagtcatgatcctccccaaccgcctgagcctccctcttggacagaccccccccagcctggagcagaagaggcatcacgcgcccccgaagtggctgcggctgcagctgctgctgcaaaggaacgccaagagaaagaaaaggccggtggaggcggtgtcccagaagagcttgttcccgtggtggagctggtgcctgttgtggaactggaggaggccattgccccagggtcagaagcccaaggggccggcagtgggggcgatgccggcgtgcccccaatggtccaacttcaacaatctcccttaggcggagatggggaggaggggggtcaccctcgtgctatcaataatcagtattcttttgtgtag

SEQ ID NO: 187045 - DNA, 2016 bp, Artificial Sequence
  derived and/or modified sequence
atgaacggtgctccatcgcccgaggatggcgccagtccatcatccccccccctcccaccccctcccccacctagttggagagagttctgcgagtcccacgcccgcgcggccgctctagattttgcacgtcgcttccgcctttatctagctagccacccacagtatgccggccctggagctgaggcagctttcagtcgccgctttgcggagttattcctgcagcacttcgaagccgaagttgcacgagcctccgggagtcttagtcctcctattctggctcctctgtccccaggcgccgaaatctcaccacacgacttgtccctggaaagctgtcgagtcggggggcccttggctgtactgggtccgtcaaggagcagtgaagatctggctggccccttaccctcttccgtgagcagttccagcaccacaagtagcaagcctaaactcaaaaagcgtttcagcctacgctcggttgggagatctgtgcgcggcagcgtccgggggatcctccagtggaggggaaccgttgaccctccaagcagcgccggaccactggagacatccagtggccctccagtgctcggaggcaacagcaactccaattccagtggaggagctggcaccgttggacgtgggctcgtgtccgacggtacgtcgccgggcgagagatggacccatcgattcgagcgtctgcgactgagtagaggggggggagctctcaaggatggggctggtatggtgcagagggaggagctgttgtcgtttatgggcgccgaggaggccgcgcccgatcccgccggcgtgggcagaggcggcggcgtggctggaccaccaagcggcggaggcggccagccgcaatggcagaagtgtagactgctgctgcgatcagaaggagaaggaggcggggggagtcggctggagttcttcgtccctcccaaggccagtagacctcgcctctcgataccctgttcatctataactgatgtcagaactacaacagcgctcgagatgcccgaccgcgagaacaccttcgtggtgaaggtggagggaccatctgagtacattatggaaacagtagacgcacagcatgtgaaggcctgggtttccgacatccaagaatgtttatcccctgggccttgtccggctacctcccctcgcccgatgactttgcctttagcacctgggacttcttttctgacccgtgagaacacagattccctcgagttgtcttgcctcaaccatagcgaatctctgccgagccaggacctgttattgggaccatctgaatcgaacgatcgactgagtcaaggtgcgtacggcggattaagcgacaggccttcagcctcaatctctccatcctccgccagtattgctgcctctcattttgattctatggaactccttccccccgagctgccaccccgtattcccattgaagaagggccccctacagggaccgttcatccgttgagcgccccctatccaccactggatacaccggaaaccgccactggatcctttctttttcaaggcgaaccagagggtggagaaggcgatcagcccctatctggctacccatggttccatgggatgctgtcccgactcaaggctgcgcagctcgtcctgactggagggaccggatcccacggcgtgtttttggtacgacaaagtgaaacaaggcgaggcgagtatgtgttaacatttaactttcaggggaaggctaagcatttgcgtcttagcttaaatgaggaagggcaatgccgggtgcagcacctgtggttccagtctatctttgacatgttagaacactttcgagtacatccaattcctctggagtctggaggttcgagcgacgtcgtgcttgtctcatacgtcccctcgagccagcggcagcagggcagagagcaggctggctctcatgcaggggtttgcgaaggtgacggctgtcatccagacgcctcctgtacgttgatgccttttggcgcgtccgactgtgtgaccgatcacctgccctag

SEQ ID NO: 187046 - DNA, 2016 bp, Artificial Sequence
  derived and/or modified sequence
atgaacggagcacctagcccagaagatggcgcttccccgtccagcccccctttgcctccccccccccccccatcctggagagagttctgcgagtctcatgcaagagcagcagctctcgactttgcaaggcggttccgattgtacctggcttcacacccccagtacgccgggcccggagcagaagccgctttctcccgacggttcgcagagttgtttctgcagcactttgaagcagaagtggctagggcttccgggtctctctctccacctatcctggccccattgagcccgggggctgaaatctctccccacgatttatctcttgaatcctgccgagtggggggccccctggctgtgctgggtcccagtaggtcgtccgaagatctggccggtcccctgcctagttctgtgtcttctagctccacaactagtagtaagcccaaactcaaaaagagattcagtctccgtagcgttggacgctctgtgcgcggctctgtccgggggattttgcagtggagaggtaccgtggatccgccgtccagtgccggcccccttgagacctcaagcggtcccccagtccttggcggaaacagcaactctaatagctctgggggagccggcaccgtgggcagggggctcgtgagcgacggaacatcccccggggagcggtggacgcatcggttcgagagattgcgcttgtcccggggcgggggggcacttaaggacggtgccggcatggtgcaaagggaagaactgctgagtttcatgggagcagaggaggccgctcccgatcccgccggagtgggccggggcggtggcgttgccggaccacctagcggcggcggtgggcagccgcagtggcaaaagtgcaggcttttgcttaggagtgagggcgaaggtgggggaggatccagactggagttttttgtgcccccgaaagctagcagaccgagattatctattccttgtagctctattacagatgttcgaactactacagcactcgaaatgccagacagggaaaatactttcgtggtgaaggttgaaggaccttcagagtatatcatggagactgtggatgcccagcatgtaaaggcctgggtaagtgatattcaggaatgtctttcccccggaccttgcccagccaccagcccacggccaatgacactgccacttgctccaggcacctcctttctcactcgggaaaataccgatagcctggagctatcttgtctgaatcattctgaaagcctccccagccaagacctgctgttgggaccgagcgaatccaacgaccggctgtctcagggggcatacggaggattatccgatcgcccctccgctagcatttccccatctagtgcgagcatcgcagctagtcattttgatagcatggagctgctgcctcctgagctgcctccgagaatcccaattgaggaaggaccacccaccggaaccgtgcacccacttagtgccccctatcctccactggacactccggagacggctactggcagctttctgtttcagggagagcccgaaggcggtgagggggatcaaccgctctccggctacccgtggtttcacgggatgttgtcaaggctgaaggcagcacagttagtcttgactgggggaaccggaagtcacggcgtgttcttggttaggcagtccgaaaccagacgtggggagtacgttctcacctttaacttccagggcaaggccaagcatctgcgactctccctgaacgaggaggggcagtgtcgagtgcaacatctgtggtttcagtctatctttgacatgcttgaacatttccgagtgcatcccatacccctagagagtggggggtctagtgacgtggtgttggtatcatatgttccgagcagccagcgccagcaggggagagaacaggcggggtcccatgcaggggtgtgcgaaggggatgggtgccacccggatgcaagctgtactctcatgccttttggggcttcagattgcgtgacagatcatcttccatag

SEQ ID NO: 187047 - DNA, 2271 bp, Artificial Sequence
  derived and/or modified sequence
atgaatggagcccccagcccagaagatggagccagccccagcagcccccccctgcccccacctcctcctccttcctggagggagttctgtgagagccacgcccgggctgctgccctggactttgcccggcgcttccggctgtacctggccagccacccccagtatgccggccctggagctgaggccgccttcagccgccgctttgctgagctgttcctgcagcactttgaggccgaggtggcccgggccagcggcagcctgagcccccccatcctggcccccctgagccctggagctgagatcagcccccatgacctgagcctggagagctgccgggtgggcggccccctggccgtgctgggccccagccgcagcagcgaggacctggccggccccctgcccagctctgtgagcagcagcagcaccaccagcagcaagcccaagctgaagaagcgcttcagcctgcggtctgtgggccgctctgtgcggggctctgtgcggggcatcctgcagtggaggggcaccgtggacccccccagcagcgctggccccctggagaccagcagcggcccccctgtgctgggcggcaacagcaacagcaacagcagtggaggagctggcaccgtgggccggggcctggtgtctgatggcaccagccctggagagcgctggacccacagatttgagcggctgcggctgagccggggcggcggggccctgaaggatggagctggcatggtgcagcgggaggagctgctgtccttcatgggcgctgaggaggccgccccagaccctgctggggtgggccggggcggcggcgtggccggccccccatctgggggcggcggccagccccagtggcagaagtgccgcctgctgctgcggtctgagggggagggcggcggcggcagccggctggagttctttgtgccccccaaggccagccggccccggctgagcatcccctgcagcagcatcacagatgtgaggaccaccacagccctggagatgccagaccgggagaacacctttgtggtgaaggtggagggccccagcgagtacatcatggagaccgtggatgcccagcacgtgaaggcctgggtgtctgacatccaggagtgcctgagccctggcccctgcccagccaccagcccccggcccatgaccctgcccctggcccctggcaccagcttcctgacccgggagaacacagacagcctggagctgagctgcctgaaccacagcgagagcctgcccagccaggacctgctgctgggccccagcgagagcaatgaccggctgagccagggcgcctatggaggcctgagtgaccggcccagcgccagcatcagccccagcagcgccagcattgctgccagccactttgacagcatggagctgctgcccccagagctgcccccacgcatccccatcgaggagggcccccccaccggcaccgtgcaccccctgagcgccccctacccacccctggacaccccagagacagccaccggcagcttcctgttccagggcgagcctgagggcggggagggggaccagcccctgagcggctacccctggttccacggcatgctgagccggctgaaggccgcccagctggtgctgactggaggcaccggcagccatggagtcttcctggtgcggcagagcgagacccggcggggggagtatgtgctgaccttcaacttccagggcaaggccaagcacctgcggctgagcctgaatgaggagggccagtgccgggtgcagcacctgtggttccagagcatctttgacatgctggagcacttccgggtgcaccccatccccctggagagcggcggcagcagtgatgtggtgctggtgtcctatgtgcccagcagccagaggcagcaggagcccaccaccagccatgaccccccccagcccccagagccccccagctggacagaccccccccagcctggagctgaggaggccagccgggcccctgaggtggccgctgctgctgctgctgctgccaaggagcggcaggagaaggagaaggccggcggcggcggcgtgcctgaggagctggtgcctgtggtggagctggtgcctgtggtggagctggaggaggccatcgcccctggcagcgaggcccagggcgccggcagcggaggagatgctggggtgccccccatggtgcagctgcagcagagccccctgggcggagatggagaggagggcggccacccccgggccatcaacaaccagtacagctttgtgtag

SEQ ID NO: 187048 - DNA, 2016 bp, Artificial Sequence
  derived and/or modified sequence
atgaatggagcccccagcccagaagatggagccagccccagcagcccccccctgcccccacctcctcctccttcctggagggagttctgtgagagccacgcccgggctgctgccctggactttgcccggcgcttccggctgtacctggccagccacccccagtatgccggccctggagctgaggccgccttcagccgccgctttgctgagctgttcctgcagcactttgaggccgaggtggcccgggccagcggcagcctgagcccccccatcctggcccccctgagccctggagctgagatcagcccccatgacctgagcctggagagctgccgggtgggcggccccctggccgtgctgggccccagccgcagcagcgaggacctggccggccccctgcccagctctgtgagcagcagcagcaccaccagcagcaagcccaagctgaagaagcgcttcagcctgcggtctgtgggccgctctgtgcggggctctgtgcggggcatcctgcagtggaggggcaccgtggacccccccagcagcgctggccccctggagaccagcagcggcccccctgtgctgggcggcaacagcaacagcaacagcagtggaggagctggcaccgtgggccggggcctggtgtctgatggcaccagccctggagagcgctggacccacagatttgagcggctgcggctgagccggggcggcggggccctgaaggatggagctggcatggtgcagcgggaggagctgctgtccttcatgggcgctgaggaggccgccccagaccctgctggggtgggccggggcggcggcgtggccggccccccatctgggggcggcggccagccccagtggcagaagtgccgcctgctgctgcggtctgagggggagggcggcggcggcagccggctggagttctttgtgccccccaaggccagccggccccggctgagcatcccctgcagcagcatcacagatgtgaggaccaccacagccctggagatgccagaccgggagaacacctttgtggtgaaggtggagggccccagcgagtacatcatggagaccgtggatgcccagcacgtgaaggcctgggtgtctgacatccaggagtgcctgagccctggcccctgcccagccaccagcccccggcccatgaccctgcccctggcccctggcaccagcttcctgacccgggagaacacagacagcctggagctgagctgcctgaaccacagcgagagcctgcccagccaggacctgctgctgggccccagcgagagcaatgaccggctgagccagggcgcctatggaggcctgagtgaccggcccagcgccagcatcagccccagcagcgccagcattgctgccagccactttgacagcatggagctgctgcccccagagctgcccccacgcatccccatcgaggagggcccccccaccggcaccgtgcaccccctgagcgccccctacccacccctggacaccccagagacagccaccggcagcttcctgttccagggcgagcctgagggcggggagggggaccagcccctgagcggctacccctggttccacggcatgctgagccggctgaaggccgcccagctggtgctgactggaggcaccggcagccatggagtcttcctggtgcggcagagcgagacccggcggggggagtatgtgctgaccttcaacttccagggcaaggccaagcacctgcggctgagcctgaatgaggagggccagtgccgggtgcagcacctgtggttccagagcatctttgacatgctggagcacttccgggtgcaccccatccccctggagagcggcggcagcagtgatgtggtgctggtgtcctatgtgcccagcagccagaggcagcagggccgggagcaggccggcagccatgctggggtgtgtgaaggagatggctgccacccagatgccagctgcaccctgatgccctttggagccagtgactgtgtgacagaccacctgccctag

SEQ ID NO: 187049 - DNA, 2271 bp, Artificial Sequence
  derived and/or modified sequence
atgaacggcgcccccagccccgaggacggcgccagccccagcagcccaccgttgccccctccccctcctccttcctggcgcgagttctgcgagtcccacgcacgcgccgcagctctcgactttgcacgaagatttaggctttatctcgcctcccaccctcagtacgcgggcccgggcgcggaagctgcattcagccgaagatttgccgagctattcttgcagcacttcgaggcagaggtagcccgtgcctccggatcactgagcccacccatcttagcaccactctcccccggtgccgagatatcacctcatgatctgtctctagagagctgcagagtgggcgggccgctggcagtcctgggaccctcacgatcctcagaagatcttgcaggtcctttgccgtcttcagtgagctcttcaagtacgacctcctccaaacctaagctgaaaaaacggttttccttacggtccgtggggcgaagcgtgcggggcagcgtgagaggcatccttcaatggcgcggcactgtagatccgccgagtagtgcagggcctctggagacatcatcggggccccccgtgctgggcgggaactccaactctaacagtagtgggggtgccggaactgtcgggcggggactggtgtcagacggaacttcacctggcgagcggtggacccaccggtttgagagactaagattgtccagaggcggtggcgcactcaaggatggcgcaggaatggtacaacgcgaggagcttctgagctttatgggtgccgaggaggccgcaccggatccagcgggggttggccgcggtgggggggtagccggccccccctccggggggggcggtcagccacagtggcaaaaatgtcggctgctgctgcgctctgagggggagggcggaggggggagcaggcttgagttcttcgttccacccaaagctagtagaccacgcctgagcattccctgctctagcatcaccgatgtgcggacgacaactgctctggagatgcccgacagggaaaatacttttgtagtgaaggttgaaggacctagtgagtacatcatggagacggttgacgcgcagcatgtgaaggcctgggtttccgacattcaggagtgtctgtcaccgggcccatgccctgctacaagcccgcggcccatgaccttgcctctggcgcccggaaccagcttcttgactcgggaaaacacggactcactagaactctcttgcctcaaccactctgagtccctcccgagccaggatctcttgctcggcccttctgagtcgaatgatcggctgtcgcagggcgcgtacggaggcctctccgatagaccctccgcttccatctccccttccagtgcctccatcgcagcttcacattttgacagcatggaacttctgccccccgaactacctcccagaattcctattgaagaaggccctcctactggcacggtacaccccttaagtgctccttatccacccctcgacacccctgagactgccaccggttcatttcttttccagggcgagcctgaaggaggagagggcgaccagccactttccgggtacccttggttccatggaatgctgagtaggcttaaagcggcccagttagtgctgacaggcgggaccggttcccatggagtgtttctggtgcggcagtcagaaactcgccggggagagtacgtgctcaccttcaactttcaggggaaagccaaacacctccgtctatcgctgaatgaggaggggcagtgcagggtgcagcatctctggttccaatccatctttgacatgctcgagcactttcgggtccacccaatacccttggagtcgggaggcagctccgacgtagtgctggttagctatgtgccttcctcccagcgtcagcaggaacctaccaccagccacgatcccccccagccccccgaacctcccagctggaccgatcccccacagcccggcgcagaggaggcttcaagagcgccagaagttgcggccgctgccgctgctgctgccaaagagcgccaagaaaaggaaaaggctggaggcggcggcgtgcccgaggagctcgtgcccgtggtggagctcgtaccagtggtcgagctcgaggaggcgattgcgccaggaagcgaagcccaaggcgccgggagcggaggtgatgcaggtgtcccccctatggtgcagctacagcaatcgccactcgggggcgacggtgaggaaggagggcatccccgggccattaataaccagtactcattcgtgtag

SEQ ID NO: 187050 - DNA, 2016 bp, Artificial Sequence
  derived and/or modified sequence
atgaacggcgcccccagccccgaggacggcgccagccccagcagccctcccttgccaccacctcccccaccaagctggcgagaattttgtgaaagtcacgcgagggcggctgccctggatttcgccagaaggttcagattgtatctggctagtcatcctcagtacgctggacctggcgccgaagcagcttttagccgccgctttgcagaactatttttgcaacatttcgaggcggaagttgctagggcttcaggatctttatcccctcccatcttagcccccctgagtcccggtgccgagatttccccgcacgatctgagcctggaaagctgcagggtgggaggtcccctggccgttctcggaccctctagaagttcggaggacctggccggccctctgcccagttcagtgagttccagttcaacaacctctagtaagccaaaacttaaaaaaagattctctctcagatcagtcggtcggtccgttcgaggtagcgttcggggcatcctccaatggaggggcaccgtagacccaccaagttcagccggcccattggagacctccagtggacccccggtgttaggcgggaattcaaattccaacagctcagggggcgccggaacggtagggagaggcttggtctcagatggaacgtctcctggtgaaaggtggacacatagatttgagaggctgagactctccagggggggtggcgctctgaaagatggggctggcatggtccagcgtgaggagctgctcagctttatgggagccgaagaggcagcgcccgatccagcaggtgtaggcagaggcggaggcgtggcgggtccaccatcgggggggggtggccagccacagtggcagaagtgtcggctgttactgaggagcgagggtgaaggcggcggtggaagccgactggaattctttgtgccacccaaggcttcgcggccccgactttcaattccatgctcatccattacggatgtgagaactaccaccgcactggaaatgcccgatcgcgagaacaccttcgtagtgaaggtagaaggcccaagtgagtatattatggagacagtggatgctcagcacgttaaggcatgggtgtctgatatacaggagtgcctctctccgggcccctgtcctgccacctcccctagacctatgacacttcctctagcacccggtacgagctttctgacacgggagaatacggactctttggagctttcgtgcctgaatcatagcgagtctctcccttcacaggacctcctgctgggacccagcgagtccaacgatcgtctgtctcagggtgcctacggaggattgagcgaccgcccatcagcttccattagcccttcctctgcctctattgcggcctcacacttcgatagcatggaactgttgccgccagaactccctcctcgtattccaatcgaagagggcccccctactggtactgtgcaccccctgagtgccccataccctccactggacacgcctgagaccgccacaggctcgttcctgttccagggagaacccgagggaggggaaggcgaccaacctctaagcgggtatccgtggttccacggcatgctttcgcgcctgaaggccgcgcaactggtgttgaccggcggcactggcagtcacggcgttttcctggtgagacagagcgaaaccaggcgcggagaatatgttcttacttttaattttcagggaaaagctaaacatttgagactatctcttaacgaggagggccagtgtcgggtacaacatctttggttccaaagcatcttcgacatgctcgagcattttcgtgtacaccctatcccacttgaatccggcggcagttccgatgtggtcctggtctcttacgtaccatctagccaaaggcagcaggggagggagcaggctggtagtcacgcgggggtctgtgagggtgacgggtgccaccctgatgcctcctgtaccctgatgccattcggcgcgtcggactgcgtgaccgaccatcttccctag

SEQ ID NO: 187051 - DNA, 2016 bp, Artificial Sequence
  derived and/or modified sequence
atgaacggcgcccccagccccgaggacggcgccagccccagcagcccaccactgccacctccccccccaccctcctggagagagttctgcgagtctcacgcacgtgccgccgcgctggactttgccagaagattccgcttatacctggcttcacaccctcagtatgctggacctggggccgaagcagctttctccagacgctttgctgaactgtttctgcaacatttcgaggccgaagtcgctcgtgcctccggtagcctcagtcccccaattttggcccctttgagccccggggcagagatatccccacatgatctctccttggagagttgccgtgtcggagggcccctggcggtgctgggtccctcccgctcctccgaggatctggctggacccctcccctcaagcgtgtcaagttcgtccacgacctcttctaagcctaaacttaagaagcggttctccctcaggagtgttggtaggagcgttcgcggtagtgtgaggggtattttacagtggagaggcacggtagaccctcccagctccgccggtccgctggagacttcaagtggaccacccgttcttggtgggaattctaactctaactccagcggaggcgcaggaaccgtcggccgaggcctcgtatcggacggtaccagcccaggtgagaggtggacccacaggttcgagagactgcgcctgtcgagagggggaggcgccttaaaggatggagcggggatggtgcagagagaggagctgctgtccttcatgggagcagaggaggccgctcccgaccccgccggagtcggtagaggcggtggtgtggccggacccccaagtggaggcgggggccagccacagtggcagaagtgtcgcttgctgctgcgttctgagggcgaggggggcggagggtcacgcctggaatttttcgtgccgcccaaggctagtcgccccagactgtctattccctgtagctcaattaccgacgtgcgtaccacaacagccctcgagatgccagaccgggagaacacgtttgtcgtgaaggtggagggtccttctgagtacatcatggaaaccgttgatgctcaacatgttaaagcatgggtttctgatattcaggagtgtctttccccaggcccttgccctgctacgagtccacgacccatgactctgcccttggcgcctgggacctccttcctcactagagagaatacggactctctggagctctcctgcctgaaccattccgaaagcctgccatcacaggaccttttacttggcccaagcgagtccaacgaccgactttcccagggcgcttatgggggcttatccgaccgcccaagtgcttctataagtccatcctcggcttctattgctgctagccatttcgacagcatggagctgctgccaccagaactccccccacggattcctatcgaagaaggccctcccactggcactgtccaccccctttctgccccatatcctcccctggatacccccgaaacagccaccggcagtttcctgtttcagggggaaccggaaggcggcgagggggaccagccgctgtcggggtatccttggttccacggaatgctcagccggcttaaagccgcccagttggtgctcaccgggggaactggatctcacggagtatttctagtgcgccagagcgaaacacgccgcggcgagtacgtgctgacatttaactttcaggggaaagcgaagcaccttaggctgagcttgaacgaagaaggtcagtgcagggtccaacacttgtggtttcagagcatctttgatatgctggaacacttcagggtgcacccaattcctcttgaatcgggcggttcctcagacgtcgtcttagtgagttatgtcccatcttcccaacggcagcagggaagggagcaagcgggctcgcacgcaggagtgtgtgaaggggatggctgtcatcccgacgcatcttgcaccttgatgccttttggggcttcagactgtgtaactgatcacctcccgtag

SEQ ID NO: 187052 - DNA, 2271 bp, Artificial Sequence
  derived and/or modified sequence
atgaatggagctccttcgcccgaggatggagcctcaccctcctctcctcccctcccgccaccacccccaccctcctggagggagttctgcgagtcccatgctagggctgcagccctggatttcgcacgtcgcttcagactgtatttggctagccatccacagtacgctgggcctggtgcagaagctgcttttagtcggagatttgccgaattgtttctgcagcatttcgaagctgaggtagccagggcttctggaagtctgagtccaccaatccttgcccctctgagccctggtgcagagatcagcccgcatgatttatctctggagagctgtcgggttgggggacccctcgcggttctgggcccttcccgcagttctgaagacctcgccggacctttaccctcgagcgtgtcttcatcctctacaactagctccaagccaaagctgaaaaaaaggtttagtttaagatcagtggggaggagtgtccgcggatctgtgaggggaatattgcaatggcggggaaccgtggatcctccttcctcagcaggcccattagagacctcctcagggcctccagtcctggggggaaattctaacagcaatagctcaggcggtgctggcacagttggccgaggactagtgtccgatgggacgagtcccggagagcgttggacacacagattcgagcgtttgagactcagcaggggcggaggggcactaaaagacggcgctgggatggtgcagagagaagaactgctcagcttcatgggcgcagaagaagcggcaccggaccccgcaggagttggcagaggcggaggagtggccggtccacctagcggtggtggagggcagccacagtggcagaagtgccgtctgctgttgcggagtgagggggaggggggaggcggttccaggctagagtttttcgtgccacccaaggcctcgcgacctcgcctctccataccctgctcttcgatcactgatgtccgaactaccaccgccctggaaatgccggatagagagaacaccttcgtcgtaaaggtcgaaggaccatctgagtacattatggagacagtggatgctcaacatgtaaaggcctgggtgagtgatatacaggagtgtctttccccgggaccttgtcctgccacgtctcctaggccaatgactctgcccctcgccccagggacaagctttctgaccagggaaaatactgactccctggagttaagctgcctgaatcattcagaatcactgcctagccaggacctgctcctgggaccatccgagtcaaacgatagactgagccagggcgcttacggtggcctgagcgatagaccctctgcctctatatctccctccagtgcctctatagccgctagccatttcgacagtatggaattactgcctccagaattaccacctaggatcccaatagaagaagggcctcctaccggcacagtccatccgctgagtgctccgtatccgcctctcgacactcctgaaacggctactggttcatttctatttcagggcgagcccgagggtggcgaaggggaccagcctttatctggatatccctggttccacgggatgctaagccgcctaaaggctgcgcagttggtgctcactggcggaactggaagtcacggtgtgtttttagtgcgccaaagtgaaacccgccgaggcgagtacgttctgacgtttaactttcagggtaaggccaaacacctgaggctgtccttaaatgaggagggacagtgcagggttcagcatctctggtttcaatccatcttcgacatgcttgagcacttcagggtgcatcccatccccctagagtctgggggttcatctgacgtagttctggtgtcctatgttccaagttcacaacgtcaacaggagcctacaaccagtcacgacccgccacagcctccagaacccccatcttggactgaccccccacagcctggcgctgaggaggcatcgagagccccagaggtcgcagccgcagccgcagcggcagcaaaagaaaggcaggaaaaagagaaagccggtggaggtggagtgcctgaagagttggttcctgtagttgagcttgtgcccgtcgtggaactcgaggaggcaattgccccaggatccgaagctcagggggcagggtcaggaggcgatgctggagtgcctccaatggtgcaactccagcaatcgcctctcggaggagacggcgaagaaggaggtcaccctcgggcaattaacaatcagtactccttcgtttag

SEQ ID NO: 187053 - DNA, 2016 bp, Artificial Sequence
  derived and/or modified sequence
atgaacggcgcaccatctcccgaagacggtgcttcgccttcatcacctccgctcccgccaccaccacccccaagctggagggagttttgcgaatctcacgccagagcagccgctcttgattttgccagaagatttcggttgtacctcgcaagtcacccccaatacgctgggcctggtgccgaagcagcattctcaaggcgatttgcagagctgtttctgcagcattttgaggcagaggtcgcccgagcttcagggagcctgtcccccccaattcttgccccactgtctccgggtgcagagatcagtccccacgatctctcacttgagtcgtgccgggtaggcggacccctcgccgttctgggcccatcgagaagcagtgaggacctggccggtccgcttcccagcagcgtttcctcttcttcaacaacttcgagcaagcccaaactgaaaaagcgtttttccctccgctccgtaggaaggagtgtaagagggagtgtgcgaggtattctgcagtggcgaggcacggtggatccaccgtcatccgcaggaccactggagacatcgagtggcccaccggtgctggggggaaactcaaattctaacagctccggtggggctggaactgtggggagaggacttgtgtccgatggaacctcccccggtgagcgatggacccatcgcttcgaacgattgagattaagcaggggcggaggagcgctcaaggacggggcaggcatggttcaaagggaagagctgctatcttttatgggggcagaggaagccgctcccgatccagcaggggttggccgaggcggaggagtggctggcccaccaagcggtgggggaggtcagccacagtggcagaaatgtcgcctacttctcagaagcgagggtgaggggggtggcggttccagactcgagttctttgtgccgccaaaggctagcaggccacgcctctcgataccctgctcaagcataaccgatgtgcgtactacaacagccctagagatgccagatcgggagaatacgttcgttgtaaaggtggaaggccctagtgagtatattatggagactgtggatgctcagcacgtgaaggcttgggtgtcagacatccaggaatgcctctcacccggaccttgcccagccacttccccgagacctatgacgttgcctctggcacctgggacgtctttcctgacgcgggagaacaccgattccctcgagctcagctgtctgaaccacagtgaatctttacccagccaggatctcctgttaggacctagtgagtccaatgacagactgtctcagggagcatatgggggactttcggacaggcccagtgctagcatatcaccctccagcgcctcaatcgcagcctcacacttcgattctatggagctacttcctccagagctgcccccacgaatacctattgaggaaggaccccctactggcacagtgcatcccctctccgccccttatccccctctcgatacgcccgaaacagctacaggatccttcctgtttcaaggagagcccgagggtggagagggcgatcagccactgagcggttatccctggttccacggcatgctgtctcgactgaaagccgcacagttagtgcttaccgggggtacaggctctcacggggtctttctcgtgagacagagtgagactaggaggggggagtacgttctgacctttaacttccagggtaaagccaaacacctgcgcttgagcctgaatgaagaagggcagtgcagggtgcagcatctttggtttcaatctatattcgacatgttagagcatttccgcgttcatccaattccactggaatctggagggagctctgatgtcgttctggtctcttatgtgccctctagccagcgccagcaggggagagagcaggcaggctcacacgccggagtttgcgaaggagatggatgtcacccagatgcctcttgcacactgatgcccttcggagcctccgactgcgttacggatcatttaccctag

SEQ ID NO: 187054 - DNA, 2016 bp, Artificial Sequence
  derived and/or modified sequence
atgaacggcgcaccttctcctgaggatggcgcatctccgtcctctcctccactgccaccgcctccaccccctagttggagggaattctgcgaaagtcatgccagggccgctgccctggactttgcgaggcgattcagactctacttagcttcacatcctcagtatgccggtccaggcgcagaggccgcattcagtcggcgattcgctgaactattccttcagcatttcgaggcagaggtggcacgtgcgtccggatctttgagcccaccaattcttgcccctctttcccccggtgctgaaattagcccacacgatcttagcttagagtcatgccgggttggcggtcccttggctgtcctggggcctagcagaagcagcgaagatctggcgggtcctctgccctcctccgtgagttcatccagtactacatcttcaaagcccaaattgaagaaaagattctctttacgctcagtgggacgcagtgttcgcggatcggtgagaggcatcctgcagtggcggggaactgttgacccaccctccagtgccggtccactggaaacctcgtctggacccccagtcctagggggaaattccaattctaacagttcaggaggcgcaggcacagtcggacgagggctagtttcagacggcacatcccccggagaaaggtggactcatcggttcgagcgcctccgccttagtaggggaggaggtgctctgaaagacggggcaggtatggttcaaagagaggaactgctcagcttcatgggggcagaggaagctgcaccagatccagccggtgttgggagaggcggtggcgtcgccggtcccccatccggcggtgggggacagccacagtggcagaaatgcaggttgcttctgagatctgagggcgaagggggtggcggaagcaggctggaatttttcgtgccgcctaaagcatctagaccccgactgtccatcccatgcagcagcatcacagatgtacggacaactacggctctggagatgcctgacagagagaacactttcgtggtgaaggtggagggaccttctgaatatataatggaaactgtggacgcccagcacgtcaaggcctgggtctcagatattcaagagtgcttgtctcccggtccgtgccctgccacttccccgaggcctatgacactgcccctggccccagggacaagcttcttaacgcgcgagaataccgacagtctagagctgagctgccttaaccactctgagagcctgccctctcaggacctcctattgggcccaagtgagagtaatgaccgattatctcagggcgcatacggtggcctgagcgaccgaccaagcgccagtattagtccttcaagtgctagcattgctgcttctcactttgatagtatggaactgctccctcctgagctaccaccacgcataccaattgaggagggccctcccactgggaccgtgcacccattatcggccccatatccacccctggataccccagagacagcaaccggcagtttcctgtttcagggtgagcctgaagggggagagggtgaccaacccctgtcaggctatccatggttccatggcatgctttcccgactaaaggcagcccagctggtgctgaccgggggaacaggaagccatggtgtgtttttagtaagacaatccgaaacgcgcagaggggagtatgttctgaccttcaacttccagggaaaggccaaacatcttagactgtctctcaatgaggagggccagtgccgcgtgcaacacctctggtttcagtccatatttgatatgctggagcacttcagggtgcatcctattccactggagagcggcggaagctcagatgttgttcttgtgtcatatgtgccaagttctcagaggcaacagggcagagagcaggcaggcagtcacgcaggcgtgtgtgaaggcgacggctgtcaccccgacgccagctgcacacttatgcctttcggggcaagcgattgcgtcaccgaccacctgccctag

SEQ ID NO: 187055 - DNA, 3095 bp, Artificial Sequence
  derived and/or modified sequence
gggctccgggaggcagctgcggctccgactgctcaggaacctcctcctgggcccggcagagagagaccccgagtcccccggagtccgactcgctacgcgggtcttgcgagatatctggccgcctctgccgcagctggagcagagatggggtttcaccgtgttagccaggatggtcttgatctcctgacctcatgatccgcctgtctcggcctcccaaagtgctgggattacaggcgtgagccactgtgcccggccttgaacattcttaggtgcaactggagaaggcactgaagccctacgagattcacaccgtcttcggtctcctggggtcggcgccgagtgggaggatggcggaactgctgccgcccacccctcgtcttctggctgcctccctctttgtgccccacaggctccccctctccacctcctggggcccatcatgaatggtgccccttccccagaggacggggcctccccctcgtctcccccgctgcccccacccccgccccctagttggcgggagttctgtgagtcccacgcccgggctgcggctctggactttgcccgccgttttcgcctctacctggcctcccacccccaatatgcggggcccggggccgaggctgccttctcccgccgttttgctgagctcttcctgcagcactttgaagccgaggtggcccgggcctctggctccctgtcgccacccatcctggctcccctgagccctggtgcggagatttcgccacatgacctgtcccttgagagctgcagggtgggtgggcccctggctgtgctgggcccttctcgatcatctgaggacctggccggccccctcccttcctcagtctcttcctcctctacaacctcctccaagccgaagctcaagaagcgcttttccctgcgttcagtgggtcgctctgtccgaggctcagtccgtggcatcctgcagtggcgggggaccgttgaccctccctcctccgctgggcccctggagacctcgtcaggccccccagtcttaggtggaaacagcaactccaactcctctggcggggctgggaccgttggtaggggactggtcagtgatggaacgtcccctggggaaagatggactcaccgttttgagaggctgagactcagtcggggagggggcgccttgaaggatggagcagggatggtgcagagggaagagctgctgagtttcatgggggctgaggaggcagcccctgacccagccggagtgggccggggaggaggggtggctgggcctccttcagggggaggagggcagcctcagtggcagaagtgtcgcctgctgcttcgaagtgaaggagaaggaggaggaggaagtcgcctggagttctttgtaccacccaaggcctctcggccccgactcagcatcccctgctcttctatcacagacgtccggacaaccacagccctggagatgcctgaccgggagaacacgtttgtggttaaggtggaaggtccatccgagtatatcatggagacagtggatgcccagcatgtgaaggcctgggtgtctgacatccaagaatgcctgagcccaggaccctgccctgctaccagtccccgccccatgaccctccctctggcccctgggacctcattccttacaagggagaacacagacagcctggagctgtcctgcctgaatcactcggagagtctacccagccaggacctgctgcttggacccagcgagagcaatgaccgcctgtcgcagggggcatatgggggcctctcagaccgcccctcggcatccatctcccccagctctgcctccattgccgcctcccattttgactcgatggaactgcttcccccagagttgcccccccgcatccccattgaagagggacccccaacagggacagttcatcccctctcagccccctaccctcccttggacactccggaaacagccacagggtccttcctgttccagggggagccagagggcggtgagggggaccagcccctctcagggtatccttggttccacgggatgctctctcggctcaaggctgcacagttggtgctgactggcggcactggctcccacggtgtcttcctggtgcgccagagtgagacaaggcggggtgaatacgtcctcaccttcaacttccagggcaaggccaagcacctgcgtttgtcgctgaacgaggagggtcagtgccgggtccagcacctgtggttccagtccattttcgatatgctcgagcacttccgggtgcaccccatccctttggagtcgggaggctccagtgatgttgtccttgtcagctatgtcccatcctcccagcgacagcaggaaccgaccacctcccatgacccaccccagccccctgaacccccttcatggacagatcccccacagcctggggcagaagaggcgtcgagggcgccagaagtggcggcagcagcagccgcagcagccaaagagaggcaagagaaagagaaagcgggcggtggaggggtcccggaagagctggtccccgtggttgagctggtccccgtggttgaattggaagaggccatagccccaggctcagaggcccagggcgctgggtctggtggggacgcgggggtgcccccaatggtgcagctgcagcagtcaccactagggggtgatggagaggaagggggccaccccagggccattaacaaccagtactccttcgtgtgagccaaccccacccgctccaccctttttaaaccccccagccctgctcgtgagattgggctgggtagggacagaggaggccgaaatccctcccccatgcttcctgacccttgttggccaagggcatctttgatggtacaagcagaggctcgggagaggctcccgtcacacactacaggtcccctccccagggcaggggatttgggctccatgagctccttgaggggctcttctggtcagccccaccctgggggccatttccccattaactacccccagcccgaggcagggtgagggggaagggctgtcagttacattaaggtggttgttgttgttgttttaaacaaaatggagaagcataaataaataaaaaggtttatctcggttc

SEQ ID NO: 187056 - DNA, 4865 bp, Artificial Sequence
  derived and/or modified sequence
cgcgacccggccctggcgcccgagaggattcctgggtgggggtgggcgtggagggccgggggctggagaggcactcggccccggagagtgcagcagacagggctggtcccgaggtggatgcggccccggaaaatgggcggctggggggtgtccagggagtagggtcggatcggagtatatggaccaccgggcccggagggtccgagccgagagcggagcctgcaccctccacctcccgcccttcgggaaatatcagaactgagccaggaggcaggtgcaccgggaaaatgtgtctgagtcctgcttggcagaagagaaactgagtcaccagcttaggagtcgcagggtcagcgggcctgaagggggctgggtctgtctgcggtgcggaggattgggtgggcctgtgtgagccgaggtggccgctggctggagattggtttgcacttcttggctgggttcccccgtgctccatgactcctgcatctcctgattgtttctcgttggtttggagttgtccctgcggttggagccatctgagcttgtagggtcgaggcccaggaggaaggggagggttcaccgacttacagcctggctgtaggtttgaacaggagtctgaggtcgctgagggtttggggaggctttcctgagctgctctggccccagtcctggggctgtcaccttccagtattgcgtggcgggaggagcgctaacaagagccaagggttgtaaattccacacccagctctgccactttctagttgtaagaccttgagagggctcctcctttctctaatttctattttagaaaattggaacaataatattcttctcccacatgaagatagtaacaatggcagtcgttcagcggatgcttactttgcgttcagcgctgacataccccattccatgtaattctctcaacatttcgaggggagggatcattagctttgtttaacagatagaaaaacggaggctcagagaggacgtggaatttgttcaagataacatcgctcataaggtggctggactgggtgctcataaggtggtttgagccctggtctgactcaagtccatggccttaaccagaaggctaacctgcctttagggcatactccccagtgggagaagaggaaggtgaaaaatcctagggccccagctctccctgtgatgttttgtttacgtgaggccagcaaagacttgacctgagccaacccagtttctcctctggggcccctgcggcctctggccccagactgaagggataccaaagaagtgggctgtagctatttcacatctccttcacgcagtgcgtgggtgctggactctggggtcagctttcaagacaattactgttttggtccatcatgcatccatcctcattaatgaatcggccccctccaaagagttggaccctaagatgcgtgaggcaggctctctaaggtctagaatcccagctcctctctagccccctgcgagctggggcggtgaggtgctatggctgaggctggcccagccgggccctggggacagggactatgaagtggggaaaacagtagacttggagttctgaaacttttctgagcttcggtttcctcatctgttcgagaggtctttgaaacctctcagggaaaggtaagataaccaagtgggagcctctagaatggctcatgggaagtgtgacatgaatattggaggatccgatgtagagggggggtgatctggaaaagttcccttttttagggggaaggtgctccaaagccctctactgctggatccaaagctaaggaaagtgggggcaaatgtggcaggctcggggcaggttagacgctggggagccagttggctggggcctgcagggtgccaggatctgggagagggaagggaggtgttgggctcccttccccattgctctctgcggagtctgaagtagggtcggacgtctctggctgggggtgggatgcagcctccggtgcgccctcagcagtgaccctcgtgtgtgcctctctcttcctttcgcagctgctgccgcccacccctcgtcttctggctgcctccctctttgtgccccacaggctccccctctccacctcctggggcccatcatgaatggtgccccttccccagaggacggggcctccccctcgtctcccccgctgcccccacccccgccccctagttggcgggagttctgtgagtcccacgcccgggctgcggctctggactttgcccgccgttttcgcctctacctggcctcccacccccaatatgcggggcccggggccgaggctgccttctcccgccgttttgctgagctcttcctgcagcactttgaagccgaggtggcccgggcctctggctccctgtcgccacccatcctggctcccctgagccctggtgcggagatttcgccacatgacctgtcccttgagagctgcagggtgggtgggcccctggctgtgctgggcccttctcgatcatctgaggacctggccggccccctcccttcctcagtctcttcctcctctacaacctcctccaagccgaagctcaagaagcgcttttccctgcgttcagtgggtcgctctgtccgaggctcagtccgtggcatcctgcagtggcgggggaccgttgaccctccctcctccgctgggcccctggagacctcgtcaggccccccagtcttaggtggaaacagcaactccaactcctctggcggggctgggaccgttggtaggggactggtcagtgatggaacgtcccctggggaaagatggactcaccgttttgagaggctgagactcagtcggggagggggcgccttgaaggatggagcagggatggtgcagagggaagagctgctgagtttcatgggggctgaggaggcagcccctgacccagccggagtgggccggggaggaggggtggctgggcctccttcagggggaggagggcagcctcagtggcagaagtgtcgcctgctgcttcgaagtgaaggagaaggaggaggaggaagtcgcctggagttctttgtaccacccaaggcctctcggccccgactcagcatcccctgctcttctatcacagacgtccggacaaccacagccctggagatgcctgaccgggagaacacgtttgtggttaaggtggaaggtccatccgagtatatcatggagacagtggatgcccagcatgtgaaggcctgggtgtctgacatccaagaatgcctgagcccaggaccctgccctgctaccagtccccgccccatgaccctccctctggcccctgggacctcattccttacaagggagaacacagacagcctggagctgtcctgcctgaatcactcggagagtctacccagccaggacctgctgcttggacccagcgagagcaatgaccgcctgtcgcagggggcatatgggggcctctcagaccgcccctcggcatccatctcccccagctctgcctccattgccgcctcccattttgactcgatggaactgcttcccccagagttgcccccccgcatccccattgaagagggacccccaacagggacagttcatcccctctcagccccctaccctcccttggacactccggaaacagccacagggtccttcctgttccagggggagccagagggcggtgagggggaccagcccctctcagggtatccttggttccacgggatgctctctcggctcaaggctgcacagttggtgctgactggcggcactggctcccacggtgtcttcctggtgcgccagagtgagacaaggcggggtgaatacgtcctcaccttcaacttccagggcaaggccaagcacctgcgtttgtcgctgaacgaggagggtcagtgccgggtccagcacctgtggttccagtccattttcgatatgctcgagcacttccgggtgcaccccatccctttggagtcgggaggctccagtgatgttgtccttgtcagctatgtcccatcctcccagcgacagcagggccgggagcaggctgggagccatgcgggggtgtgcgagggagatggatgccaccccgatgcctcctgcaccctcatgcccttcggagcgagtgactgtgtaaccgaccacctcccatgacccaccccagccccctgaacccccttcatggacagatcccccacagcctggggcagaagaggcgtcgagggcgccagaagtggcggcagcagcagccgcagcagccaaagagaggcaagagaaagagaaagcgggcggtggaggggtcccggaagagctggtccccgtggttgagctggtccccgtggttgaattggaagaggccatagccccaggctcagaggcccagggcgctgggtctggtggggacgcgggggtgcccccaatggtgcagctgcagcagtcaccactagggggtgatggagaggaagggggccaccccagggccattaacaaccagtactccttcgtgtgagccaaccccacccgctccaccctttttaaaccccccagccctgctcgtgagattgggctgggtagggacagaggaggccgaaatccctcccccatgcttcctgacccttgttggccaagggcatctttgatggtacaagcagaggctcgggagaggctcccgtcacacactacaggtcccctccccagggcaggggatttgggctccatgagctccttgaggggctcttctggtcagccccaccctgggggccatttccccattaactacccccagcccgaggcagggtgagggggaagggctgtcagttacattaaggtggttgttgttgttgttttaaacaaaatggagaagcataaataaataaaaaggtttatctcggttctatcgtg

SEQ ID NO: 187057 - DNA, 3134 bp, Artificial Sequence
  derived and/or modified sequence
aagtaccttttccctctccgcgacccggccctggcgcccgagaggattcctgggtgggggtgggcgtggagggccgggggctggagaggcactcggccccggagagtgcagcagacagggctggtcccgaggtggatgcggccccggaaaatgggcggctggggggtgtccagggagtagggtcggatcggagtatatggaccaccgggcccggagggtccgagccgagagcggagcctgcaccctccacctcccgcccttcgggaaatatcagaactgagccaggagctgctgccgcccacccctcgtcttctggctgcctccctctttgtgccccacaggctccccctctccacctcctggggcccatcatgaatggtgccccttccccagaggacggggcctccccctcgtctcccccgctgcccccacccccgccccctagttggcgggagttctgtgagtcccacgcccgggctgcggctctggactttgcccgccgttttcgcctctacctggcctcccacccccaatatgcggggcccggggccgaggctgccttctcccgccgttttgctgagctcttcctgcagcactttgaagccgaggtggcccgggcctctggctccctgtcgccacccatcctggctcccctgagccctggtgcggagatttcgccacatgacctgtcccttgagagctgcagggtgggtgggcccctggctgtgctgggcccttctcgatcatctgaggacctggccggccccctcccttcctcagtctcttcctcctctacaacctcctccaagccgaagctcaagaagcgcttttccctgcgttcagtgggtcgctctgtccgaggctcagtccgtggcatcctgcagtggcgggggaccgttgaccctccctcctccgctgggcccctggagacctcgtcaggccccccagtcttaggtggaaacagcaactccaactcctctggcggggctgggaccgttggtaggggactggtcagtgatggaacgtcccctggggaaagatggactcaccgttttgagaggctgagactcagtcggggagggggcgccttgaaggatggagcagggatggtgcagagggaagagctgctgagtttcatgggggctgaggaggcagcccctgacccagccggagtgggccggggaggaggggtggctgggcctccttcagggggaggagggcagcctcagtggcagaagtgtcgcctgctgcttcgaagtgaaggagaaggaggaggaggaagtcgcctggagttctttgtaccacccaaggcctctcggccccgactcagcatcccctgctcttctatcacagacgtccggacaaccacagccctggagatgcctgaccgggagaacacgtttgtggttaaggtggaaggtccatccgagtatatcatggagacagtggatgcccagcatgtgaaggcctgggtgtctgacatccaagaatgcctgagcccaggaccctgccctgctaccagtccccgccccatgaccctccctctggcccctgggacctcattccttacaagggagaacacagacagcctggagctgtcctgcctgaatcactcggagagtctacccagccaggacctgctgcttggacccagcgagagcaatgaccgcctgtcgcagggggcatatgggggcctctcagaccgcccctcggcatccatctcccccagctctgcctccattgccgcctcccattttgactcgatggaactgcttcccccagagttgcccccccgcatccccattgaagagggacccccaacagggacagttcatcccctctcagccccctaccctcccttggacactccggaaacagccacagggtccttcctgttccagggggagccagagggcggtgagggggaccagcccctctcagggtatccttggttccacgggatgctctctcggctcaaggctgcacagttggtgctgactggcggcactggctcccacggtgtcttcctggtgcgccagagtgagacaaggcggggtgaatacgtcctcaccttcaacttccagggcaaggccaagcacctgcgtttgtcgctgaacgaggagggtcagtgccgggtccagcacctgtggttccagtccattttcgatatgctcgagcacttccgggtgcaccccatccctttggagtcgggaggctccagtgatgttgtccttgtcagctatgtcccatcctcccagcgacagcagggccgggagcaggctgggagccatgcgggggtgtgcgagggagatggatgccaccccgatgcctcctgcaccctcatgcccttcggagcgagtgactgtgtaaccgaccacctcccatgacccaccccagccccctgaacccccttcatggacagatcccccacagcctggggcagaagaggcgtcgagggcgccagaagtggcggcagcagcagccgcagcagccaaagagaggcaagagaaagagaaagcgggcggtggaggggtcccggaagagctggtccccgtggttgagctggtccccgtggttgaattggaagaggccatagccccaggctcagaggcccagggcgctgggtctggtggggacgcgggggtgcccccaatggtgcagctgcagcagtcaccactagggggtgatggagaggaagggggccaccccagggccattaacaaccagtactccttcgtgtgagccaaccccacccgctccaccctttttaaaccccccagccctgctcgtgagattgggctgggtagggacagaggaggccgaaatccctcccccatgcttcctgacccttgttggccaagggcatctttgatggtacaagcagaggctcgggagaggctcccgtcacacactacaggtcccctccccagggcaggggatttgggctccatgagctccttgaggggctcttctggtcagccccaccctgggggccatttccccattaactacccccagcccgaggcagggtgagggggaagggctgtcagttacattaaggtggttgttgttgttgttttaaacaaaatggagaagcataaataaataaaaaggtttatctcggttctatcgtg

SEQ ID NO: 187058 - DNA, 1532 bp, Artificial Sequence
  derived and/or modified sequence
cttcagcgacgggaaagggggtcctgacgcctgcgcggaaccgggctgggcgctcgtcgcgtagtgggtgggggcgcagggagcgggagccgccgccgccgccgccgccgccggagctaacctcggggaccgagatgcagacgtccggacaaccacagccctggagatgcctgaccgggagaacacgtttgtggttaaggtggaaggtccatccgagtatatcatggagacagtggatgcccagcatgtgaaggcctgggtgtctgacatccaagaatgcctgagcccaggaccctgccctgctaccagtccccgccccatgaccctccctctggcccctgggacctcattccttacaagggagaacacagacagcctggagctgtcctgcctgaatcactcggagagtctacccagccaggacctgctgcttggacccagcgagagcaatgaccgcctgtcgcagggggcatatgggggcctctcagaccgcccctcggcatccatctcccccagctctgcctccattgccgcctcccattttgactcgatggaactgcttcccccagagttgcccccccgcatccccattgaagagggacccccaacagggacagttcatcccctctcagccccctaccctcccttggacactccggaaacagccacagggtccttcctgttccagggggagccagagggcggtgagggggaccagcccctctcagggtatccttggttccacgggatgctctctcggctcaaggctgcacagttggtgctgactggcggcactggctcccacggtgtcttcctggtgcgccagagtgagacaaggcggggtgaatacgtcctcaccttcaacttccagggcaaggccaagcacctgcgtttgtcgctgaacgaggagggtcagtgccgggtccagcacctgtggttccagtccattttcgatatgctcgagcacttccgggtgcaccccatccctttggagtcgggaggctccagtgatgttgtccttgtcagctatgtcccatcctcccagcgacagcagggccgggagcaggctgggagccatgcgggggtgtgcgagggagatggatgccaccccgatgcctcctgcaccctcatgcccttcggagcgagtgactgtgtaaccgaccacctcccatgacccaccccagccccctgaacccccttcatggacagatcccccacagcctggggcagaagaggcgtcgagggcgccagaagtggcggcagcagcagccgcagcagccaaagagaggcaagagaaagagaaagcgggcggtggaggggtcccggaagagctggtccccgtggttgagctggtccccgtggttgaattggaagaggccatagccccaggctcagaggcccagggcgctgggtctggtggggacgcgggggtgcccccaatggtgcagctgcagcagtcaccactagggggtgatggagaggaagggggccaccccagggccattaacaaccagtactccttcgtgtgagcc

SEQ ID NO: 187059 - DNA, 2271 bp, Artificial Sequence
  derived and/or modified sequence
atgaacggcgcccccagccccgaggacggcgccagccccagcagcccccccctgccccccccccccccccccagctggagagagttctgcgagagccacgccagagccgccgccctggacttcgccagaagattcagactgtacctggccagccacccccagtacgccggccccggcgccgaggccgccttcagcagaagattcgccgagctgttcctgcagcacttcgaggccgaggtggccagagccagcggcagcctgagcccccccatcctggcccccctgagccccggcgccgagatcagcccccacgacctgagcctggagagctgcagagtgggcggccccctggccgtgctgggccccagcagaagcagcgaggacctggccggccccctgcccagcagcgtgagcagcagcagcaccaccagcagcaagcccaagctgaagaagagattcagcctgagaagcgtgggcagaagcgtgagaggcagcgtgagaggcatcctgcagtggagaggcaccgtggacccccccagcagcgccggccccctggagaccagcagcggcccccccgtgctgggcggcaacagcaacagcaacagcagcggcggcgccggcaccgtgggcagaggcctggtgagcgacggcaccagccccggcgagagatggacccacagattcgagagactgagactgagcagaggcggcggcgccctgaaggacggcgccggcatggtgcagagagaggagctgctgagcttcatgggcgccgaggaggccgcccccgaccccgccggcgtgggcagaggcggcggcgtggccggcccccccagcggcggcggcggccagccccagtggcagaagtgcagactgctgctgagaagcgagggcgagggcggcggcggcagcagactggagttcttcgtgccccccaaggccagcagacccagactgagcatcccctgcagcagcatcaccgacgtgagaaccaccaccgccctggagatgcccgacagagagaacaccttcgtggtgaaggtggagggccccagcgagtacatcatggagaccgtggacgcccagcacgtgaaggcctgggtgagcgacatccaggagtgcctgagccccggcccctgccccgccaccagccccagacccatgaccctgcccctggcccccggcaccagcttcctgaccagagagaacaccgacagcctggagctgagctgcctgaaccacagcgagagcctgcccagccaggacctgctgctgggccccagcgagagcaacgacagactgagccagggcgcctacggcggcctgagcgacagacccagcgccagcatcagccccagcagcgccagcatcgccgccagccacttcgacagcatggagctgctgccccccgagctgccccccagaatccccatcgaggagggcccccccaccggcaccgtgcaccccctgagcgccccctacccccccctggacacccccgagaccgccaccggcagcttcctgttccagggcgagcccgagggcggcgagggcgaccagcccctgagcggctacccctggttccacggcatgctgagcagactgaaggccgcccagctggtgctgaccggcggcaccggcagccacggcgtgttcctggtgagacagagcgagaccagaagaggcgagtacgtgctgaccttcaacttccagggcaaggccaagcacctgagactgagcctgaacgaggagggccagtgcagagtgcagcacctgtggttccagagcatcttcgacatgctggagcacttcagagtgcaccccatccccctggagagcggcggcagcagcgacgtggtgctggtgagctacgtgcccagcagccagagacagcaggagcccaccaccagccacgaccccccccagccccccgagccccccagctggaccgaccccccccagcccggcgccgaggaggccagcagagcccccgaggtggccgccgccgccgccgccgccgccaaggagagacaggagaaggagaaggccggcggcggcggcgtgcccgaggagctggtgcccgtggtggagctggtgcccgtggtggagctggaggaggccatcgcccccggcagcgaggcccagggcgccggcagcggcggcgacgccggcgtgccccccatggtgcagctgcagcagagccccctgggcggcgacggcgaggagggcggccaccccagagccatcaacaaccagtacagcttcgtgtag

SEQ ID NO: 187060 - DNA, 2016 bp, Artificial Sequence
  derived and/or modified sequence
atgaacggcgcccccagccccgaggacggcgccagccccagcagcccccccctgccccccccccccccccccagctggagagagttctgcgagagccacgccagagccgccgccctggacttcgccagaagattcagactgtacctggccagccacccccagtacgccggccccggcgccgaggccgccttcagcagaagattcgccgagctgttcctgcagcacttcgaggccgaggtggccagagccagcggcagcctgagcccccccatcctggcccccctgagccccggcgccgagatcagcccccacgacctgagcctggagagctgcagagtgggcggccccctggccgtgctgggccccagcagaagcagcgaggacctggccggccccctgcccagcagcgtgagcagcagcagcaccaccagcagcaagcccaagctgaagaagagattcagcctgagaagcgtgggcagaagcgtgagaggcagcgtgagaggcatcctgcagtggagaggcaccgtggacccccccagcagcgccggccccctggagaccagcagcggcccccccgtgctgggcggcaacagcaacagcaacagcagcggcggcgccggcaccgtgggcagaggcctggtgagcgacggcaccagccccggcgagagatggacccacagattcgagagactgagactgagcagaggcggcggcgccctgaaggacggcgccggcatggtgcagagagaggagctgctgagcttcatgggcgccgaggaggccgcccccgaccccgccggcgtgggcagaggcggcggcgtggccggcccccccagcggcggcggcggccagccccagtggcagaagtgcagactgctgctgagaagcgagggcgagggcggcggcggcagcagactggagttcttcgtgccccccaaggccagcagacccagactgagcatcccctgcagcagcatcaccgacgtgagaaccaccaccgccctggagatgcccgacagagagaacaccttcgtggtgaaggtggagggccccagcgagtacatcatggagaccgtggacgcccagcacgtgaaggcctgggtgagcgacatccaggagtgcctgagccccggcccctgccccgccaccagccccagacccatgaccctgcccctggcccccggcaccagcttcctgaccagagagaacaccgacagcctggagctgagctgcctgaaccacagcgagagcctgcccagccaggacctgctgctgggccccagcgagagcaacgacagactgagccagggcgcctacggcggcctgagcgacagacccagcgccagcatcagccccagcagcgccagcatcgccgccagccacttcgacagcatggagctgctgccccccgagctgccccccagaatccccatcgaggagggcccccccaccggcaccgtgcaccccctgagcgccccctacccccccctggacacccccgagaccgccaccggcagcttcctgttccagggcgagcccgagggcggcgagggcgaccagcccctgagcggctacccctggttccacggcatgctgagcagactgaaggccgcccagctggtgctgaccggcggcaccggcagccacggcgtgttcctggtgagacagagcgagaccagaagaggcgagtacgtgctgaccttcaacttccagggcaaggccaagcacctgagactgagcctgaacgaggagggccagtgcagagtgcagcacctgtggttccagagcatcttcgacatgctggagcacttcagagtgcaccccatccccctggagagcggcggcagcagcgacgtggtgctggtgagctacgtgcccagcagccagagacagcagggcagagagcaggccggcagccacgccggcgtgtgcgagggcgacggctgccaccccgacgccagctgcaccctgatgcccttcggcgccagcgactgcgtgaccgaccacctgccctag

SEQ ID NO: 187061 - protein, 553 aa, Artificial Sequence
  derived and/or modified sequence
MPLPWSLALPLLLSWVAGGFGNAASARHHGLLASARQPGVCHYGTKLACCYGWRRNSKGVCEATCEPGCKFGECVGPNKCRCFPGYTGKTCSQDVNECGMKPRPCQHRCVNTHGSYKCFCLSGHMLMPDATCVNSRTCAMINCQYSCEDTEEGPQCLCPSSGLRLAPNGRDCLDIDECASGKVICPYNRRCVNTFGSYYCKCHIGFELQYISGRYDCIDINECTMDSHTCSHHANCFNTQGSFKCKCKQGYKGNGLRCSAIPENSVKEVLRAPGTIKDRIKKLLAHKNSMKKKAKIKNVTPEPTRTPTPKVNLQPFNYEEIVSRGGNSHGGKKGNEEKMKEGLEDEKREEKALKNDIEERSLRGDVFFPKVNEAGEFGLILVQRKALTSKLEHKDLNISVDCSFNHGICDWKQDREDDFDWNPADRDNAIGFYMAVPALAGHKKDIGRLKLLLPDLQPQSNFCLLFDYRLAGDKVGKLRVFVKNSNNALAWEKTTSEDEKWKTGKIQLYQGTDATKSIIFEAERGKGKTGEIAVDGVLLVSGLCPDSLLSVDD

SEQ ID NO: 187062 - DNA, 1662 bp, Artificial Sequence
  derived and/or modified sequence
atgccacttccatggagcctggcgctgccactgctgctgtcatgggtggccggcggttttggtaacgccgctagcgctaggcaccacgggctactggcatccgcccggcaacccggggtctgccactacggtactaaactcgcttgctgctatggatggcgccggaacagcaaaggagtgtgcgaggctacgtgcgagcccggctgtaagttcggagaatgtgtaggcccaaacaaatgccggtgcttcccagggtatacggggaagacctgctctcaggacgtcaacgagtgcggcatgaagcctaggccttgccaacacaggtgcgtgaacacccatggcagttataaatgtttttgcctgtcaggtcatatgctaatgcccgacgccacttgcgtgaactcccggacctgtgctatgatcaactgccagtatagctgtgaggacacagaggagggtccccagtgtctgtgcccctcgtctggcctcaggctggcccctaacggaagagattgcttggacattgacgagtgcgcatctggcaaggtgatttgcccctacaatcggaggtgtgtcaatactttcggaagctattattgcaagtgccatatcgggtttgagttgcagtacatttcgggtcgttacgactgtattgacattaatgagtgcaccatggactctcatacctgcagccaccatgccaactgttttaatactcaggggtctttcaagtgtaagtgtaaacagggttacaagggcaatgggctgaggtgcagcgcaatccctgagaattccgtcaaggaagtattgcgcgctccaggcaccattaaggacaggatcaaaaaactcctggcccacaaaaattccatgaagaaaaaggcaaagatcaaaaatgtgacaccagagcccacccgaacacccactcccaaggtaaacttacagcctttcaattatgaagagattgtttccaggggaggaaatagtcatggcggaaagaaagggaacgaagagaaaatgaaagaagggctggaggacgaaaagcgggaagagaaagccctcaaaaacgacattgaggagcgtagtctcaggggagatgtctttttccctaaagttaacgaagctggggagtttgggcttattctggttcagcggaaggccctgacttccaaactggagcataaagacctgaacatatccgtggattgctctttcaaccacggaatttgtgattggaagcaggatagggaagatgattttgattggaaccctgcagatcgggacaacgccatagggttctacatggctgtgcctgcgctcgccggccacaaaaaagacatcggccgattgaaacttctgcttcctgatcttcagccccagtccaatttctgtctgctgtttgattatcgcctcgcaggcgacaaagtgggcaagcttagggttttcgtaaaaaactctaacaacgctctcgcttgggagaagaccacatctgaggatgaaaagtggaagacagggaaaatccagctgtatcaggggaccgacgcgactaaaagcattattttcgaagctgagagagggaagggtaaaacaggggagattgcagtggatggagtacttttggttagtggcctttgccccgatagtctgctctctgtcgacgattag

SEQ ID NO: 187063 - DNA, 1662 bp, Artificial Sequence
  derived and/or modified sequence
atgcccctgccctggagcctggccctgcccctgctgctgtcctgggtggccggcggctttggaaatgctgccagcgcccggcaccacggcctgctggccagcgcccggcagcccggggtgtgccactacggcaccaagctggcctgctgctacggctggaggaggaacagcaagggcgtgtgtgaggccacctgtgagcccggctgcaagtttggagaatgtgtgggccccaacaagtgccgctgcttccctggctacacaggcaagacctgcagccaggatgtgaatgaatgtggcatgaagccccggccctgccagcaccgctgtgtgaacacccacggcagctacaagtgcttctgcctgagcggccacatgctgatgccagatgccacctgtgtgaacagcaggacctgtgccatgatcaactgccagtacagctgtgaggacacagaggagggcccccagtgcctgtgccccagcagcggcctgcggctggcccccaacggccgggactgcctggacattgatgaatgtgccagcggcaaggtgatctgcccctacaacagaagatgtgtgaacaccttcggcagctactactgcaagtgccacatcggctttgagctgcagtacatcagcggccgctatgactgcatcgacatcaatgaatgtaccatggacagccacacctgcagccaccacgccaactgcttcaacacccagggcagcttcaagtgcaagtgcaagcagggctacaagggaaatggcctgcgctgcagcgccatcccagaaaattctgtgaaggaggtgctgcgggcccctggcaccatcaaggaccgcatcaagaagctgctggcccacaagaacagcatgaagaagaaggccaagatcaagaatgtgaccccagagcccaccaggacccccacccccaaggtgaacctgcagcccttcaactatgaggagatcgtgtccagaggaggcaacagccatggaggcaagaagggaaatgaggagaagatgaaggagggcctggaggatgagaagcgggaggagaaggccctgaagaatgacatcgaggagaggagcctgcggggagatgtgttcttccccaaggtgaatgaggccggggagtttggcctcatcctggtgcagaggaaggccctgaccagcaagctggagcacaaggacctgaacatctctgtggactgcagcttcaaccacggcatctgtgactggaagcaggaccgggaggatgactttgactggaacccagctgaccgggacaatgccatcggcttctacatggctgtgcctgccctggccggccacaagaaggacatcggccgcctgaagctgctgctgcctgacctgcagccccagagcaacttctgcctgctgtttgactaccgcctggccggggacaaggtgggcaagctgcgggtgtttgtgaagaacagcaacaatgccctggcctgggagaagaccaccagtgaagatgagaagtggaagacaggcaagatccagctgtaccagggcacagatgccaccaagagcatcatctttgaggccgagcggggcaagggcaagacaggagaaattgctgtggatggagtgctgctggtgtctggcctgtgcccagacagcctgctgtctgtggatgactag

SEQ ID NO: 187064 - DNA, 1662 bp, Artificial Sequence
  derived and/or modified sequence
atgcccctgccctggagcctggccctgcccctgctgctgagctgggttgcaggagggtttggtaatgccgcttccgccagacatcacggcttgctggcgtccgccagacagccaggggtgtgtcattatggcacaaaactggcttgctgctatgggtggcgcagaaatagcaagggggtatgcgaggcgacgtgcgagcctggctgtaagtttggcgagtgcgtgggccctaacaagtgtcgctgctttcctggctacacgggtaagacttgcagccaggatgttaatgagtgcgggatgaaaccacgcccatgccagcaccggtgcgtgaatactcacggttcctacaagtgcttttgtctcagcggtcacatgctcatgcccgacgctacatgcgtaaacagtcggacatgtgcaatgatcaactgtcagtattcttgtgaggacaccgaagagggcccacagtgcttgtgtccatcatccgggttgaggctggcacccaatgggagagactgccttgatatcgatgaatgcgcttctggcaaagttatctgcccctacaaccggcgctgcgtgaacacgtttggatcatactactgcaaatgtcacatcggcttcgagctgcagtatataagcgggaggtacgactgtattgacataaacgagtgcaccatggacagccacacttgttcccatcacgcaaactgttttaacacccagggctccttcaagtgcaagtgcaagcaggggtataaaggtaacggtctgcggtgttccgctattcctgaaaacagtgtgaaagaggtccttagagctccaggcaccattaaggataggattaagaagctgttggctcataagaactctatgaaaaaaaaggctaaaattaagaatgtcaccccagaacctacaagaactcccactcccaaagtgaacctgcagccctttaattacgaagagatcgtgtctcgggggggcaacagccatgggggaaaaaaaggaaacgaagaaaaaatgaaagagggcttagaagacgagaaacgtgaagaaaaggctcttaaaaatgacattgaagagcgtagcctccgcggtgatgtgtttttccctaaggtgaacgaggctggcgagttcggcttgattcttgtccagcgcaaggcccttactagcaaattggagcataaggacctgaacatctccgttgactgcagcttcaatcacgggatctgcgattggaaacaagatcgtgaggacgattttgactggaacccggctgatagagataacgcaatcggattttatatggccgtgccggctctcgcaggacataagaaagatataggccgactgaaattactgctcccagatttacaaccacagagcaatttttgtctactgtttgactaccgtcttgccggcgacaaggtcggcaaattgcgagtgtttgtgaaaaactctaacaacgcacttgcgtgggaaaagaccacatccgaagacgagaagtggaagacaggaaagatccagctgtaccagggtaccgatgccactaaatctattattttcgaggccgagcgggggaaaggaaagacaggagagattgccgtggacggggtgctgctcgtgtctggattgtgcccagactcgctactgagtgtcgatgattag

SEQ ID NO: 187065 - DNA, 1662 bp, Artificial Sequence
  derived and/or modified sequence
atgcctctgccatggagtttggctctcccactgttacttagttgggttgccggtggattcggcaatgctgcctctgccagacatcatggcttactagcctcagccaggcagccaggcgtttgccactacggaactaaactggcttgttgttacgggtggaggcgaaactcaaagggtgtttgcgaggccacctgcgagcccggttgcaagtttggggagtgcgtggggcctaataaatgcagatgttttcctgggtataccggcaagacctgcagccaggacgtcaatgaatgcggaatgaagcccagaccatgtcagcaccggtgtgtgaatacccatggatcctacaagtgcttctgcttgagcggacacatgctgatgcccgacgccacttgtgtgaactctcggacctgcgctatgatcaattgccaatattcatgcgaagacactgaagaaggccctcaatgcctgtgtccatcttctgggttgcgactggcacctaatggcagagattgtctggatatcgacgaatgcgctagcggcaaagttatttgcccctataatcgcaggtgtgtgaacacgtttggctcatactattgcaagtgtcacatcggtttcgaactgcagtatatatccggaaggtacgactgcatagatattaacgagtgtacaatggattctcacacatgtagtcaccacgcaaactgtttcaacacccaggggtcgtttaaatgcaaatgcaagcaaggctataaagggaacggcttgagatgtagcgccatcccagaaaattcggtaaaagaagtattgagggcccctgggactatcaaggacagaataaagaaactgcttgctcataagaattccatgaagaaaaaagcgaaaattaaaaatgtcacccctgagcctaccagaacccccacccctaaagtgaacctgcagccatttaattacgaagaaatcgtgtcacggggtggaaacagtcatggcggaaaaaagggaaacgaagagaagatgaaagaggggctggaagacgaaaaaagagaggaaaaagcccttaagaatgacattgaggagcggtctctccgtggggacgtttttttccctaaggtgaatgaagctggtgagttcgggttaatactagttcagcggaaggcactgaccagtaagctggagcacaaagacttgaacatctctgtcgactgcagcttcaaccacggtatatgtgactggaaacaggacagagaagatgacttcgattggaacccagccgacagggataatgccattgggttctacatggcagttcccgctttggccggacacaagaaagacatcggaagactaaaactcttgttgcccgacctgcagccgcagtccaacttctgtctcttatttgactaccgtttagcgggagacaaagtaggtaaactgagggtgttcgtaaaaaactccaataacgcattggcatgggaaaagaccactagtgaggacgagaagtggaagacggggaagatccagctgtaccagggcacagacgcgaccaagagtattatttttgaggctgagcgaggtaaggggaaaacgggcgaaattgctgtggacggagtgttgctcgtaagcggactatgccccgactccctgttgtctgtggacgattag

SEQ ID NO: 187066 - DNA, 1662 bp, Artificial Sequence
  derived and/or modified sequence
atgcccctgccctggagcctggccctgcccctgctgctgagctgggtggccggcggcttcggcaacgccgccagcgccagacaccacggcctgctggccagcgccagacagcccggcgtgtgccactacggcaccaagctggcctgctgctacggctggagaagaaacagcaagggcgtgtgcgaggccacctgcgagcccggctgcaagttcggcgagtgcgtgggccccaacaagtgcagatgcttccccggctacaccggcaagacctgcagccaggacgtgaacgagtgcggcatgaagcccagaccctgccagcacagatgcgtgaacacccacggcagctacaagtgcttctgcctgagcggccacatgctgatgcccgacgccacctgcgtgaacagcagaacctgcgccatgatcaactgccagtacagctgcgaggacaccgaggagggcccccagtgcctgtgccccagcagcggcctgagactggcccccaacggcagagactgcctggacatcgacgagtgcgccagcggcaaggtgatctgcccctacaacagaagatgcgtgaacaccttcggcagctactactgcaagtgccacatcggcttcgagctgcagtacatcagcggcagatacgactgcatcgacatcaacgagtgcaccatggacagccacacctgcagccaccacgccaactgcttcaacacccagggcagcttcaagtgcaagtgcaagcagggctacaagggcaacggcctgagatgcagcgccatccccgagaacagcgtgaaggaggtgctgagagcccccggcaccatcaaggacagaatcaagaagctgctggcccacaagaacagcatgaagaagaaggccaagatcaagaacgtgacccccgagcccaccagaacccccacccccaaggtgaacctgcagcccttcaactacgaggagatcgtgagcagaggcggcaacagccacggcggcaagaagggcaacgaggagaagatgaaggagggcctggaggacgagaagagagaggagaaggccctgaagaacgacatcgaggagagaagcctgagaggcgacgtgttcttccccaaggtgaacgaggccggcgagttcggcctgatcctggtgcagagaaaggccctgaccagcaagctggagcacaaggacctgaacatcagcgtggactgcagcttcaaccacggcatctgcgactggaagcaggacagagaggacgacttcgactggaaccccgccgacagagacaacgccatcggcttctacatggccgtgcccgccctggccggccacaagaaggacatcggcagactgaagctgctgctgcccgacctgcagccccagagcaacttctgcctgctgttcgactacagactggccggcgacaaggtgggcaagctgagagtgttcgtgaagaacagcaacaacgccctggcctgggagaagaccaccagcgaggacgagaagtggaagaccggcaagatccagctgtaccagggcaccgacgccaccaagagcatcatcttcgaggccgagagaggcaagggcaagaccggcgagatcgccgtggacggcgtgctgctggtgagcggcctgtgccccgacagcctgctgagcgtggacgactag

SEQ ID NO: 187067 - DNA, 2398 bp, Artificial Sequence
  derived and/or modified sequence
accccgtccagcttcatccgcagaggagcctcggccaggcttgccagggcgcccccagcccctccccaggccgcgagcgcccctgccgcggtgcctggcctcccctcccagactgcagggacagcacccggtaactgcgagtggagcggaggacccgagcggctgaggagagaggaggcggcggcttagctgctacggggtccggccggcgccctcccgaggggggctcaggaggaggaaggaggacccgtgcgagaatgcctctgccctggagccttgcgctcccgctgctgctctcctgggtggcaggtggtttcgggaacgcggccagtgcaaggcatcacgggttgttagcatcggcacgtcagcctggggtctgtcactatggaactaaactggcctgctgctacggctggagaagaaacagcaagggagtctgtgaagctacatgcgaacctggatgtaagtttggtgagtgcgtgggaccaaacaaatgcagatgctttccaggatacaccgggaaaacctgcagtcaagatgtgaatgagtgtggaatgaaaccccggccatgccaacacagatgtgtgaatacacacggaagctacaagtgcttttgcctcagtggccacatgctcatgccagatgctacgtgtgtgaactctaggacatgtgccatgataaactgtcagtacagctgtgaagacacagaagaagggccacagtgcctgtgtccatcctcaggactccgcctggccccaaatggaagagactgtctagatattgatgaatgtgcctctggtaaagtcatctgtccctacaatcgaagatgtgtgaacacatttggaagctactactgcaaatgtcacattggtttcgaactgcaatatatcagtggacgatatgactgtatagatataaatgaatgtactatggatagccatacgtgcagccaccatgccaattgcttcaatacccaagggtccttcaagtgtaaatgcaagcagggatataaaggcaatggacttcggtgttctgctatccctgaaaattctgtgaaggaagtcctcagagcacctggtaccatcaaagacagaatcaagaagttgcttgctcacaaaaacagcatgaaaaagaaggcaaaaattaaaaatgttaccccagaacccaccaggactcctacccctaaggtgaacttgcagcccttcaactatgaagagatagtttccagaggcgggaactctcatggaggtaaaaaagggaatgaagagaaaatgaaagaggggcttgaggatgagaaaagagaagagaaagccctgaagaatgacatagaggagcgaagcctgcgaggagatgtgtttttccctaaggtgaatgaagcaggtgaattcggcctgattctggtccaaaggaaagcgctaacttccaaactggaacataaagatttaaatatctcggttgactgcagcttcaatcatgggatctgtgactggaaacaggatagagaagatgattttgactggaatcctgctgatcgagataatgctattggcttctatatggcagttccggccttggcaggtcacaagaaagacattggccgattgaaacttctcctacctgacctgcaaccccaaagcaacttctgtttgctctttgattaccggctggccggagacaaagtcgggaaacttcgagtgtttgtgaaaaacagtaacaatgccctggcatgggagaagaccacgagtgaggatgaaaagtggaagacagggaaaattcagttgtatcaaggaactgatgctaccaaaagcatcatttttgaagcagaacgtggcaagggcaaaaccggcgaaatcgcagtggatggcgtcttgcttgtttcaggcttatgtccagatagccttttatctgtggatgactgaatgttactatctttatatttgactttgtatgtcagttccctggtttttttgatattgcatcataggacctctggcattttagaattactagctgaaaaattgtaatgtaccaacagaaatattattgtaagatgcctttcttgtataagatatgccaatatttgctttaaatatcatatcactgtatcttctcagtcatttctgaatctttccacattatattataaaatatggaaatgtcagtttatctcccctcctcagtatatctgatttgtataagtaagttgatgagcttctctctacaacatttctagaaaatagaaaaaaaagcacagagaaatgtttaactgtttgactcttatgatacttcttggaaactatgacatcaaagatagacttttgcctaagtggcttagctgggtctttcatagccaaacttgtatatttaaattctttgtaataataatatccaaatcatc

SEQ ID NO: 187068 - protein, 275 aa, Artificial Sequence
  derived and/or modified sequence
MATELEYESVLCVKPDVSVYRIPPRASNRGYRASDWKLDQPDWTGRLRITSKGKTAYIKLEDKVSGELFAQAPVEQYPGIAVETVTDSSRYFVIRIQDGTGRSAFIGIGFTDRGDAFDFNVSLQDHFKWVKQESEISKESQEMDARPKLDLGFKEGQTIKLCIGNITNKKGGASKPRTARGGGLSLLPPPPGGKVTIPPPSSSVAISNHVTPPPIPKSNHGGSDADILLDLDSPAPVTTPAPTPVSVSNDLWGDFSTASSSVPNQAPQPSNWVQF

SEQ ID NO: 187069 - protein, 133 aa, Artificial Sequence [sequence omitted]

SEQ ID NO: 187070 - DNA, 828 bp, Artificial Sequence
  derived and/or modified sequence
atggcgactgaactagaatacgaaagcgtgttatgcgtcaagcccgacgtgagcgtgtatcgtattcctccacgggcgagcaaccgcggatatcgggcctccgattggaagttagaccagcctgattggacaggaaggctgaggatcacaagcaagggaaaaacagcctatataaaactggaagataaagtgagtggagagttattcgcccaggcgccggtagagcagtaccccggcatcgctgtggaaactgtgaccgattcctctcgttacttcgttattcgcatccaggatggcaccggtaggagcgccttcattggaattgggttcaccgataggggcgatgcctttgactttaatgtgtcactgcaagatcacttcaaatgggtgaagcaggaaagtgagattagtaaagaaagccaggagatggatgccaggcccaagctcgaccttggctttaaagaagggcagacaattaaactgtgcatcggtaacatcaccaataagaaaggcggcgccagcaaaccccgtacggcccgcggaggaggtttgtctttactcccacccccaccgggaggcaaagttaccatccctccccctagttcgtccgttgcgatttccaaccacgtcacaccaccccccatccccaaatcaaatcatggggggagtgacgccgatattctgctggatctggactcccctgcgcctgtgactacccccgctccaacaccagtgtcggtttccaatgacctatggggagacttctctactgcctcttccagtgtgcctaatcaggccccgcagccctccaattgggttcaattctag

SEQ ID NO: 187071 - DNA, 402 bp, Artificial Sequence
  derived and/or modified sequence
atggatgcacgcccaaaacttgatctcggctttaaagaaggacagaccattaagctgtgtatcggcaacattactaacaaaaaagggggggcaagcaagcccaggacggccaggggggggggactctcacttttgcctccgccacccggcggtaaagtcacaatcccacctccttcatcttctgtggcaatcagcaaccatgtgaccccaccacctatccccaaatcgaaccatggggggagcgatgctgatatcctgttggacctggacagccccgcacccgtgaccaccccggccccaacaccagtttccgtttccaatgatctgtggggagatttcagtactgcttccagcagcgtgcctaatcaggcaccccagccatcgaactgggtacagttctag

SEQ ID NO: 187072 - DNA, 828 bp, Artificial Sequence
  derived and/or modified sequence
atggccactgagttggaatacgaatcggtgctctgcgtgaaaccggacgtatctgtgtacaggatcccaccccgggccagtaacagaggataccgggccagtgattggaagctagaccagcccgactggacaggacgcctgcgcattacatccaaaggaaagacggcatacatcaaactcgaggacaaagttagtggggagctgttcgcacaagccccggtggaacagtacccaggtatcgccgtggaaaccgtgacagactctagtcgttactttgttattagaatccaagacggaaccggtagaagtgccttcatcggcatcgggttcacggacaggggcgatgccttcgacttcaacgtatccctgcaagaccactttaaatgggtcaaacaagagtcggaaatttccaaagaatctcaagagatggacgcccgaccgaagctggatctcggctttaaagaagggcaaactattaagctgtgcattggaaatatcactaacaagaaaggaggcgcatctaagcccagaacagcacgtggcggcggcctgtcacttctgccacccccgcccggcgggaaagtgaccatcccacccccatcaagttcggtcgccattagtaatcacgtgactcccccaccaatcccgaagtctaaccatgggggaagcgatgccgacatcttattggacctcgattctccagctccagtgacgactcccgcccctacaccagtgtctgtatccaacgatctttggggagacttcagtactgcttcttcctccgtgcccaatcaggcaccacagccaagtaattgggtgcaattctag

SEQ ID NO: 187073 - DNA, 828 bp, Artificial Sequence
  derived and/or modified sequence
atggccacagagctggagtatgaatctgtgctgtgtgtgaagccagatgtgtctgtgtaccgcatccccccccgggccagcaacagaggctaccgggccagtgactggaagctggaccagcctgactggacaggccgcctgcgcatcaccagcaagggcaagacagcctacatcaagctggaggacaaggtgtctggagagctgtttgcccaggcccctgtggagcagtacccaggcattgctgtggagaccgtgacagacagcagccgctacttcgtcatccgcatccaggacggcaccggccgcagcgccttcatcggcatcggcttcacagacagaggagatgcctttgacttcaacgtgtccctgcaggaccacttcaagtgggtgaagcaggagagcgagatcagcaaggagagccaggagatggatgcccggcccaagctggacctgggcttcaaggagggccagaccatcaagctgtgcatcggcaacatcaccaacaagaagggcggggccagcaagcccaggacagcccggggcggcggcctgagcctgctgcccccacctcctgggggcaaggtgaccatccccccacccagcagctctgtggccatcagcaaccacgtgaccccaccacccatccccaagagcaaccacggcggcagtgatgctgacatcctgctggacctggacagccctgcccctgtgaccaccccagcccccacccctgtgtctgtgtccaatgacctgtggggagacttcagcacagccagcagctctgtgcccaaccaggccccccagcccagcaactgggtgcagttctag

SEQ ID NO: 187074 - DNA, 402 bp, Artificial Sequence
  derived and/or modified sequence
atggatgcccggcccaagctggacctgggcttcaaggagggccagaccatcaagctgtgcatcggcaacatcaccaacaagaagggcggggccagcaagcccaggacagcccggggcggcggcctgagcctgctgcccccacctcctgggggcaaggtgaccatccccccacccagcagctctgtggccatcagcaaccacgtgaccccaccacccatccccaagagcaaccacggcggcagtgatgctgacatcctgctggacctggacagccctgcccctgtgaccaccccagcccccacccctgtgtctgtgtccaatgacctgtggggagacttcagcacagccagcagctctgtgcccaaccaggccccccagcccagcaactgggtgcagttctag

SEQ ID NO: 187075 - DNA, 828 bp, Artificial Sequence
  derived and/or modified sequence
atggccaccgagctggagtacgagagcgtgctgtgcgtgaagcccgacgtgagcgtgtacagaattccaccccgtgcctccaatcgaggctacagagcgtcagattggaagctggatcaaccggattggaccgggcggctgcgaattacctccaagggcaaaacagcctacatcaagctcgaggataaggttagtggtgaactgttcgcacaagcccccgtcgagcagtaccccggtatcgctgtcgaaaccgttacagacagctcccgctacttcgtgataaggatccaggatgggactggccgcagcgcattcatcggcatcggcttcactgaccgcggggatgcattcgacttcaatgtgagcttgcaagatcactttaaatgggtgaaacaggaaagcgagatctctaaagaaagtcaggaaatggatgctagaccaaagcttgacctcggatttaaggagggccagacgatcaagctatgtatagggaatattactaacaagaaaggcggcgcatctaagcctaggaccgccaggggtggcggtctgtctcttctcccccctccaccaggtggcaaggtgactatacctcccccatctagctcagttgcaatctcaaatcatgttaccccccctcccatcccaaaatcgaatcacggcggaagcgacgctgacattcttctggacctggactcaccagctccagtaactacaccagctcccaccccagtgtcagtcagtaatgacttgtggggcgatttttcaacagcctcaagctctgtccctaaccaagctccacagccatccaactgggttcagttttag

SEQ ID NO: 187076 - DNA, 402 bp, Artificial Sequence
  derived and/or modified sequence
atggacgcccggcccaagctggacctgggcttcaaggagggccagacgattaaattgtgcataggaaacataacgaataagaaaggcggcgccagtaagccacgtactgcaaggggcggtggattatccctactgccccctccacccggtggtaaggtcacaattccccccccatcttcctccgtggctatcagtaaccacgtgacacctcctcctattcccaagtctaatcacggaggcagcgatgccgacatacttctggacctggactccccagcacccgtgacaaccccagcacctactcctgtcagcgtttccaatgacctttggggagacttctctaccgctagcagctccgtcccaaaccaagccccacagccttctaattgggtccagttctag

SEQ ID NO: 187077 - DNA, 828 bp, Artificial Sequence
  derived and/or modified sequence
atggccaccgagctggagtacgagagcgtgctgtgcgtgaagcccgacgtctctgtgtacaggatacctcctcgggccagcaataggggttacagggcaagcgattggaaacttgatcagccggattggaccgggcgcctacgcataacttcaaagggtaagacagcatatatcaagctggaggataaggtgagtggtgagttattcgctcaggcacccgtggaacaatatcctgggatcgcggttgaaactgtgaccgatagttcccggtactttgtcattcgcatccaagacggtaccgggagatcagcattcataggaatcggttttaccgacaggggtgatgctttcgattttaatgtgtccttgcaagatcatttcaagtgggtgaagcaggagagtgagatatctaaggagtcccaagagatggatgctagacctaagctggaccttggttttaaggaaggacagactataaagttgtgtattggcaacattaccaataaaaagggcggagccagtaaaccccggacagctcgcgggggagggctttccctcctgcctcccccacctgggggcaaggtaaccataccgcccccctcatcttcagtagccataagcaaccacgtgacccctccaccaatcccaaaaagcaaccatggagggtctgatgctgacattttattagatctggatagccccgcccctgtgactacccctgcccccaccccggtatctgtttccaacgacttatggggcgacttttctactgcatcctcttctgtccccaaccaggcgccacagccttcaaactgggtgcagttctag

SEQ ID NO: 187078 - DNA, 2587 bp, Artificial Sequence
  derived and/or modified sequence
gcgctttgcatctccgcctcccgtgctccgcctccggtcttacgtttcgcccccggcagcgccgacagcggacccaagatggcgaccgagttggagtacgagtctgtgctgtgtgtgaagccagacgtcagcgtctaccggattccgccccgggcctccaaccgcggttacagggcctctgactggaaattagaccagcctgattggactggtcgcctccgaatcacttcaaaagggaagactgcctatatcaaactcgaggataaagtttcaggggagctctttgctcaggcaccagtagaacaatatcctggtattgctgtggagacggtgacagattctagccgctactttgtaatccggatccaggatggtactgggcgcagtgctttcattggcattggcttcacagatcggggagatgccttcgactttaatgtctccttgcaggatcacttcaagtgggtaaagcaggaatctgagatttccaaggaatctcaagaaatggatgctcgtcctaagttggatctgggcttcaaggaaggacaaaccatcaagttgtgtatcgggaacattacaaacaagaaaggaggtgcttctaagcccaggactgcaaggggtgggggtctgagcttactcccacccccgccaggaggcaaagtcactattcccccaccatcctcctcagttgccatcagcaatcatgtcaccccaccacccattccgaaatctaaccatggaggcagtgatgcagatatccttttagatttggattctcctgctcctgtcacgacaccagcaccaactccagtttctgtaagcaatgacttgtggggagacttcagcactgcctccagctctgttccaaaccaggcaccacagccatccaactgggtccagttctgaatggcattggcaggacattaaggacagacttgaggaataaaaatgaccttgagggcaccaatctgtgagggaagttaggaacccatttcctccccagaaccagaatgactggacaatctttttcatagcttctccatcacattcaagctggtttatgtcactcccctgtgttgttacttgtacagccaagaaagtatctgttatctcctgcgtagtaccaaggtaggggactagtggatcttatcatagttttggctgactatgcagggcttaaaaggccagcgtctgtttgagggggaatgacctctaacatctgtaaaatttgtctcatcttttaatttctttaacttatttcaaaatcatctcatgacccttgtgtgcctctttgtgaagccctatttagcaatttcaggggagtcaaaaaccttgcaacttccttctccactaacccaggactaaaaatggacaggctgacctcagtgtttacaaattcagaattttgataggggtagatatggagaaagacctatttcctgggtctctgctgtgtagtctccttcaggcttattgtgctcagtgaacatccagtgctgggtgcagctccatcaccctcttgtgtgtttacatgtctctttctatgataagagggttgtgttggtggcacctccactactcttttctgtttgttgagtttgaattgtgttaacatctttgatcagtgggtgtatctgtaatgaaggaggttcaagaggctgtgctttccaagtgatagtctataggagtgtttaatttcttgcagctccatctggttgctgcatttgaagcatggcattaatttgtatttgccctgttctttgacctaaagttgaagggtttagagtttttaacctgatctgtagagcagagaggttgaaagcacttaactcttgtttagtatcctcattgccttgctgcctgggtatctggcccctttccataaacatttcttttcagttcatgtagttctttaatagaaagctgctattatgtatattgtcatttgtgaaggaagttggagagtcacagctttactgtgacaggttttgcccaaggctttgatacctgtcacccagggtatcttaaaagcaagttgttctcccactactttcctttccctctgccctgccattcctattacaatgctgtgaaaaaagttctgcttcttaggtgaatgggtactttctattttgtttctaaacgagcaattttgaggatgaaatgggaagatatcattgcttcctttttgcacctattgggtatgtacactctggccgaagggagtccttatgtttagtttcaaaatatattactttcctggattctcttcttcactttttctgactttgggtccattttcttttcattgcctccttttccaggcagctctattcttgcagagccatagcaggacatgttaaaattccaatagaaaacactaaaaggaaagtctgtggaatcactagtgactaaatactgggaacctattttctcaatcttcctccatgttgtgttctttgtattcttgagatgataatatattatgtatttgaattcctgaaaaatggaaaatgtttaagatatatgtatataaagtgtatgctgtattggtgcaataatggtaattaaaaatatgaaaaaagtg

SEQ ID NO: 187079 - DNA, 1015 bp, Artificial Sequence
  derived and/or modified sequence
aagatggcgaccgagttggagtacgagtctgtgctgtgtgtgaagccagacgtcagcgtctaccggattccgccccgggcctccaaccgcggttacagggcctctgactggaaattagaccagcctgattggactggtcgcctccgaatcacttcaaaagggaagactgcctatatcaaactcgaggataaagtttcaggggagctctttgctcaggcaccagtagaacaatatcctggtattgctgtggagacggtgacagattctagccgctactttgtaatccggatccaggatggtactggtgggtaaagcaggaatctgagatttccaaggaatctcaagaaatggatgctcgtcctaagttggatctgggcttcaaggaaggacaaaccatcaagttgtgtatcgggaacattacaaacaagaaaggaggtgcttctaagcccaggactgcaaggggtgggggtctgagcttactcccacccccgccaggaggcaaagtcactattcccccaccatcctcctcagttgccatcagcaatcatgtcaccccaccacccattccgaaatctaaccatggaggcagtgatgcagatatccttttagatttggattctcctgctcctgtcacgacaccagcaccaactccagtttctgtaagcaatgacttgtggggagacttcagcactgcctccagctctgttccaaaccaggcaccacagccatccaactgggtccagttctgaatggcattggcaggacattaaggacagacttgaggaataaaaatgaccttgagggcaccaatctgtgagggaagttaggaacccatttcctccccagaaccagaatgactggacaatctttttcatagcttctccatcacattcaagctggtttatgtcactcccctgtgttgttacttgtacagccaagaaagtatctgttatctcctgcgtagtaccaaggtaggggactagtggatcttatcatagttttggctgactatgca

SEQ ID NO: 187080 - DNA, 2545 bp, Artificial Sequence
  derived and/or modified sequence
aaaaaaaaaaaaaaaaaaaaaaaaaaaaaaaaaaaaaaaaaaaaaaaaaaaaagatggcgaccgagttggagtacgagtctgtgctgtgtgtgaagccagacgtcagcgtctaccggattccgccccgggcctccaaccgcggttacagggcctctgactggaaattagaccagcctgattggactggtcgcctccgaatcacttcaaaagggaagactgcctatatcaaactcgaggataaagtttcaggggagctctttgctcaggcaccagtagaacaatatcctggtattgctgtggagacggtgacagattctagccgctactttgtaatccggatccaggatggtactgggcgcagtgctttcattggcattggcttcacagatcggggagatgccttcgactttaatgtctccttgcaggatcacttcaagtgggtaaagcaggaatctgagatttccaaggaatctcaagaaatggatgctcgtcctaagttggatctgggcttcaaggaaggacaaaccatcaagttgtgtatcgggaacattacaaacaagaaaggaggtgcttctaagcccaggactgcaaggggtgggggtctgagcttactcccacccccgccaggaggcaaagtcactattcccccaccatcctcctcagttgccatcagcaatcatgtcaccccaccacccattccgaaatctaaccatggaggcagtgatgcagatatccttttagatttggattctcctgctcctgtcacgacaccagcaccaactccagtttctgtaagcaatgacttgtggggagacttcagcactgcctccagctctgttccaaaccaggcaccacagccatccaactgggtccagttctgaatggcattggcaggacattaaggacagacttgaggaataaaaatgaccttgagggcaccaatctgtgagggaagttaggaacccatttcctccccagaaccagaatgactggacaatctttttcatagcttctccatcacattcaagctggtttatgtcactcccctgtgttgttacttgtacagccaagaaagtatctgttatctcctgcgtagtaccaaggtaggggactagtggatcttatcatagttttggctgactatgcagggcttaaaaggccagcgtctgtttgagggggaatgacctctaacatctgtaaaatttgtctcatcttttaatttctttaacttatttcaaaatcatctcatgacccttgtgtgcctctttgtgaagccctatttagcaatttcaggggagtcaaaaaccttgcaacttccttctccactaacccaggactaaaaatggacaggctgacctcagtgtttacaaattcagaattttgataggggtagatatggagaaagacctatttcctgggtctctgctgtgtagtctccttcaggcttattgtgctcagtgaacatccagtgctgggtgcagctccatcaccctcttgtgtgtttacatgtctctttctatgataagagggttgtgttggtggcacctccactactcttttctgtttgttgagtttgaattgtgttaacatctttgatcagtgggtgtatctgtaatgaaggaggttcaagaggctgtgctttccaagtgatagtctataggagtgtttaatttcttgcagctccatctggttgctgcatttgaagcatggcattaatttgtatttgccctgttctttgacctaaagttgaagggtttagagtttttaacctgatctgtagagcagagaggttgaaagcacttaactcttgtttagtatcctcattgccttgctgcctgggtatctggcccctttccataaacatttcttttcagttcatgtagttctttaatagaaagctgctattatgtatattgtcatttgtgaaggaagttggagagtcacagctttactgtgacaggttttgcccaaggctttgatacctgtcacccagggtatcttaaaagcaagttgttctcccactactttcctttccctctgccctgccattcctattacaatgctgtgaaaaaagttctgcttcttaggtgaatgggtactttctattttgtttctaaacgagcaattttgaggatgaaatgggaagatatcattgcttcctttttgcacctattgggtatgtacactctggccgaagggagtccttatgtttagtttcaaaatatattactttcctggattctcttcttcactttttctgactttgggtccattttcttttcattgcctccttttccaggcagctctattcttgcagagccatagcaggacatgttaaaattccaatagaaaacactaaaaggaaagtctgtggaatcactagtgactaaatactgggaacctattttctcaatcttcctccatgttgtgttctttgtattcttgagatgataatatattatgtatttgaattcctgaaaaatggaaaatgtttaagatatatgtatataaagtgtatgctgtattggtgcaataatggtaatt

SEQ ID NO: 187081 - DNA, 828 bp, Artificial Sequence
  derived and/or modified sequence
atggctactgaactcgagtacgaatcagttttgtgcgtcaaaccagacgtgagtgtgtacagaattccaccaagggcaagcaatcggggttacagagccagtgactggaaactggatcagccagactggacagggaggcttcggataacctctaagggtaaaacagcctatatcaagttggaggacaaagtctcaggcgagttgtttgcccaggctcctgttgagcagtaccccggaatagccgtagaaacagtcactgatagtagtcggtacttcgtaattaggatccaggacggcactgggagatctgcattcattgggatcgggtttaccgaccggggtgatgcctttgattttaacgtgtctctgcaggatcatttcaagtgggttaaacaggaatctgaaatctccaaagagtctcaagagatggacgctaggcctaagctcgacctcggatttaaggaggggcagactataaagctgtgtatagggaatatcacaaacaaaaaaggcggtgccagcaagccgagaactgcgagaggcggtggacttagtctactccctcctccacccggaggaaaggttactatcccgccaccctcttccagtgtggcaataagtaatcacgtaacaccgcctcccatcccaaagtccaatcacggaggaagcgacgccgacatcttgctcgatctagatagtcctgccccagtgaccacacccgctccaacacctgtgtccgtcagtaatgacttgtggggcgacttttctactgcctcgtcatctgtgcccaaccaggccccacagccatctaattgggtacagttctag

SEQ ID NO: 187082 - DNA, 402 bp, Artificial Sequence
  derived and/or modified sequence
atggacgcacggccaaagctggatctgggtttcaaagagggacagactattaagctctgcatcgggaatataaccaataagaaaggaggcgctagcaagccccgtactgcgagaggcggaggactatccctcctgccccctccacccggaggaaaagtcaccatccctccacccagctcttccgtggccatttctaaccatgtgaccccgcctcccatccccaagtcaaaccacgggggatccgacgctgatatcctgctggacttagacagccccgctccagtgactactccggcaccaacaccggtttccgtctctaatgacctgtggggcgatttctcaactgcatcctcaagtgttccgaaccaggcgccacagcccagcaattgggttcagttctag

SEQ ID NO: 187083 - DNA, 828 bp, Artificial Sequence
  derived and/or modified sequence
atggcaaccgagctggagtacgagagtgtcctttgtgtcaaaccggacgttagcgtatacaggatccctcccagagcatctaaccgaggctacagagcatcagattggaagcttgatcaacctgactggacaggccgtctacgcattactagcaaagggaagaccgcgtacatcaagctggaagataaagtgagcggcgaactcttcgcccaggcccctgtggagcagtatcctggtattgccgtggagaccgttactgatagctctcgctatttcgtcattcggattcaggatggcacaggcaggtctgcatttataggaatcggcttcactgacaggggagatgcgttcgactttaatgtatccttacaggaccactttaaatgggtcaagcaggaaagtgagattagtaaagagtcccaagagatggacgccagacctaagctggacttgggattcaaagaagggcagacaataaagctgtgtattggaaacatcacgaacaagaaagggggagcctctaagccgagaaccgcacgtgggggtggtctttcccttctcccacccccacccggtgggaaagtgaccattcctccccctagctcctcagtggcgatcagtaaccatgtcacaccacctcctatcccgaagtcaaatcatggcggaagtgatgccgatatcctccttgatttagattcgccagcgcctgttacgacaccagcccctacacccgtctctgtgagcaacgacctttggggcgacttcagcactgcctcatcctcagttcctaatcaggcacctcagccctccaattgggtacagttctag

SEQ ID NO: 187084 - DNA, 828 bp, Artificial Sequence
  derived and/or modified sequence
atggccaccgagctggagtacgagagcgtgctgtgcgtgaagcccgacgtgagcgtgtacagaatcccccccagagccagcaacagaggctacagagccagcgactggaagctggaccagcccgactggaccggcagactgagaatcaccagcaagggcaagaccgcctacatcaagctggaggacaaggtgagcggcgagctgttcgcccaggcccccgtggagcagtaccccggcatcgccgtggagaccgtgaccgacagcagcagatacttcgtgatcagaatccaggacggcaccggcagaagcgccttcatcggcatcggcttcaccgacagaggcgacgccttcgacttcaacgtgagcctgcaggaccacttcaagtgggtgaagcaggagagcgagatcagcaaggagagccaggagatggacgccagacccaagctggacctgggcttcaaggagggccagaccatcaagctgtgcatcggcaacatcaccaacaagaagggcggcgccagcaagcccagaaccgccagaggcggcggcctgagcctgctgccccccccccccggcggcaaggtgaccatccccccccccagcagcagcgtggccatcagcaaccacgtgacccccccccccatccccaagagcaaccacggcggcagcgacgccgacatcctgctggacctggacagccccgcccccgtgaccacccccgcccccacccccgtgagcgtgagcaacgacctgtggggcgacttcagcaccgccagcagcagcgtgcccaaccaggccccccagcccagcaactgggtgcagttctag

SEQ ID NO: 187085 - DNA, 402 bp, Artificial Sequence
  derived and/or modified sequence
atggacgccagacccaagctggacctgggcttcaaggagggccagaccatcaagctgtgcatcggcaacatcaccaacaagaagggcggcgccagcaagcccagaaccgccagaggcggcggcctgagcctgctgccccccccccccggcggcaaggtgaccatccccccccccagcagcagcgtggccatcagcaaccacgtgacccccccccccatccccaagagcaaccacggcggcagcgacgccgacatcctgctggacctggacagccccgcccccgtgaccacccccgcccccacccccgtgagcgtgagcaacgacctgtggggcgacttcagcaccgccagcagcagcgtgcccaaccaggccccccagcccagcaactgggtgcagttctag

SEQ ID NO: 187086 - protein, 4265 aa, Artificial Sequence
  derived and/or modified sequence
MEQPNSKGYSLGRTPQGPECSSAPAVQVGTHRGLEYNPGKILPGSDYGLGNPPALDPKLPHLPLPPAPPTLSDLGQPRKSPLTGTDKKYPLMKQRGFYSDILSPGTLDQLGEVCRGPRMSQNLLRQADLDKFTPRVGSFEVPEDFQERMEQQCIGSTTRLLAQTDFPLQAYEPKMQVPFQVLPGQHPRKIEIERRKQQYLSLDIEQLLFSQGIDSNKLMPRHLDHQHPQTIEQGHDPIFPIYLPLKVFDNEDFDCRTPREWINMGLEPGSLDRKPVPGKALLPTDDFLGHEDPKSQKLKYKWCEVGVLDYDEEKKLYLVHKTDEKGLVRDEMGRPILNAGVTTEGRPPLQVCQYWVPRIQLLFCAEDPCMFAQRVVQANALRKNTEALLLYNLYVDCMPSDGQHVISEQSLSKIKQWALSTPRMRKGPSVLEHLSSLAREVSLDYERSMNKINFDHVVSSKPETFSYVTLPKKEEEQVPERGLVSVPKYHFWEQKEDFTFVSLLTRPEVITALSKVRAECNKVTAMSLFHSSLSKYSHLEEFEQIQSQTFSQVQMFLKDSWISSLKVAMRSSLRDMSKGWYNLYETNWEVYLMSKLRKLMELVKYMLQDTLRFLVQDSLASFSQFISDTCCSVLNCTDDMVWGDDLINSPYRPRKNPLFIMDLVLDSSGVHYSTPLEQFEASLLNLFDKGILATHAVPQLEKLVMEDIFISGDPLLESVGLHEPLVEELRATIASAVSKAMIPLQAYAKEYRKYLELNNNDIASFLKTYQTQGLLAQEVREVVLTHLREKEILDSSLPSSIIIGPFYINTDNVKQSLSKKRKALATSVLDILAKNLHKEVDSICEEFRSISRKIYEKPNSIEELAELREWMKGIPERLVGLEERIVKVMDDYQVMDEFLYNLSSDDFNDKWIASNWPSKILGQIELVQQQHVEDEEKFRKIQIMDQNNFQEKLEGLQLVVAGFSIHVEISRAHEIANEVRRVKKQLKDCQQLAMLYNNRERIFSLPITNYDKLSRMVKEFQPYLDLWTTASDWLRWSESWMNDPLSAIDAEQLEKNVVEAFKTMHKCVKQFKDMPACQEVALDIRARIEEFKPYIPLIQGLRNPGMRIRHWETLSNQININVRPKANLTFARCLEMNLQDHIESISKVAEVAGKEYAIEQALDKMEKEWSTILFNVLPYKATDTYILKSPDEASQLLDDHIVMTQNMSFSPYKKPFEQRINSWENKLKLTQEVLEEWLNCQRSWLYLEPIFSSEDINQQLPVESKRYQTMERIWKKIMKNAYENREVINVCSDLRMLDSLRDCNKILDLVQKGLSEYLETKRSAFPRFYFLSDDELLEILSQTKDPTAVQPHLRKCFENIARLLFQEDLEITHMYSAEGEEVQLCFSIYPSSNVEDWLREVERSMKASVHDIIEKAIRAYPTMPRTQWVLNWPGQVTIAGCQTYWTMEVAEALEAGNLRSQLFPQLCQQLSDLVALVRGKLSRMQRAVLSALIVIEVHAKDVVSKLIQENVVSVNDFQWISQLRYYWTNNDLYIRAVNAEFIYGYEYLGNSGRLVITPLTDRCYLTLTGALHLKFGGAPAGPAGTGKTETTKDLGKALAIQTVVFNCSDQLDFMAMGKFFKGLASAGAWACFDEFNRIDIEVLSVVAQQITTIQKAQQQRVERFMFEGVEIPLVPSCAVFITMNPGYAGRTELPDNLKALFRPVAMMVPDYAMITEISLYSFGFNEASVLAKKITTTFKLSSEQLSSQDHYDFGMRAVKTVISAAGNLKRENPSMNEELICLRAIRDVNVPKFLQEDLKLFSGIVSDLFPTIKEEDTDYGILDEAIREACRNSNLKDVEGFLTKCIQLYETTVVRHGLMLVGPTGSGKSTCYRVLAAAMTSLKGQPSISGGMYEAVNYYVLNPKSITMGQLYGEFDLLTHEWTDGIFSSFIRAGAITSDTNKKWYMFDGPVDAIWIENMNTVLDDNKKLCLSSGEIIKLTEAMTMMFEVQDLAVASPATVSRCGMVYLEPSILGLMPFIECWLRKLPPLLKPYEEHFKALFVSFLEESISFVRSSVKEVIASTNCNLTMSLLKLLDCFFKPFLPREGLKKIPSEKLSRIVELIEPWFIFSLIWSVGATGDSSGRTSFSHWLRLKMENEQLTLLFPEEGLVFDYRLEDAGISGTNDSEDEEEEYKQVAWVKWMDSSAPFTMVPDTNYCNIIVPTMDTVQMSHLLDMLLTNKKPVLCIGPTGTGKTLTISDKLLKNLALDYISHFLTFSARTSANQTQDFIDSKLDKRRKGVFGPPLGRNFIFFIDDLNMPALETYGAQPPIELLRQWMDHGGWYDRKIIGAFKNLVDINFVCAMGPPGGGRNTVTPRLMRHFNYLSFAEMDEVSKKRIFSTILGNWLDGLLGEKSYRERVPGAPHIAHFTEPLVEATIMVYATITSQLLPTPAKSHYTFNLRDLSKVFQGMLMADPAKVEDQVQLLRLWYHENCRVFRDRLVNEEDRSWFDQLLKRCMEQWEVTFNKVCPFQPILYGDFMSPGSDVKSYELITSESKMMQVIEEYIEDYNQINTAKLKLVLFMDAMSHICRISRTLRQALGNALLLGVGGSGRSSLTRLASHMAEYECFQIELSKNYGMSEWRDDVKKVLLKAGLQNLPITFLFSDTQIKNESFLEDINNVLNSGDIPNLYTADEQDQIVSTMRPYIQEQGLQPTKANLMAAYTGRVRSNIHMVLCMSPIGEVFRARLRQFPSLVNCCTIDWFNEWPAEALKSVATVFLNEIPELESSQEEIQGLIQVCVYIHQSVSKKCIEYLAELTRHNYVTPKSYLELLHIFSILIGQKKLELKTAKNRMKSGLDKLLRTSEDVAKMQEDLESMHPLLEEAAKDTMLTMEQIKVDTAIAEETRNSVQTEEIKANEKAKKAQAIADDAQKDLDEALPALDAALASLRNLNKNDVTEVRAMQRPPPGVKLVIEAVCIMKGIKPKKVPGEKPGTKVDDYWEPGKGLLQDPGHFLESLFKFDKDNIGDVVIKAIQPYIDNEEFQPATIAKVSKACTSICQWVRAMHKYHFVAKAVEPKRQALLEAQDDLGVTQRILDEAKQRLREVEDGIATMQAKYRECITKKEELELKCEQCEQRLGRAGKLINGLSDEKVRWQETVENLQYMLNNISGDVLVAAGFVAYLGPFTGQYRTVLYDSWVKQLRSHNVPHTSEPTLIGTLGNPVKIRSWQIAGLPNDTLSVENGVINQFSQRWTHFIDPQSQANKWIKNMEKDNGLDVFKLSDRDFLRSMENAIRFGKPCLLENVGEELDPALEPVLLKQTYKQQGNTVLKLGDTVIPYHEDFRMYITTKLPNPHYTPEISTKLTLINFTLSPSGLEDQLLGQVVAEERPDLEEAKNQLIISNAKMRQELKDIEDQILYRLSSSEGNPVDDMELIKVLEASKMKAAEIQAKVRIAEQTEKDIDLTRMEYIPVAIRTQILFFCVSDLANVDPMYQYSLEWFLNIFLSGIANSERADNLKKRISNINRYLTYSLYSNVCRSLFEKHKLMFAFLLCVRIMMNEGKINQSEWRYLLSGGSISIMTENPAPDWLSDRAWRDILALSNLPTFSSFSSDFVKHLSEFRVIFDSLEPHREPLPGIWDQYLDQFQKLLVLRCLRGDKVTNAMQDFVATNLEPRFIEPQTANLSVVFKDSNSTTPLIFVLSPGTDPAADLYKFAEEMKFSKKLSAISLGQGQGPRAEAMMRSSIERGKWVFFQNCHLAPSWMPALERLIEHINPDKVHRDFRLWLTSLPSNKFPVSILQNGSKMTIEPPRGVRANLLKSYSSLGEDFLNSCHKVMEFKSLLLSLCLFHGNALERHKFGPLGFNIPYEFTDGDLRICISQLKMFLDEYDDIPYKVLKYTAGEINYGGRVTDDWDRRCIMNILEDFYNPDVLSPEHSYSASGIYHQIPPTYDLHGYLSYIKSLPLNDMPEIFGLHDNANITFAQNETFALLGTIIQLQPKSSSAGSQGREEIVEDVTQNILLKVPEPINLQWVMAKYPVLYEESMNTVLVQEVIRYNRLLQVITQTLQDLLKALKGLVVMSSQLELMAASLYNNTVPELWSAKAYPSLKPLSSWVMDLLQRLDFLQAWIQDGIPAVFWISGFFFPQAFLTGTLQNFARKFVISIDTISFDFKVMFEAPSELTQRPQVGCYIHGLFLEGARWDPEAFQLAESQPKELYTEMAVIWLLPTPNRKAQDQDFYLCPIYKTLTRAGTLSTTGHSTNYVIAVEIPTHQPQRHWIKRGVALICALDY

SEQ ID NO: 187087 - DNA, 4087 bp, Artificial Sequence
  derived and/or modified sequence
tatgcaaaagattacagttaatatctgattattagacctgatgataacattttcatataatgataaatatttttctctatcacttagagatggagatataattggatgatatgcaatgacaataacaaggtgctaaaggtgcacacttgtggatattagaaagttaggagatgttagtattatgacatggccagtaaaagattttaattatagtgatcctgttaatgacaatgatatattatatttaagaataccacaaaataagttaattactacacctgtaaaagcttttatgattactcaaaatatttgggtaataccagaaagattttcatcagatactaatccaagtttaagtaaaccgcccagacctacttcaaagtatcaaagttattatgatcctagttatttatctactgatgaacaaaaagatacatttttaaaagggattataaaattatttaaaagaattaatgaaagagatataggaaaaaaattaataaattatttagtagttggttcaccttttatgggagattcaagtacgcctgaagatacatttgattttacacgtcatactactaatattgcagttgaaaagtttgaaaatggtagttggaaagtaacaaatattataacaccaagtgtattgatatttggaccacttcctaatatattagactatacagcatcccttacattgcaaggacaacaatcaaatccatcatttgaagggtttggaacattatctatactaaaagtagcacctgaatttttgttaacatttagtgatgtaacatctaatcaaagttcagctgtattaggcaaatctatattttgtatggatccagtaatagctttaatgcatgagttaacacattctttgcatcaattatatggaataaatataccatctgataaaaggattcgtccacaagttagcgagggatttttctctcaagatggacccaacgtacaatttgaggaattatatacatttggaggattagatgttgaaataatacctcaaattgaaagatcacaattaagagaaaaagcattaggtcactataaagatatagcgaaaagacttaataatattaataaaactattccttctagttggattagtaatatagataaatataaaaaaatattttctgaaaagtataattttgataaagataatacaggaaattttgttgtaaatattgataaattcaatagcttatattcagacttgactaatgttatgtcagaagttgtttattcttcgcaatataatgttaaaaacaggactcattatttttcaaggcattatctacctgtatttgcaaatatattagatgataatatttatactataagagatggttttaatttaacaaataaaggttttaatatagaaaattcgggtcagaatatagaaaggaatcctgcactacaaaagcttagttcagaaagtgtagtagatttatttacaaaagtatgtttaagattaacaaaaaatagtagagatgattcaacatgtattaaagttaaaaataatagattaccttatgtagctgataaagatagcatttcacaagaaatatttgaaaataaaattattacagatgagactaatgtacaaaattattcagataatttttcattagatgaatctattttagatgggcaagttcctattaatcctgaaatagtagatccactattacccaatgttaatatggaacctttaaatcttccaggtgaagaaatagtattttatgatgatattactaaatatgttgattatttaaattcttattattatttggaatctcaaaaattaagtaataatgttgaaaatattactcttacaacttcagttgaagaagcattaggttatagcaataagatatacacatttttacctagcttagctgaaaaagtgaataaaggtgttcaagcaggtttattcttaaattgggcgaatgaagtagttgaggattttactacaaatattatgaagaaagatacattggataaaatatcagatgtatcagtaataattccatatataggacctgccttaaatataggaaattcagcattaaggggaaattttaagcaagcatttgcaacagctggtgtagcttttttattagagggatttccagagtttactatacctgcactcggtgtatttaccttttatagttctattcaagaaagagagaaaattattaaaactatagaaaattgtttggaacaaagagttaagagatggaaagattcatatcaatggatggtatcaaattggttgtcaagaattactactcaatttaatcatataaattatcaaatgtatgattctttaagttatcaggcagatgcaatcaaagctaaaatagatttagaatataaaaaatactcaggaagtgataaagaaaatataaaaagtcaagttgaaaatttaaaaaatagtttagatgtaaaaatttcggaagcaatgaataatataaataaatttatacgagaatgttctgtaacatacttatttaaaaatatgctccctaaagtaattgacgaattaaataagtttgatttaagaactaaaacagaattaattaatcttatagatagtcataatattattctagttggtgaagtagatagattaaaagcaaaagtaaatgagagttttgaaaatacaatgccttttaatattttttcatatactaataattctttattaaaagatataattaatgaatatttcaatagtattaatgattcaaaaattttgagcttacaaaacaaaaaaaatgctttagtggatacatcaggatataatgcagaagtgagggtaggagataatgttcaacttaatacgatatatacaaatgactttaaattaagtagttcaggagataaaattatagtaaatttaaataataatattttatatagcgctatttatgagaactctagtgttagtttttggattaagatatctaaagatttaactaattctcataatgaatatacaataattaacagtatagaacaaaattctgggtggaaattatgtattaggaatggcaatatagaatggattttacaagatgttaatagaaagtataaaagtttaatttttgattatagtgaatcattaagtcatacaggatatacaaataaatggttttttgttactataactaataatataatggggtatatgaaactttatataaatggagaattaaagcagagtcaaaaaattgaagatttagatgaggttaagttagataaaaccatagtatttggaatagatgagaatatagatgagaatcagatgctttggattagagattttaatattttttctaaagaattaagtaatgaagatattaatattgtatatgagggacaaatattaagaaatgttattaaagattattggggaaatcctttgaagtttgatacagaatattatattattaatgataattatatagataggtatattgcacctgaaagtaatgtacttgtacttgttcggtatccagatagatctaaattatatactggaaatcctattactattaaatcagtatctgataagaatccttatagtagaattttaaatggagataatataattcttcatatgttatataatagtaggaaatatatgataataagagatactgatacaatatatgcaacacaaggaggagagtgttcacaaaattgtgtatatgcattaaaattacagagtaatttaggtaattatggtataggtatatttagtataaaaaatattgtatctaaaaataaatattgtagtcaaattttctctagttttagggaaaatacaatgcttctagcagatatatataaaccttggagattttcttttaaaaatgcatacacgccagttgcagtaactaattatgaaacaaaactattatcaacttcatctttttggaaatttatttctagggatccaggatgggtagagtaatacaataaaaatttaatataaactattaaattatattacaagttttagaaatttatcgtataaaatgttgaattc

SEQ ID NO: 187088 - DNA, 2676 bp, Artificial Sequence
  derived and/or modified sequence
gaaaaagataacggattggacgtcttcaagctgtccgatagggacttcctgcgctccatggagaacgcaattagatttggaaagccatgcctactggagaatgtaggagaagaactggaccccgcccttgagcccgttctcctgaagcagacttataagcagcagggtaacacagtcctgaagttaggagacactgtgatcccttaccatgaggacttcagaatgtacatcaccaccaagttacctaatccccactacacacctgagatttccacaaaactcacattgatcaacttcaccctgtctccctccggactcgaggaccagctgctgggccaagtggtcgccgaagagcggccagatctcgaggaggccaaaaatcagctcataataagcaatgctaaaatgagacaggagctgaaggatatcgaggaccagatcctctaccgcctgtctagtagtgaaggaaatccagtggatgatatggaactgattaaggtgctcgaagcgtctaagatgaaggccgcagaaattcaggcaaaggtgcggattgcagagcagactgaaaaagacatcgatctcacgcggatggagtacatccccgttgctatcagaacacagatcctcttcttctgcgtctctgatctagcaaatgtcgatcctatgtatcaatattcgcttgagtggttcctgaatattttcctgtccggcatcgcaaactccgagcgagccgacaacctgaagaagcggatctccaatataaatagatacctgacttactccctttacagtaatgtctgtcgaagtctctttgagaaacataaactgatgtttgcgttcctcctctgtgttcggattatgatgaacgaaggcaagattaatcagtctgaatggcggtatctgttgagcggcggcagcatttctataatgacagagaacccagctcccgattggctctcagatagggcctggagggatatcctggccctgtccaatctgcctaccttctcctcatttagctccgattttgtgaaacatctgtctgagtttagagtgatctttgactccctagagccgcatagggagcccctgcctggaatctgggatcagtacctcgatcagtttcagaaactgttggtcttgaggtgtctgaggggagacaaagttactaatgccatgcaggacttcgtcgcgaccaacctggagccacgcttcatagaaccccagactgccaacttgagtgtggttttcaaagactcgaactccaccacacctctaatctttgtgctgtcccctggaaccgatcccgcagccgacctctacaaatttgctgaggagatgaagttttctaagaagctcagcgctatcagcctgggccaggggcagggccctcgggctgaagctatgatgagaagttccatagaacggggcaaatgggtcttctttcagaactgccatctggcccctagctggatgcccgcccttgagaggcttattgaacacatcaatcccgacaaggtgcacagagactttcggctctggctgacctctctgccatctaacaagttccctgtatctatcctccagaacgggtccaaaatgactatcgagcccccaaggggtgtgagggccaatttgctgaagagctacagctccctgggagaagacttcctgaactcttgccacaaagttatggaattcaaatcgctcctgctcagtttgtgtttgttccacggaaacgcgctggagagacacaaattcgggcctctgggttttaatatcccctacgaattcactgacggcgacctgcgtatctgtatctcccagctgaaaatgttcctggatgaatatgacgacattccgtataaagtgcttaagtatactgccggagagatcaactacggcggcagagttactgacgattgggaccggcgatgcatcatgaatatactggaagatttttataatcctgacgtgctttcacctgagcactcatattccgccagtgggatctatcaccagataccaccaacctacgacctacacggctacctcagttacatcaaatcacttcccctgaacgatatgccagaaatattcggtcttcatgacaatgcgaatattacattcgcccagaacgaaactttcgctctgctgggcactattattcaactgcagccgaagagttcgtccgccggctcccaggggagggaggagatcgtggaggacgtcacgcagaatatacttctcaaggttcctgaacccataaacctgcagtgggtaatggcgaaataccccgtcttatacgaggagtctatgaacaccgtcctcgtccaagaagtgatccggtataatcggctcctgcaagtgattacacagactcttcaagacctccttaaagccctaaaggggctggtcgttatgtcttctcaactggagctgatggctgccagcttgtataataacaccgtgccagagttatggagcgctaaagcctatccctccttaaagcccttgagctcctgggtgatggatctgctccagagactcgattttctgcaagcgtggattcaggatggcattcctgccgtattttggattagcggtttcttttttccccaggcctttaatcgacatagcgccgagttctgtccgcaaatctgccatctgcattag

SEQ ID NO: 187089 - DNA, 12798 bp, Artificial Sequence
  derived and/or modified sequence
atggaacagcctaacagcaaaggttattctctgggcagaactccacagggccccgaatgttcctcagcccctgccgtccaggtgggcactcatcgcgggctggagtacaacccaggcaagattctgcccggaagtgactatggcttgggaaatcctcctgctcttgatccaaaactccctcacttgccactgcctcccgccccccctacattgtcagatctaggccagccgcgcaagagtcctctgactggaactgacaaaaaatatcctctcatgaaacagcgaggtttctattccgatattctttctcccggcaccctggatcagttaggagaggtctgtcgtggcccacgcatgagtcagaatctgcttcgtcaagccgacctggataaatttacccccagagtggggagcttcgaagtcccagaagatttccaggagagaatggaacagcagtgcattggctcaactactcgcttactcgcccagactgactttccactccaagcctacgagccgaaaatgcaagtcccatttcaggtccttccaggccagcaccctagaaagattgagattgaacgtcgcaagcagcagtacctaagcctggatatcgagcagctcctcttcagccagggtatagatagtaataaattaatgcccagacacctggatcatcagcatccccagaccatcgaacagggtcacgatccaattttcccaatctacctgccactgaaagtgtttgataacgaagacttcgattgtcggacacccagagaatggataaatatggggctggaaccaggaagtctggataggaagccagtgccgggcaaagccctcctccctacggatgactttctgggccacgaagaccctaagtctcagaagctcaagtataagtggtgtgaggtgggtgtgctggactatgatgaagaaaagaagctctatttagtgcataaaaccgatgaaaagggtctcgttcgagacgagatgggccgacccatcctgaacgccggtgtgaccacagaggggcggcccccactgcaagtctgccagtactgggttccccgcatccagctgttattctgtgctgaggacccgtgcatgttcgcccagagagtggtccaggccaatgctctgaggaaaaatactgaggccctcctgttatataacctgtacgtggattgtatgccctccgacggtcagcacgtgatttcagagcagtccctttctaagatcaagcagtgggctctctctaccccccgcatgagaaagggacctagcgtcttggagcatctttcctcgctcgcaagggaggtctccttggattacgaaagaagtatgaataaaatcaactttgaccacgttgtaagctccaaacctgaaacatttagctacgtcacgcttccaaaaaaggaggaagagcaggtgcctgagcgaggcttggtgtccgtgcccaagtaccatttttgggaacagaaagaggattttacttttgtcagtctactcacgcggcctgaagtcatcaccgctctgtctaaagtgagggctgaatgcaataaggttacagccatgagtttgtttcatagcagcctctccaagtacagtcaccttgaggagttcgagcagatacagagccaaactttcagtcaagtccaaatgttcctgaaagattcgtggataagctcgctaaaagtcgccatgcgatctagcctcagagatatgtccaaagggtggtataacctgtacgaaaccaactgggaagtatacctgatgtccaaattacgcaaactgatggagttagtgaaatacatgttgcaggatacattacggtttctggtgcaggactccctggcctccttctcacagttcatatccgacacttgctgctctgtgctgaactgtactgacgacatggtgtggggtgacgatttaattaacagcccctaccggcccaggaagaatcccctgttcattatggacctcgtgctcgattcttccggagttcactactccacaccactcgagcagttcgaggccagcctcctgaatctttttgataagggcattctggcgacccacgccgtcccccagctggagaagctggtcatggaagacatattcattagcggagaccccctcctggaaagtgttggattacatgagcccttggttgaagagctgcgcgccacaatcgcctctgccgtgtctaaggcgatgatcccccttcaggcgtatgccaaggaatacaggaagtatctagagttgaacaataatgatatcgcatctttcttgaaaacctaccaaacgcagggccttcttgcccaagaggttcgggaggttgtgctcacccaccttcgggagaaggaaatactggatagcagtctgccaagttctatcatcatcggtcctttctatatcaacactgacaacgttaaacagtcccttagcaaaaagagaaaggctttggccacctcagtgttagacatcctcgccaagaacttgcataaagaagtagatagcatctgtgaggaatttaggtctattagtagaaagatttacgaaaagcctaacagcatagaggagttggcggagctgcgagaatggatgaagggtatacccgaaaggctggtagggctggaggaacgcatagtaaaggttatggacgattatcaggtgatggatgaatttctgtacaatctgagctctgatgactttaatgataagtggatcgcatcgaactggcccagcaagattctaggacagatcgaactcgtgcagcagcagcatgtggaagatgaggaaaagtttcgcaagatccagattatggatcaaaacaattttcaagagaaactggagggtcttcagctggtggtagccggcttttctattcatgtagagatttccagggcacatgaaatcgcgaacgaagtgcgtcgagtcaaaaaacagcttaaggactgtcagcagctggccatgctgtacaacaatagagaacggattttctctctccctattactaattatgacaagctgtcccgtatggtgaaggagttccagccttacctcgatctttggacaacggcaagtgactggctgcgctggtccgaaagctggatgaatgacccattaagcgccattgacgcagagcagctcgaaaaaaatgttgtggaggcttttaaaaccatgcataaatgtgtcaagcagtttaaggatatgccggcctgccaagaagtggctctggatatacgcgcccggattgaggaatttaagccttacatacctcttattcaggggctcaggaatcctggcatgcgtattcggcactgggaaactctcagcaatcaaatcaatatcaacgtgcgtccaaaggccaacctgactttcgcccggtgccttgagatgaacctgcaggatcacatagaatccatttcaaaggttgctgaagtggccggcaaggagtatgctatcgagcaagctcttgataaaatggaaaaagaatggagtaccattctcttcaatgtgctgccatacaaagccacagatacatacatcttaaagtcacccgacgaggccagccagttactggacgaccacattgtcatgactcagaacatgtctttcagcccttataagaaaccattcgagcaaaggattaacagctgggagaataaactgaagttaactcaggaagttttggaggaatggctgaactgtcagcgttcctggctgtacctggagcccattttttcatctgaagacattaatcagcagctgccagtggagtccaaaagatatcaaaccatggagaggatctggaagaaaatcatgaaaaatgcctatgagaatcgcgaggtgataaacgtgtgcagcgacctcagaatgcttgatagtctcagagattgtaacaaaatacttgaccttgtgcagaaaggactgtcagagtacctcgaaaccaaaaggtcagcctttccgaggttctattttctctctgatgacgagctcttagagatattaagtcagaccaaggaccctaccgcagtacaaccacacctgagaaagtgctttgagaatatagctaggcttctatttcaagaggacctcgagattacgcacatgtactccgccgagggcgaggaggtgcaactgtgtttcagcatctatccgagcagtaacgtggaggattggctgcgcgaagttgagagatccatgaaggcctccgttcatgatattatcgaaaaagcgatccgagcctaccctactatgccccggacacagtgggttctaaactggcccggacaggtcactattgcgggctgtcaaacgtattggacgatggaagttgctgaggcacttgaggccggcaaccttcgatcacagctctttccccaactctgccagcagctgagtgacctggtcgcccttgtacgcggtaaactgagtcgcatgcagcgggcggtgctgagtgctctaatcgtgattgaggtccacgccaaggacgttgtcagtaagctgatccaggaaaacgtcgtcagcgtgaacgattttcagtggatatctcagttaaggtactattggacaaataatgatttatatattagggcagtcaatgccgagtttatctatggatatgaatatctgggaaactcgggtcgattggtcattacacctctgacagacaggtgttatctgactcttactggcgcactccatttgaagttcgggggcgcaccagcaggccccgccggcacagggaaaacagagacaaccaaagacctggggaaggcactggccatccagacagtcgtgttcaattgtagcgaccagctcgacttcatggccatgggcaaattcttcaaaggactagccagcgctggagcttgggcgtgtttcgacgagtttaaccgaattgacatagaagtccttagcgtagtggctcagcagattaccactatacagaaagcacaacaacaaagggtggagcgcttcatgtttgagggagtcgagattccattagtgccaagctgcgcagtattcataactatgaatcccggctacgcaggcaggacggaactgcccgataatctgaaggctttattcagaccagtagccatgatggtccccgattacgcaatgatcacagagatcagtttgtactcattcggttttaatgaggcaagtgtgctggccaagaagattaccaccacttttaagttgagcagtgagcaattgtcatctcaagaccactacgatttcggaatgagagctgtcaaaacagttatctccgccgcaggaaacctcaagagagagaacccatccatgaacgaggagctaatctgcctcagggcgattcgcgacgttaacgttcccaaatttctgcaggaagacctgaagctgtttagtgggattgtatcagacttatttccgactatcaaagaggaagatacggattacggcatcctggacgaagctatccgcgaggcttgtcgcaacagcaacctcaaggacgttgaagggttccttaccaagtgtatccagctgtatgaaacgactgtcgtgcgccatggcctaatgttagtcggaccaacaggcagtggcaagtctacatgctacagagtcctagcggcagccatgacctccctcaagggccaaccttccatctcaggcggaatgtatgaggcggttaattattacgttctgaatcccaagagcatcacaatgggtcagctgtatggcgagtttgatctgttaacgcatgagtggaccgacgggatcttttcttcctttattcgcgcaggcgcaataaccagtgacacaaataaaaagtggtatatgtttgatggacctgtggacgcgatatggattgagaatatgaatacagtcttggatgacaataaaaaactgtgcctctcatctggagaaattatcaaactcaccgaagctatgacaatgatgttcgaagtgcaagacttagccgttgcaagcccagccacagtctctcgatgcggaatggtgtacctcgaacccagtattctgggcctaatgccttttatcgaatgttggctgcgtaaactgccgcctttgttgaagccatacgaagagcacttcaaggcgctatttgtttcctttttagaggagagtatatcctttgtccggtcgtctgttaaagaggtgatcgcctctactaactgcaatctgacaatgtcattactaaaattgctggattgtttttttaaaccgttccttcctcgtgaaggactcaagaaaattcccagcgagaagttaagccgaatcgttgaacttatcgaaccatggttcatcttcagcctcatctggagcgtgggagcaacaggtgactctagtggcaggacatcgtttagccattggctgagattaaagatggagaacgagcagctgacactcttattccccgaagagggcctcgttttcgactaccgtctcgaggacgccggcataagcggaacaaatgattctgaggatgaagaggaagagtacaagcaggtagcttgggtgaaatggatggacagctctgccccctttaccatggtgccagataccaactattgcaacattatcgttcctaccatggataccgttcagatgtcacacctgctggatatgctgcttaccaacaagaagccagttctgtgtatagggccaacaggcaccgggaagaccctgacaatatcagacaagttgctgaaaaatttggctctggattatattagtcatttcttaactttttctgcacggacaagcgccaatcagactcaagactttatcgacagtaaactcgataagcggagaaagggtgttttcggtcccccgctaggccgcaatttcatcttctttatagacgaccttaatatgccggccctagagacatatggagcacagcccccaatcgagctcctgagacagtggatggatcacggtggctggtatgatcgcaaaattattggggcattcaagaatctggtcgacatcaattttgtgtgtgccatggggccgccaggaggcgggaggaataccgtcaccccacggctcatgaggcatttcaattatctgagcttcgctgagatggacgaagtatccaaaaaacgtattttttccaccatactaggtaactggctggacggcctcctaggtgagaagtcctaccgagagcgggtcccgggcgctcctcacatcgcgcacttcactgaacccctcgtagaagccaccatcatggtttatgccacaataactagccagctcctcccaacccccgctaaatctcattataccttcaacctgcgggatctgtccaaggtctttcaaggaatgttaatggctgaccccgccaaggtggaagaccaggtccagttgttacgattatggtaccacgaaaattgcagagtctttagggatcggcttgtgaacgaggaggataggtcctggtttgaccaattgctcaagcggtgcatggagcagtgggaggtcacattcaataaggtttgtccgttccaaccaattctttacggagatttcatgtcgccaggaagcgacgtcaagagctacgagcttattacctccgagagtaagatgatgcaggtgatcgaggagtatatagaggactataaccaaataaataccgcgaagctgaaactcgtattgtttatggacgcaatgtcacacatctgccgcatttcccgaacacttcggcaggctctggggaacgccctccttttgggggtgggcggaagcggcaggagttctcttactcgcctcgcctcccacatggcagaatacgaatgttttcagatcgagctctcaaagaactacgggatgtctgagtggcgcgatgatgtgaagaaagtactgcttaaggccggtctccagaatttacctattacttttctcttctcagacacgcagataaagaacgagtcgtttttagaggacatcaacaacgtcctgaatagcggagacattcctaacctttacactgctgacgagcaggatcagattgtaagtactatgcgaccctatattcaagagcaggggctccaacccacaaaggcaaatctgatggctgcatatactggcagagttaggtccaatatccacatggtactgtgcatgtctcccatcggtgaggtgtttcgggctagactgcggcagtttcccagcttagtaaattgctgcaccattgattggttcaatgagtggccagctgaagctctgaagagtgtagctaccgtgtttctcaacgaaattcccgagctcgagagctcccaggaggagatacagggactgatccaagtgtgcgtctatatccaccaatctgtctcaaagaagtgcattgagtacctggccgaactgacgcggcacaattatgtgactcctaaatcatatctggagcttctccatattttcagcattctgatcggccagaagaaactagaactcaaaacagctaagaacaggatgaagtccggtctagacaagctcctgagaacttccgaggatgtagccaagatgcaggaggacctcgagagcatgcatcccctgctggaggaggccgccaaagacacaatgttgactatggagcagatcaaggtggatacagcaatcgcagaggagaccagaaacagtgtacagactgaggagattaaggctaacgagaaagccaaaaaggcccaggccatcgctgacgatgctcagaaggatctagacgaggcactgcccgctctggatgctgccttagcctcgctcaggaacctgaataagaacgatgtgaccgaggttcgagctatgcagcgtccgccccccggagtaaagctcgtgatagaggctgtctgcattatgaagggtatcaaacccaagaaggtgccaggcgagaagcccgggacaaaagtggacgattattgggagccaggaaaggggctgttacaagaccctgggcattttcttgagagcctgtttaagttcgacaaagataacattggcgacgtagtgataaaagctatccagccctatatagacaacgaagaattccagcccgccaccattgcgaaagttagcaaagcatgcacctcgatttgccagtgggtgagggccatgcataagtaccacttcgtggctaaggccgttgaacctaagcgacaagcccttctggaagcccaggacgaccttggggttacccagcggatcctcgacgaggctaaacagaggcttcgagaagttgaggatggcatcgcaaccatgcaagctaagtaccgggaatgtatcactaaaaaagaggagctcgagctcaagtgtgaacagtgcgagcagagactcggacgagctggaaagcttattaacgggctgtcagacgagaaggtgcggtggcaagaaaccgtcgaaaacctgcagtacatgctgaacaatatatcaggtgacgttttggtggcagcaggatttgtggcgtacctgggcccttttactggccagtacaggaccgtgttgtatgacagttgggtcaagcagctgagatcccacaacgtccctcatacgtctgaaccaacgttgatcggtactctgggaaatcccgttaaaattcgatcttggcaaatcgcaggattgccgaatgataccctgagtgtagagaatggggtcattaaccaatttagtcagcgatggacacattttatcgacccccaatcccaggctaacaagtggatcaagaatatggagaaggacaatgggctcgacgtatttaaacttagcgacagagattttttgcggtccatggagaacgcaatcagattcggtaaaccgtgcttactggaaaatgtaggtgaagaactcgatcctgcactggagcccgtgcttctcaagcaaacttacaagcagcaggggaacaccgtgctcaagctgggcgatacggtcatcccctatcatgaggactttagaatgtacattacaaccaagcttccaaaccctcactacactccggaaattagcacaaagctgactctgattaattttaccctttcgcccagtggcctggaggatcaactcttggggcaggtcgtagcagaggagagacctgatctggaggaagccaagaatcagctgataatctccaatgcaaaaatgaggcaagaacttaaagatatcgaggatcagatcctgtatcgtctgagctcttccgagggtaatcctgtcgacgacatggaattgataaaagtgctggaagcttccaagatgaaggcagccgagatccaggctaaggtgcgcatcgccgagcagaccgagaaagacatcgatctgaccaggatggagtatattcctgtcgctattaggacccagattctgttcttttgtgtctctgatctggcaaatgtggatccgatgtaccagtacagtctggagtggttcctgaacatctttctgtcaggcattgcgaactctgaacgagccgataatctgaaaaagcggatcagtaacatcaaccgctatctgacttactctctgtattcaaacgtgtgtaggtcactctttgagaaacataagctgatgtttgcttttttactttgtgtgcgcatcatgatgaacgaggggaaaattaaccagagtgaatggcggtacctcttgtctggggggtccatctcaataatgacagagaatccagcgcctgattggctgtccgaccgcgcctggagggacatactcgccctcagtaacttgccaacattttcatctttctcatccgacttcgtcaaacatctgagtgagttccgagtgattttcgacagtcttgagccccatcgcgagcccctgcccggtatctgggaccagtatctggaccagtttcagaagttactcgttctgcgatgcttgcgtggtgataaagtaacaaatgcaatgcaagacttcgttgcaaccaaccttgaacccagatttatcgaaccacaaacagccaacctttcggtggtctttaaagactcaaatagtacaacccccttgattttcgtcctgtctcctggcaccgatcctgccgcagatttgtacaagtttgcggaagaaatgaagtttagcaaaaagctgtctgctatatcccttggccaaggccagggacccagagctgaagcaatgatgaggagctccatcgaacgaggaaagtgggtattcttccagaattgtcacctggccccctcgtggatgcctgccctggaaaggttgattgaacatattaacccagataaggtccatcgagacttcagactctggcttacctcattgccatcaaacaagttcccggtgagcattctgcagaatggcagcaaaatgactatagagcctccacgcggcgtgagagccaacctgctgaaatcctactcatcgctcggcgaagacttcctgaactcgtgccacaaagtaatggaattcaaatcccttctcttgtcgctctgtctgttccatgggaacgcactggaaagacataagtttggccctctggggtttaacatcccctacgagtttacggacggggacctgcggatttgcatcagtcaacttaagatgttcctggatgagtatgacgatatcccctacaaagtgctcaaatacacagcaggggagatcaactacggaggtagggtgacggacgattgggatcggcgctgcatcatgaatatcctcgaagatttctataatcccgacgtcctttcccctgaacattcctatagtgctagtggcatctaccaccagattccaccaacctacgacttgcacgggtacttgtcctacatcaaatccttacctctcaacgacatgcccgaaatcttcggattacacgataatgcaaacataaccttcgcccagaacgagacatttgccctgctggggaccatcattcagttgcagccaaaaagctcatcagcagggagccagggaagagaggaaattgtggaagacgtaacgcagaatattttactcaaagtgccggagcctattaaccttcagtgggtgatggctaaatacccggtcctgtacgaggaatctatgaacacagttctggtccaggaagttatccgatataaccgtctgctgcaagtcattacccagaccctccaggacctgctcaaagctctaaaagggttagtggtgatgagctcccagctcgaacttatggcggcatccctgtacaataacacggttccagaactgtggagcgctaaggcctacccatcactgaaaccactttcaagctgggtgatggatttgctgcaacgcctggatttcctgcaggcatggattcaagatggtatacctgccgtgttttggatcagcggcttctttttccctcaggccttcctcaccggcacactccagaattttgcaagaaagttcgtgatcagtatagacaccatttcttttgactttaaagtaatgttcgaggcgcccagcgagctgacccagcgcccacaggtcggctgctacatacatggattgttcctcgaaggcgcacgctgggacccagaggccttccagctcgcagaaagccagcccaaggagttatacacagaaatggccgtcatctggctgctgcctaccccaaatcgcaaggcccaagatcaggatttctacctctgtcctatatacaagaccctgacgagagcggggaccctgagtaccactggacatagtaccaattacgttatcgccgtggagattccaacccatcaacctcaacgccattggatcaagcggggggtcgctcttatctgtgctctggattactag

SEQ ID NO: 187090 - DNA, 2676 bp, Artificial Sequence
  derived and/or modified sequence
gagaaggacaatggcctggatgtgttcaagctgagtgaccgggacttcctgcgctccatggagaatgccatccgctttgggaagccctgcctgctggagaatgtgggggaggagctggaccctgccctggagcctgtgctgctgaagcagacctacaagcagcagggcaacacagtgctgaagctgggggacaccgtcatcccctaccacgaggacttcaggatgtacatcaccaccaagctgcccaacccccactacaccccagagatcagcaccaagctgaccctcatcaacttcaccctgagccccagcggcctggaggaccagctgctgggccaggtggtggccgaggagaggccagacctggaggaggccaagaaccagctgatcatcagcaatgccaagatgaggcaggagctgaaggacatcgaggaccagatcctgtaccgcctgagcagcagcgagggcaaccctgtggatgacatggagctgatcaaggtgctggaggccagcaagatgaaggctgctgagatccaggccaaggtgagaattgctgagcagacagagaaggacatcgacctgaccaggatggagtacatccctgtggccatccgcacccagatcctcttcttctgtgtgtctgacctggccaacgtggaccccatgtaccagtacagcctggagtggttcctgaacatcttcctgagcggcatcgccaacagcgagagagctgacaacctgaagaagaggatcagcaacatcaaccgctacctgacctacagcctgtacagcaatgtgtgccgcagcctgtttgagaagcacaagctgatgtttgccttcctgctgtgtgtgcgcatcatgatgaatgaaggcaagatcaaccagagcgagtggagatacctgctgagcggcggcagcatcagcatcatgacagagaacccagccccagactggctgagtgaccgggcctggagggacatcctggccctgagcaacctgcccaccttcagcagcttcagcagtgactttgtgaagcacctgtctgagttccgggtcatctttgacagcctggagccccaccgggagcccctgcccggcatctgggaccagtacctggaccagttccagaagctgctggtgctgcgctgcctgcggggggacaaggtgaccaatgccatgcaggactttgtggccaccaacctggagccccgcttcatcgagccccagacagccaacctgtctgtggtgttcaaggacagcaacagcaccacccccctcatctttgtgctgagccctggaacagatcctgctgctgacctgtacaagtttgctgaggagatgaagttcagcaagaagctgagcgccatcagcctgggccagggccagggccccagggctgaggccatgatgaggagcagcattgaaagaggcaagtgggtgttcttccagaactgccacctggcccccagctggatgcctgccctggagcggctgattgagcacatcaacccagacaaggtgcaccgggacttccggctgtggctgaccagcctgcccagcaacaagtttcctgtgtccatcctgcagaatggcagcaagatgaccatcgagcccccccggggcgtgcgggccaacctgctgaagagctacagcagcctgggggaggacttcctgaacagctgccacaaggtgatggagttcaagagcctgctgctgagcctgtgcctcttccacggcaatgccctggagcggcacaagtttggccccctgggcttcaacatcccctatgagttcacagatggagacctgcgcatctgcatcagccagctgaagatgttcctggatgaatatgatgacatcccctacaaggtgctgaagtacacagctggggagatcaactacggcggccgggtgacagatgactgggaccggcgctgcatcatgaacatcctggaggacttctacaacccagatgtgctgagccctgagcacagctacagcgccagcggcatctaccaccagatcccccccacctatgacctgcacggctacctgagctacatcaagagcctgcccctgaatgacatgcctgagatcttcggcctgcatgacaatgccaacatcacctttgcccagaatgagacctttgccctgctgggcaccatcatccagctgcagcccaagagcagcagcgctggcagccagggccgggaggagatcgtggaggatgtgacccagaacatcctgctgaaggtgcctgagcccatcaacctgcagtgggtgatggccaagtaccctgtgctgtatgaggagagcatgaacacagtgctggtgcaggaggtgatccgctacaaccggctgctgcaggtgatcacccagaccctgcaggacctgctgaaggccctgaagggcctggtggtgatgagcagccagctggagctgatggccgccagcctgtacaacaacacagtgcctgagctgtggagcgccaaggcctaccccagcctgaagcccctgagctcctgggtgatggacctgctgcagaggctggacttcctgcaggcctggatccaggacggcatcccagctgtgttctggatcagcggcttcttcttcccccaggccttcaacagacacagcgctgagttctgcccccagatctgccacctgcactag

SEQ ID NO: 187091 - DNA, 12798 bp, Artificial Sequence
  derived and/or modified sequence
atggagcagcccaacagcaagggctacagcctgggccgcaccccccagggcccagaatgtagcagcgccccagctgtgcaggtgggcacccaccggggcctggagtacaaccctgggaagatcctgcccggcagtgactatggcctgggcaaccccccagccctggaccccaagctgccccacctgcccctgcccccagccccacccaccctgagtgacctgggccagcccaggaagagccccctgactggaacagacaagaagtaccccctgatgaagcagaggggcttctacagcgacatcctgagccctggcaccctggaccagctgggggaggtgtgccggggccccaggatgagccagaacctgctgcggcaggccgacctggacaagttcaccccccgggtgggcagctttgaggtgcctgaggacttccaggagaggatggagcagcagtgcatcggcagcaccacccggctgctggcccagacagacttccccctgcaggcctatgagcccaagatgcaggtgcccttccaggtgctgcccggccagcaccccaggaagattgaaattgaaagaaggaagcagcagtacctgagcctggacatcgagcagctgctcttcagccagggcatcgacagcaacaagctgatgcccaggcacctggaccaccagcacccccagaccatcgagcagggccatgaccccatcttccccatctacctgcccctgaaggtgtttgacaatgaagattttgactgcaggaccccccgggagtggatcaacatgggcctggagcccggcagcctggacaggaagcctgtgcctgggaaggccctgctgcccacagatgacttcctgggccacgaggaccccaagagccagaagctgaagtacaagtggtgtgaggtgggcgtgctggactatgatgaggagaagaagctgtacctggtgcacaagacagatgagaagggcctggtgagagatgagatgggccggcccatcctgaatgctggggtgaccacagagggccggccccccctgcaggtgtgccagtactgggtgccccgcatccagctgctcttctgtgccgaggacccctgcatgtttgcccagagggtggtgcaggccaatgccctgaggaagaacacagaggccctgctgctgtacaacctgtatgtggactgcatgcccagtgatggccagcacgtgatcagcgagcagagcctgagcaagatcaagcagtgggccctgagcacccccaggatgaggaagggccccagcgtgctggagcacctgagcagcctggcccgggaggtgtccctggactatgaaagatccatgaacaagatcaactttgaccacgtggtgagcagcaagccagagaccttctcctatgtgaccctgcccaagaaggaggaggagcaggtgcctgagcggggcctggtgtctgtgcccaagtaccacttctgggagcagaaggaggacttcacctttgtgtccctgctgaccaggcctgaggtgatcacagccctgagcaaggtgcgggcagagtgcaacaaggtgacagccatgagcctcttccacagcagcctgagcaagtacagccacctggaggagtttgagcagatccagagccagaccttcagccaggtgcagatgttcctgaaggacagctggatcagcagcctgaaggtggccatgaggagcagcctgcgggacatgagcaagggctggtacaacctgtatgagaccaactgggaggtgtacctgatgagcaagctgaggaagctgatggagctggtgaagtacatgctgcaggacaccctgcgcttcctggtgcaggacagcctggccagcttcagccagttcatcagtgacacctgctgcagcgtgctgaactgcacagatgacatggtgtggggagatgacctgatcaacagcccctaccggcccaggaagaaccccctcttcatcatggacctggtgctggacagcagcggcgtgcactacagcacccccctggagcagtttgaggccagcctgctgaacctgtttgataaaggcatcctggccacccatgctgtgccccagctggagaagctggtgatggaggacatcttcatcagcggggaccccctgctggagagcgtgggcctgcacgagcccctggtggaggagctgcgggccaccatcgccagcgctgtgtccaaggccatgatccccctgcaggcctatgccaaggagtacaggaagtacctggagctgaacaacaatgacatcgccagcttcctgaagacctaccagacccagggcctgctggcccaggaggtgcgggaggtggtgctgacccacctgcgggagaaggagatcctggacagcagcctgcccagcagcatcatcatcggccccttctacatcaacacagacaacgtgaagcagagcctgagcaagaagaggaaggccctggccacctctgtgctggacatcctggccaagaacctgcacaaggaggtggacagcatctgtgaggagttccgcagcatcagcaggaagatctatgagaagcccaacagcattgaggagctggccgagctgcgggagtggatgaagggcatccctgagcggctggtgggcctggaggagagaattgtgaaggtgatggatgactaccaggtgatggatgagttcctgtacaacctgagcagtgatgacttcaatgacaagtggatcgccagcaactggcccagcaagatcctgggccagatcgagctggtgcagcagcagcacgtggaggatgaggagaagttcaggaagatccagatcatggaccagaacaacttccaggagaagctggagggcctgcagctggtggtggccggcttcagcatccacgtggagatcagccgggcccatgaaattgccaatgaggtgcggcgggtgaagaagcagctgaaggactgccagcagctggccatgctgtacaacaaccgggagcgcatcttcagcctgcccatcaccaactatgacaagctgagcaggatggtgaaggagttccagccctacctggacctgtggaccacagccagtgactggctgcgctggagcgagagctggatgaatgaccccctgagcgccattgatgctgagcagctggagaagaatgtggtggaggccttcaagaccatgcacaagtgtgtgaagcagttcaaggacatgcctgcctgccaggaggtggccctggacatccgggcccgcatcgaggagttcaagccctacatccccctcatccagggcctgaggaaccctggcatgaggatccgccactgggagaccctgagcaaccagatcaacatcaacgtgcggcccaaggccaacctgacctttgcccgctgcctggagatgaacctgcaggaccacatcgagagcatcagcaaggtggccgaggtggccggcaaggagtatgccatcgagcaggccctggacaagatggagaaggagtggagcaccatcctcttcaacgtgctgccctacaaggccacagacacctacatcctgaagagcccagatgaggccagccagctgctggatgaccacatcgtgatgacccagaacatgtccttcagcccctacaagaagccctttgagcagaggatcaacagctgggagaacaagctgaagctgacccaggaggtgctggaggagtggctgaactgccagaggtcctggctgtacctggagcccatcttcagcagcgaggacatcaaccagcagctgcctgtggagagcaagcgctaccagaccatggagcgcatctggaagaagatcatgaagaatgcctatgaaaatcgggaggtgatcaacgtgtgcagcgacctgaggatgctggacagcctgcgggactgcaacaagatcctggacctggtgcagaagggcctgtctgagtacctggagaccaagaggtctgccttcccccgcttctacttcctgagtgatgatgagctgctggagatcctgagccagaccaaggaccccacagctgtgcagccccacctgaggaaatgttttgagaacatcgcccggctgctcttccaggaggacctggagatcacccacatgtacagcgctgagggggaggaggtgcagctgtgcttcagcatctaccccagcagcaatgtggaggactggctgcgggaggtggagaggtccatgaaggcctctgtgcatgacatcatcgagaaggccatccgggcctaccccaccatgcccaggacccagtgggtgctgaactggccaggccaggtgaccatcgccggctgccagacctactggaccatggaggtggccgaggccctggaggccggcaacctgcggagccagctgttcccccagctgtgccagcagctgagtgacctggtggccctggtgcggggcaagctgagcaggatgcagagagctgtgctgagcgccctgattgtgattgaggtgcacgccaaggatgtggtgtccaagctgatccaggagaatgtggtgtctgtgaatgacttccagtggatcagccagctgcgctactactggaccaacaatgacctgtacatccgggctgtgaatgctgagttcatctacggctatgagtacctgggcaacagcggccgcctggtgatcacccccctgacagaccgctgctacctgaccctgaccggggccctgcacctgaagtttggaggagccccagctggccctgctggcaccgggaagacagagaccaccaaggacctgggcaaggccctggccatccagacagtggtgttcaactgcagcgaccagctggacttcatggccatgggcaagttcttcaagggcctggccagcgctggggcctgggcctgctttgatgagttcaacagaattgacatcgaggtgctgtctgtggtggcccagcagatcaccaccatccagaaggcccagcagcagagggtggagcgcttcatgtttgagggcgtggagatccccctggtgcccagctgtgctgtgttcatcaccatgaaccctggctacgccggccgcacagagctgcctgacaacctgaaggccctcttccggcctgtggccatgatggtgcctgactatgccatgatcacagagatcagcctgtacagctttggcttcaatgaggcctctgtgctggccaagaagatcaccaccaccttcaagctgagcagcgagcagctgagcagccaggaccactatgactttggcatgagagctgtgaagacagtcatctctgctgctggcaacctgaagcgggagaaccccagcatgaatgaggagctgatctgcctgcgggccatcagagatgtgaatgtgcccaagttcctgcaggaggacctgaagctgttcagcggcatcgtgtctgacctcttccccaccatcaaggaggaggacacagattatggcatcctggatgaggccatccgggaggcctgcaggaacagcaacctgaaggatgtggagggcttcctgaccaagtgcatccagctgtatgagaccaccgtggtgcgccacggcctgatgctggtgggccccaccggcagcggcaagagcacctgctacagagtgctggccgccgccatgaccagcctgaagggccagcccagcatcagcggcggcatgtatgaagctgtgaactactacgtgctgaaccccaagagcatcaccatgggccagctgtatggagaatttgacctgctgacccatgagtggacagatggcatcttcagcagcttcatccgggccggggccatcaccagtgacaccaacaagaagtggtacatgtttgatggccctgtggatgccatctggattgagaacatgaacacagtgctggatgacaacaagaagctgtgcctgagcagtggagagatcatcaagctgacagaggccatgaccatgatgtttgaggtgcaggacctggccgtggccagccctgccaccgtgagccgctgtggcatggtgtacctggagcccagcatcctgggcctgatgcccttcatcgagtgctggctgaggaagctgccccccctgctgaagccctatgaggagcacttcaaggccctgtttgtgtccttcctggaggagagcatcagctttgtgcgcagctctgtgaaggaggtgattgccagcaccaactgcaacctgaccatgagcctgctgaagctgctggactgcttcttcaagcccttcctgccccgggagggcctgaagaagatccccagcgagaagctgagcagaattgtggagctgattgagccctggttcatcttcagcctcatctggagcgtgggcgccaccggggacagcagcggccgcaccagcttcagccactggctgcggctgaagatggagaatgagcagctgaccctgctcttccctgaggagggcctggtgtttgactaccgcctggaggatgctggcatcagcggcaccaatgacagtgaagatgaggaggaggagtacaagcaggtggcctgggtgaagtggatggacagcagcgcccccttcaccatggtgcctgacaccaactactgcaacatcatcgtgcccaccatggacacagtgcagatgagccacctgctggacatgctgctgaccaacaagaagcctgtgctgtgcatcggccccactggaacaggcaagaccctgaccatcagtgacaagctgctgaagaacctggccctggactacatcagccacttcctgaccttcagcgcccggaccagcgccaaccagacccaggacttcatcgacagcaagctggacaagaggaggaagggcgtgtttggaccacccctgggcaggaacttcatcttcttcattgatgacctgaacatgcctgccctggagacctacggggcccagccccccatcgagctgctgcggcagtggatggaccatggaggctggtatgacaggaagatcatcggggccttcaagaacctggtggacatcaactttgtgtgtgccatgggccccccaggcggcggcaggaacacagtgaccccccggctgatgaggcacttcaactacctgagctttgctgagatggatgaggtgtccaagaagaggatcttcagcaccatcctgggcaactggctggatggcctgctgggggagaagagctaccgggagcgggtgcctggggccccccacatcgcccacttcacagagcccctggtggaggccaccatcatggtgtatgccaccatcaccagccagctgctgcccaccccagccaagagccactacaccttcaacctgcgggacctgagcaaggtgttccagggcatgctgatggctgaccctgccaaggtggaggaccaggtgcagctgctgcggctgtggtaccacgagaactgcagggtcttccgggaccggctggtgaatgaggaggaccgctcctggtttgaccagctgctgaagcgctgcatggagcagtgggaggtgaccttcaacaaggtgtgccccttccagcccatcctgtatggagacttcatgagccctggcagtgatgtgaagagctatgagctgatcaccagcgagagcaagatgatgcaggtgattgaggagtacatcgaggactacaaccagatcaacacagccaagctgaagctggtgctcttcatggatgccatgagccacatctgccgcatcagcaggaccctgcggcaggccctgggcaatgccctgctgctgggcgtgggcggcagcggccgcagcagcctgacccggctggccagccacatggccgagtatgagtgcttccagatcgagctgagcaagaactacggcatgtctgagtggagagatgatgtgaagaaggtgctgctgaaggccggcctgcagaacctgcccatcaccttcctgttcagtgacacccagatcaagaatgaaagcttcctggaggacatcaacaacgtgctgaacagcggggacatccccaacctgtacacagcagatgagcaggaccagatcgtgtccaccatgaggccctacatccaggagcagggcctgcagcccaccaaggccaacctgatggccgcctacacaggccgggtgcgcagcaacatccacatggtgctgtgcatgagccccatcggggaggtgttccgggcccggctgcggcagttccccagcctggtgaactgctgcaccatcgactggttcaatgagtggccagctgaggccctgaagtctgtggccaccgtcttcctgaatgagatccctgagctggagagcagccaggaggagatccagggcctcatccaggtgtgtgtgtacatccaccagagcgtgtccaagaagtgcatcgagtacctggccgagctgaccaggcacaactacgtgacccccaagagctacctggagctgctgcacatcttcagcatcctgattggccagaagaagctggagctgaagacagccaagaacaggatgaagagcggcctggacaagctgctgcggaccagtgaagatgtggccaagatgcaggaggacctggagagcatgcaccccctgctggaggaggccgccaaggacaccatgctgaccatggagcagatcaaggtggacacagccatcgccgaggagaccagaaattctgtgcagacagaggagatcaaggccaatgagaaggccaagaaggcccaggccatcgcagatgatgcccagaaggacctggatgaggccctgcctgccctggatgctgccctggccagcctgaggaacctgaacaagaatgatgtgacagaggtgcgggccatgcagaggcctcctcctggggtgaagctggtgattgaggccgtgtgcatcatgaagggcatcaagcccaagaaggtgcctggagagaagccaggcaccaaggtggatgactactgggagcccgggaagggcctgctgcaggaccccggccacttcctggagagcctcttcaagtttgacaaggacaacattggagatgtggtgatcaaggccatccagccctacatcgacaatgaggagttccagcctgccaccatcgccaaggtgtccaaggcctgcaccagcatctgccagtgggtgcgggccatgcacaagtaccactttgtggccaaggctgtggagcccaagaggcaggccctgctggaggcccaggatgacctgggcgtgacccagaggatcctggatgaggccaagcagaggctgcgggaggtggaggatggcatcgccaccatgcaggccaagtaccgggagtgcatcaccaagaaggaggagctggagctgaagtgtgagcagtgtgagcagaggctgggccgggccggcaagctgatcaatggcctgagtgatgagaaggtgcgctggcaggagaccgtggagaacctgcagtacatgctgaacaacatctctggagatgtgctggtggccgccggctttgtggcctacctgggccccttcaccggccagtacagaacagtgctgtatgacagctgggtgaagcagctgcggagccacaacgtgccccacaccagcgagcccaccctcatcggcaccctgggcaaccctgtgaagatccgctcctggcagattgctggcctgcccaatgacaccctgtctgtggagaatggagtcatcaaccagttcagccagcgctggacccacttcatcgacccccagagccaggccaacaagtggatcaagaacatggagaaggacaatggcctggatgtgttcaagctgagtgaccgggacttcctgcgctccatggagaatgccatccgctttgggaagccctgcctgctggagaatgtgggggaggagctggaccctgccctggagcctgtgctgctgaagcagacctacaagcagcagggcaacacagtgctgaagctgggggacaccgtcatcccctaccacgaggacttcaggatgtacatcaccaccaagctgcccaacccccactacaccccagagatcagcaccaagctgaccctcatcaacttcaccctgagccccagcggcctggaggaccagctgctgggccaggtggtggccgaggagaggccagacctggaggaggccaagaaccagctgatcatcagcaatgccaagatgaggcaggagctgaaggacatcgaggaccagatcctgtaccgcctgagcagcagcgagggcaaccctgtggatgacatggagctgatcaaggtgctggaggccagcaagatgaaggctgctgagatccaggccaaggtgagaattgctgagcagacagagaaggacatcgacctgaccaggatggagtacatccctgtggccatccgcacccagatcctcttcttctgtgtgtctgacctggccaacgtggaccccatgtaccagtacagcctggagtggttcctgaacatcttcctgtctggaattgccaacagcgagagagctgacaacctgaagaagaggatcagcaacatcaaccgctacctgacctacagcctgtacagcaatgtgtgccgcagcctgtttgagaagcacaagctgatgtttgccttcctgctgtgtgtgcgcatcatgatgaatgaaggcaagatcaaccagagcgagtggagatacctgctgagcggcggcagcatcagcatcatgacagaaaatcctgccccagactggctgagtgaccgggcctggagggacatcctggccctgagcaacctgcccaccttcagcagcttcagcagtgactttgtgaagcacctgtctgagttccgggtcatctttgacagcctggagccccaccgggagcccctgcccggcatctgggaccagtacctggaccagttccagaagctgctggtgctgcgctgcctgcggggggacaaggtgaccaatgccatgcaggactttgtggccaccaacctggagccccgcttcatcgagccccagacagccaacctgtctgtggtgttcaaggacagcaacagcaccacccccctcatctttgtgctgagccctggaacagatcctgctgctgacctgtacaagtttgctgaggagatgaagttcagcaagaagctgagcgccatcagcctgggccagggccagggccccagggctgaggccatgatgaggagcagcattgagcggggcaagtgggtgttcttccagaactgccacctggcccccagctggatgcctgccctggagcggctcatcgagcacatcaacccagacaaggtgcaccgggacttccggctgtggctgaccagcctgcccagcaacaagtttcctgtgtccatcctgcagaatggcagcaagatgaccatcgagcccccccggggcgtgcgggccaacctgctgaagagctacagcagcctgggggaggacttcctgaacagctgccacaaggtgatggagttcaagagcctgctgctgagcctgtgcctcttccatggaaatgccctggagcggcacaagtttggccccctgggcttcaacatcccctatgagttcacagatggagacctgcgcatctgcatcagccagctgaagatgttcctggatgaatatgatgacatcccctacaaggtgctgaagtacacagctggggagatcaactatggaggccgggtgacagatgactgggaccggcgctgcatcatgaacatcctggaggacttctacaacccagatgtgctgagccctgagcacagctacagcgccagcggcatctaccaccagatcccccccacctatgacctgcacggctacctgagctacatcaagagcctgcccctgaatgacatgcctgagatcttcggcctgcatgacaatgccaacatcacctttgcccagaatgagacctttgccctgctgggcaccatcatccagctgcagcccaagagcagcagcgctggcagccagggccgggaggagatcgtggaggatgtgacccagaacatcctgctgaaggtgcctgagcccatcaacctgcagtgggtgatggccaagtaccctgtgctgtatgaggagagcatgaacacagtgctggtgcaggaggtgatccgctacaaccggctgctgcaggtgatcacccagaccctgcaggacctgctgaaggccctgaagggcctggtggtgatgagcagccagctggagctgatggccgccagcctgtacaacaacacagtgcctgagctgtggagcgccaaggcctaccccagcctgaagcccctgagctcctgggtgatggacctgctgcagaggctggacttcctgcaggcctggatccaggacggcatcccagctgtgttctggatcagcggcttcttcttcccccaggccttcctgaccggcaccctgcagaactttgccaggaagtttgtgatcagcattgacaccatcagctttgacttcaaggtgatgtttgaggcccccagcgagctgacccagaggccccaggtgggctgctacatccacggcctcttcctggagggcgcccgctgggaccctgaggccttccagctggccgagagccagcccaaggagctgtacacagagatggccgtcatctggctgctgcccacccccaacaggaaggcccaggaccaggacttctacctgtgccccatctacaagaccctgaccagggctggcaccctgagcaccaccggccacagcaccaactacgtgattgctgtggagatccccacccaccagccccagaggcactggatcaagaggggcgtggccctgatctgtgccctggactactag

SEQ ID NO: 187092 - DNA, 2676 bp, Artificial Sequence
  derived and/or modified sequence
gagaaggacaacggcctggacgtgttcaagctgagcgaccgggacttcctgagatctatggagaacgccatacgatttgggaagccttgcctgctagaaaacgtaggggaagaattagatccggcccttgaaccagtcctactgaagcagacttataagcagcagggaaacacagtgctcaagctgggagatactgtcattccctatcatgaagactttaggatgtatataaccaccaaacttcccaacccgcattacactccagagatttctaccaagctgacattgatcaacttcacccttagccctagcggccttgaagaccagctgttaggacaggtcgttgctgaggagcgccctgacctggaagaagcgaagaatcagttaataatatcaaacgcaaaaatgaggcaagagctgaaagacatcgaagatcagattttatatcgcttgtcttcatcggaaggcaacccagtggatgatatggagcttattaaggtgctggaggcctctaaaatgaaagccgcggaaattcaggcaaaagtccgaatcgccgaacagacggagaaggacattgacttgacaaggatggaatatatccctgtcgccattaggacccagatcttgttcttttgcgtgtccgatctcgctaacgtggatcccatgtatcagtatagcctggagtggtttttgaacattttcttatccgggatagctaacagtgagcgcgccgacaacctgaagaagcgcatttctaacataaaccgatacctgacttacagtttgtattccaacgtgtgtagaagcctcttcgagaagcacaagctcatgtttgcattcctcctctgcgttagaataatgatgaatgagggcaagatcaatcagagtgagtggaggtacttactgagcggaggatccatctctataatgaccgaaaatccggcccctgattggttatcagaccgggcttggcgcgacatcctggccctgtccaatctcccgacattttcttcattttcctccgacttcgtgaagcatctgtccgaatttagagtaatcttcgactccctggagccgcatcgagaacccttaccgggaatctgggaccaatatttagaccaatttcaaaaattgctggtgctgagatgcttgcgaggcgataaggttactaacgccatgcaagacttcgtagctacaaatctggagccacgcttcatcgagcctcagactgctaacctctcggtcgttttcaaggactccaacagcaccacccctttaatttttgtattatcgcctggtacagatccggccgccgatctttataagttcgcagaggagatgaagtttagcaagaagctgtcagccatcagtctcggacaggggcagggtccccgagccgaggccatgatgcgctcctcaattgaacggggcaagtgggtgtttttccagaactgtcatctcgcacccagttggatgcctgccctggagcgcctgatcgagcacatcaatcccgacaaagtccatagagatttccgtttgtggctgacttctctcccctctaataaattccctgtgtctatactgcagaatggtagcaagatgaccattgaaccccctcgtggagtcagggccaacctgctgaagtcttattcatctctgggagaggacttcctcaacagctgccataaggtgatggaatttaaatcactgttgctttctctttgtctgtttcatggaaacgcactggagcggcataagttcgggccacttggattcaacattccgtatgagttcactgacggagatctccgcatctgcatttctcagcttaagatgttcctggacgaatacgacgacattccatacaaggtgctcaagtataccgccggagagatcaactacggaggcagggttacagacgactgggataggcgatgtattatgaatattctggaagatttctataaccccgatgtcctaagccccgagcattcttatagtgcttccgggatctaccaccaaattccaccaacgtacgacctgcatggctacctgtcctatattaagtcgctccccctcaatgatatgccagaaatttttggactgcacgacaatgccaatattacatttgcccagaacgagacgtttgcgttgttgggaacaatcattcagttacaaccaaagtcttccagcgccggatctcagggaagggaagaaattgttgaggacgtgacacaaaacatcctgctgaaggtgccagaaccaattaatctgcagtgggtgatggccaaataccccgtgctgtacgaggagtcaatgaataccgtgcttgttcaggaggttatcaggtataatcgtctactgcaggtgattacccaaacccttcaggacctgctgaaggctcttaagggtctcgttgtgatgtcctcccagctggaactcatggctgcatcactatacaacaacacggtgcccgagctctggtccgctaaggcctaccctagtttaaagcctctgagctcttgggtgatggacctgttacagcggcttgacttcctgcaggcatggatccaagacggcatccctgctgtgttttggatcagcggattttttttccctcaggccttcaatcggcattccgctgaattttgcccacagatctgtcatcttcattag

SEQ ID NO: 187093 - DNA, 12798 bp, Artificial Sequence
  derived and/or modified sequence
atggagcagcccaacagcaagggctacagcctgggccggaccccccaaggccctgagtgcagtagcgctccagccgtgcaggtggggacccatcgtggactggagtacaaccccgggaagattctccccggttctgactacggactggggaacccacccgctctcgacccgaaactcccccacctcccactcccccccgctccacctaccctctcggatctggggcaacctcggaagtcacccctgacaggaacagacaagaaatatcccctgatgaagcagcggggtttctactctgacatactgtcacccgggactctcgaccagttaggggaggtgtgtaggggcccacgcatgagtcagaacctgctccgtcaagcagatctcgacaagtttacccctcgggtaggttccttcgaagtcccagaggattttcaggaacgaatggaacagcaatgtattggttccaccacaagactacttgcacaaaccgatttcccgctacaagcatacgaaccaaagatgcaggtcccgttccaggtgctgcctggacagcaccctagaaagatcgaaatcgagcggagaaaacaacagtacctgtccttagatattgaacaactcctgttcagccagggtattgatagtaacaagctaatgcctcggcacctcgatcatcaacatccccagaccatagaacaaggccacgatccaatctttccaatctacctgcctttgaaggtcttcgataacgaggactttgactgtaggactccacgagaatggatcaacatgggtctggaaccaggcagcctcgataggaaaccagtgcccgggaaggccctgcttccaactgacgattttctgggtcacgaggatcccaaaagtcaaaaactcaagtataaatggtgcgaagtgggagtgcttgactatgacgaggagaaaaaattatatctggtgcataaaaccgatgagaaaggactggttcgtgacgagatgggcagaccaatcttaaatgcgggcgtgaccaccgaaggaagacctcccctccaagtttgccagtattgggttccccgaatccagctgctcttctgcgctgaggacccctgtatgtttgcccagagggtagttcaggcgaacgctttacgcaaaaataccgaggcattgctattgtataacttgtatgtggattgtatgccctccgacggccagcatgtgataagcgagcagtctctctccaagatcaagcagtgggcactttcgaccccacgcatgcggaaaggaccctctgtactggagcacctgagtagcctagcccgggaggtgtctctggattacgagagaagtatgaataagattaacttcgaccatgtggttagctccaagcctgagacattcagttatgttaccctgccgaagaaggaggaggagcaggtacccgaaagaggattggtgagcgtcccaaagtatcacttctgggagcagaaagaggactttactttcgtgagcctcctgactaggccagaggtcattactgctcttagtaaagtgcgggctgaatgtaataaagtaacagctatgagcctgttccacagcagtctgtctaagtacagccaccttgaagaatttgagcagatccagagccagacgttctcccaggtgcagatgttcctgaaggacagctggatctcatcattgaaggtagctatgaggtcaagcctccgggatatgagcaagggatggtacaatctctacgaaactaactgggaagtctatttgatgagcaagctgcggaaacttatggaactcgtcaagtacatgctgcaggatactctgagattccttgtgcaagacagcttggcctccttcagtcagttcattagtgatacttgctgttcagtgctcaattgtacggatgacatggtttggggcgatgatttgatcaattcaccttaccggccgcgcaagaacccgcttttcatcatggatcttgttctggactcttctggagtccattatagcactcccctggaacagtttgaggcgtctctccttaatctttttgacaaagggattctcgctactcacgccgttccccagctggagaaattggtgatggaggacatctttatttccggagatccactccttgaatcggtggggctgcatgagccattggttgaagaattgagagcaaccattgcttccgcagtatccaaagcgatgataccactgcaggcctacgcgaaagagtataggaagtacttggagctgaacaataatgatatcgcctcattcctaaagacttaccagacgcagggcttgctggcccaagaagtgagggaggtggtactcactcacctgcgggaaaaagagatcctcgatagctctttgcccagtagcattatcatcggccccttctatataaacacagataacgtgaaacagtcactgtctaaaaagcggaaggcgctcgcgacttctgtgttggacattcttgctaaaaacctgcacaaagaagtggacagcatttgcgaggagtttagaagcatctcccgcaagatttatgagaaaccgaacagcattgaggagctggctgaactccgggagtggatgaagggcattccagaaagactggtagggctggaagaaaggatagtcaaagtcatggacgactaccaagtgatggacgagttcctgtacaacctgtcgtctgacgatttcaacgataagtggatcgccagtaactggccttccaagatccttgggcaaatcgagcttgttcaacagcagcacgtggaggatgaggaaaaatttagaaagattcaaatcatggaccagaacaacttccaggagaagctggagggactgcagttggtcgttgctggattttcgatccacgttgagatttcccgcgctcatgaaattgcaaatgaggtccgcagagtgaagaaacaactgaaagattgccagcagcttgcgatgctatacaacaaccgagaaagaatcttctccttacctattactaactacgataaactgagcaggatggttaaggagttccagccctacttagacctgtggacaaccgcatctgactggcttaggtggtctgaatcctggatgaacgatcccttgtccgctattgatgccgaacagcttgagaaaaatgtggttgaggcctttaaaaccatgcataagtgcgtaaagcagtttaaggatatgcctgcatgtcaggaagtggctctcgacatacgggctcgcatcgaggaattcaagccttatattcctctaatccagggactgagaaaccctgggatgagaatccgccactgggagaccctgtccaatcagattaatatcaatgtcagacctaaagccaatctcactttcgctcgctgtctggagatgaatctgcaggaccacatcgaaagtatctctaaagtggctgaggtcgctggaaaggagtacgccattgagcaggccttagacaagatggaaaaggaatggagcaccatcctctttaacgtcttaccttataaggctaccgatacatacatactgaagagccctgatgaggcttctcagctattggacgatcatatcgtcatgacgcagaatatgtcatttagcccctacaaaaagccattcgagcaaaggatcaatagctgggaaaacaagcttaaactgacacaggaagtgctggaagaatggctgaattgccagcgcagctggttatacctggaaccaatattcagcagcgaggatatcaaccagcagttgcctgttgaaagcaagagataccagacgatggaacgaatttggaagaagataatgaaaaatgcatacgaaaaccgggaagtgattaatgtgtgctctgatctgagaatgctcgactccctcagagattgtaacaagatactggacctggttcagaagggactttcagagtatctggagaccaagcgctccgcatttcctcgattctatttcttgagcgatgacgagctcttggaaatacttagccaaacgaaggaccctacagctgttcagcctcacctgcgaaagtgtttcgagaatattgctcggctgctgtttcaggaagacttggaaatcactcatatgtattccgctgagggcgaggaggtacagttatgcttttcaatatatccatcttccaatgtggaagactggctgagggaagtcgagcgaagcatgaaggcatccgtgcatgacatcatcgaaaaagcaattagggcttatcctacaatgccccgtacccagtgggttcttaactggcctggtcaagttacgatagctggatgccaaacttattggacaatggaggtagccgaggctctggaagctggtaacctccggtcccagctcttcccacaactgtgccagcagttgagcgatctggtagcactagtccgaggcaaactgagtaggatgcagcgggcggtgctctccgcgctcatcgtgattgaggtccatgcaaaggacgtggtgagtaagctgattcaggaaaatgtcgtcagtgtgaacgacttccagtggatctctcaactgcggtactattggactaataacgacttgtatatccgggcggtaaacgcagagttcatttatggctacgaatatcttgggaactcagggcggctggtcattaccccccttactgatcgttgttacctgacactcacaggggcattgcacctgaagttcggaggagctccggccgggcccgctggtactggcaaaacagaaacaaccaaagacttaggaaaagccctggccatccagacagtggtgtttaattgctccgaccagcttgactttatggccatggggaagtttttcaaagggctggcatcagccggagcctgggcatgctttgacgaattcaatagaattgacatcgaggttctctccgtggtagcgcagcagattactacgatccagaaagcccagcagcagcgagttgagaggttcatgtttgaaggcgtcgaaattccactcgtgccatcttgtgccgtgtttattacaatgaaccccggctacgcagggcgcacagagctgccggataatctaaaggctttgtttcgtcccgtcgccatgatggtgcctgattatgcaatgattacagagattagcctctactccttcgggtttaatgaggcaagtgtgctcgcgaagaaaattactaccactttcaagctctcatctgagcagctgtcctcccaagatcattacgacttcggaatgcgcgctgtgaagacagtgatctcagccgctgggaatctaaagagagagaacccctccatgaacgaagaactgatatgtctacgtgccatccgggatgtgaacgtaccgaaatttctacaggaggatcttaagctctttagtgggattgtgtctgatctcttccctactatcaaagaggaggataccgactatggcatcctggacgaggctatcagagaggcctgccggaattctaatttaaaggatgtagaaggttttcttacaaaatgcatccagctgtacgaaaccaccgtggtccgacacggcctcatgctggtaggccctacggggtccggcaagtcaacatgctatagagtgctggcagccgctatgaccagcctgaagggtcagccgtcaatttccggtggtatgtatgaagctgtgaattattatgtgctgaatccaaagtccatcaccatgggccagctctatggggaattcgatctgctgacccacgagtggacggatgggatatttagttctttcattcgggcaggtgccatcaccagcgatactaataaaaaatggtacatgtttgatggccctgtcgatgctatctggatagagaatatgaacaccgtcttggatgacaataagaagctctgccttagctccggcgagatcattaaactcaccgaagccatgacaatgatgttcgaggttcaggacctggcggtggcttcacccgcgactgtgagccggtgcgggatggtttacctggaacctagcatcctgggactgatgccctttatcgaatgctggctgcggaagctgccccctttactcaagccatacgaggagcacttcaaggcccttttcgtgagctttttagaagaaagcatatccttcgtgcggtccagtgtgaaggaggttatagcctcgaccaactgcaacctgacaatgagtctgcttaaactgctggattgttttttcaagccattcctgcctagagaaggccttaaaaaaataccaagcgagaagctgtcccgcattgtagagctgatcgaaccatggtttatcttctctttgatttggagtgttggggccaccggcgattccagtggaaggacgtccttcagtcattggctaagactcaagatggagaacgagcagctgaccctgctttttcccgaggaaggtcttgtttttgattataggttagaggatgctggcatatccggcactaatgattcagaggatgaagaggaggaatacaaacaggtggcctgggtgaagtggatggactcaagcgctccgttcaccatggtgccggatacaaattactgtaacattattgttcccacaatggacacggttcagatgtcacacctgcttgatatgctcctcacaaataagaaacctgtactgtgtatcggccccacaggtaccggcaaaactctgaccatttccgacaagttacttaagaatctcgcattggattatatatcacacttcctgacctttagtgcccggacttcagctaaccagactcaggacttcatcgatagcaagctggacaagagacggaaaggcgtgtttggaccccccctggggagaaactttattttttttatcgacgacttgaatatgccggccctggagacctatggggctcagccccccatagaactcctcagacaatggatggaccacggtgggtggtacgaccgcaagatcattggggcctttaagaatctagtcgacatcaactttgtttgtgctatgggcccccccggagggggtcgaaacaccgtgacaccccgccttatgcgccacttcaactatttaagttttgcggaaatggatgaggtctccaagaagcggatcttttccacgattctggggaactggctggacggtctgcttggagaaaagtcataccgcgagagagtgcccggggcccctcacatcgcccacttcactgaaccattggttgaggctaccatcatggtgtacgctactatcactagccagctcttgcctacacccgcaaagtcccattacacattcaacctgcgcgatctcagcaaagtgtttcagggcatgctaatggccgaccccgcaaaggtggaggatcaggtccaactgctgcgactctggtaccacgaaaattgtagggtctttcgggaccggctagtgaacgaggaggaccggagctggtttgatcagttactcaagagatgtatggaacagtgggaggtgacctttaacaaggtctgtccttttcagccaattttgtacggcgacttcatgtccccaggaagtgatgtgaagtcctacgaactgattacatctgaatcaaaaatgatgcaagtgatcgaagagtacattgaagactacaatcagatcaacacagccaaactaaagttggttctatttatggacgcaatgtcacatatctgccgtatcagtcgaacgctcaggcaggcacttggcaacgccctgctactgggcgttggtggctcagggcgctcatccctgacccgactggcaagtcacatggcagagtatgaatgcttccagattgagctgtctaagaactacggaatgagcgaatggagggacgacgttaagaaggttctactgaaggcgggcctgcagaatctacccattacgttcctcttttctgatacccagataaagaatgagtctttcctcgaggacataaacaatgtcctgaatagcggagatatccccaatctgtatactgccgacgagcaggaccagatcgttagcacaatgcggccatatattcaggaacagggcttgcagcccaccaaagccaatttgatggcggcctatacaggccgggtgagatccaatatccatatggtgctctgcatgagccccatcggagaagtattcagggcaagactccgtcagtttccatccctggtcaattgttgtaccattgattggtttaacgagtggcccgcggaggctttaaagagtgtcgctacggtcttcttgaatgagattccagagctggaaagttcccaggaggaaattcaaggcctcatacaggtctgtgtgtatatccaccagagcgtctcaaaaaaatgcattgaatatctggccgaactgacacgccacaactatgtcacccctaagtcctaccttgaattactgcatatctttagcattttaattggccagaaaaaactcgagctaaaaaccgccaagaacagaatgaaatctggtttggacaagctgttgagaaccagtgaagacgtggctaagatgcaggaggacctggaatccatgcacccgctgctcgaagaagctgccaaagacaccatgctgaccatggaacaaattaaggtggatacagcaatcgcagaagaaactcgaaactcagtgcagacagaggaaattaaagcaaatgaaaaggctaagaaagctcaggccatcgcagatgatgcccagaaggacctcgacgaagctctgcctgcactggatgcggccctggcctcattaaggaaccttaataagaatgatgtcactgaagtgcgagctatgcagcgaccaccaccaggggtcaaactggttattgaggccgtctgcattatgaagggcattaaaccaaagaaggtaccgggcgagaagcctggtaccaaggtggacgactattgggagccaggaaagggtttgctgcaggatccaggccacttcctggagagtctatttaagtttgataaggacaacattggagatgttgtgattaaagcaatccagccatacattgataacgaggagtttcagccagccactatcgccaaggtgtcaaaagcgtgtacctcaatttgccaatgggtgcgagctatgcacaagtaccatttcgtggccaaggccgtggagcccaagcgccaggctctgctggaggcacaagacgatctcggagtaacacagcggattttggacgaggcaaagcagcggctgagggaggtggaggatggaatcgccaccatgcaagcaaagtatcgcgaatgtataactaagaaagaggagctggagcttaagtgtgaacaatgcgaacagcgcctgggtcgcgccggtaaactgatcaatggcttgtccgacgagaaagtccggtggcaggagactgtagaaaatctacagtatatgctcaacaacatttcgggggacgtgcttgtcgccgcgggtttcgtagcctatctcggccctttcaccggacagtatagaacagtcttgtatgacagttgggtcaagcaactgagatctcacaatgtcccccacacaagtgaacctacacttatcgggacattagggaatccagtcaagatccgcagctggcaaattgccggcctaccaaacgatactttgagtgttgaaaatggcgttatcaatcagttttcacagcgatggacacacttcatcgatcctcaatcccaggctaacaagtggataaagaacatggaaaaggacaatggcctggatgtcttcaagctgtctgatagggacttcctcagatctatggagaacgctatccgcttcggaaagccctgccttctagagaatgtgggtgaggaactggaccctgcgcttgagcccgttctgctgaagcagacttacaagcagcagggaaataccgtgctgaaactcggcgatactgtgataccgtaccatgaagacttccgcatgtatatcactacaaagctcccaaatccccattacactccagaaatcagcacaaaactgaccttaataaactttactctgtcgccaagtggcctggaggatcagctgctaggacaagttgttgctgaagagagaccggacctggaggaggccaagaaccagcttatcatcagtaatgcgaagatgcgccaagagctcaaggatatcgaagatcaaatcctgtataggctgagttctagcgagggtaatccagttgatgacatggaattgattaaagtcctggaagccagtaagatgaaagcagccgaaatccaggctaaggtgcgcatagctgagcagacagagaaggatatagatctgaccagaatggagtacatcccggtggccataagaacccagattctattcttctgtgtgagcgacctcgctaatgtggaccctatgtatcagtacagtctggagtggttcttgaatattttcctgtctggaatcgccaatagtgagcgggctgataatcttaaaaagagaatatcaaacataaaccggtatcttacgtacagcctctattccaatgtgtgtagaagcctgttcgagaaacacaaactaatgtttgctttcctcctctgtgtgcgcattatgatgaatgagggcaaaatcaaccagagcgaatggagatacctactgagtggaggctctatctcaatcatgaccgagaatcctgcccctgactggctgagcgatagggcttggcgggatattcttgcactaagcaacctacccacctttagtagcttcagttctgattttgtgaagcatctgagtgagtttcgggtcatttttgatagcttggagcctcaccgggagccgctgcccggaatctgggatcagtacctggatcagttccaaaaactgctggtgcttcgctgcctgcggggtgacaaggtcaccaacgctatgcaggacttcgtcgcgaccaacctggaacctagattcattgaaccacagacagcaaatctatccgtcgtgttcaaagattctaattccactacaccactgatctttgtgctatcacccggcacagaccccgctgccgatctttataagtttgccgaagagatgaaattttcgaaaaaactgagtgccatttccctcggacagggccaaggcccgcgtgccgaggctatgatgaggtctagcattgagcgcggcaagtgggtcttctttcaaaattgccatcttgcaccctcttggatgccagcactggagcgcttaattgaacacatcaacccagataaagtacaccgagactttagactttggcttacatctttaccaagcaacaagttccccgtgtccatacttcagaacggttcaaaaatgactatcgaacctccacggggcgtcagagccaacctccttaagtcctacagttccctgggcgaggacttcctgaacagttgtcataaggtgatggagttcaagtccttgctgctctccctgtgcttgttccatggaaatgctctggaaagacacaaattcgggcctctgggatttaacattccatatgagttcactgatggtgatctgaggatctgtatttctcagctgaagatgttcctggacgaatacgatgatattccttacaaggttctcaaatatactgctggggaaatcaactacggaggacgggtcacggatgactgggatcgaaggtgtattatgaacattctcgaagacttttataatcccgacgtgctgtctcccgagcattcatacagcgcaagtggaatataccaccaaatccctcctacatacgatctccacggttatttatcatacatcaaaagtttgccactgaacgacatgccagagattttcgggctacacgataatgctaatattacctttgcacagaacgagacatttgcactactcggcactatcattcaactacagcctaagtcatcttctgcagggtctcagggtagagaagagatagtggaggacgtgacgcaaaatattctgttaaaggttcccgagcccattaatcttcagtgggtgatggccaaataccccgtgttgtatgaagagagcatgaacaccgtgctggtccaggaggtgatacgttacaacaggctcttgcaagttattacgcagacattgcaggacttactcaaggccctgaagggattggtcgtgatgtcctcgcagctggaactaatggcagcttctctgtacaataataccgtccccgagctctggtctgccaaagcctacccctcgcttaagcctctgagcagctgggtgatggacctcctccagcggctggatttccttcaggcgtggatccaggacggaattcccgcagttttttggatatctggattcttttttcctcaagcctttctaactgggactctccagaactttgccaggaagttcgtgatatcaattgacaccatctccttcgacttcaaagtgatgtttgaagcaccctcagagctgactcagcggccccaggtagggtgttatatacacggtctgttcttggagggagcacgctgggatccagaagcgtttcagcttgctgagtcccagcccaaagagttgtacactgagatggcagtgatttggctcctccctacgcctaacagaaaagcccaggatcaagatttctacctgtgcccaatttataagactctgactagagcaggtacccttagcaccaccgggcactctacaaattacgtgatcgcagtggaaatcccaacccatcagcctcaacgtcactggatcaaacgaggtgtagccctaatttgcgctttggattactag

SEQ ID NO: 187094 - DNA, 2676 bp, Artificial Sequence
  derived and/or modified sequence
gagaaggacaacgggttggatgtctttaagctcagcgatcgcgattttctgagatctatggaaaacgccatccggtttggcaaaccttgtctgcttgaaaacgtgggcgaggagctggaccccgctcttgagcccgtgcttctgaagcagacttataaacagcaaggcaacacagtgcttaagctgggtgacactgtcattccctaccacgaggattttagaatgtacatcacaactaagctaccgaatccccattatactcccgagattagcacaaagcttacattaattaattttacactaagcccttctggccttgaggaccagctgctcggccaggttgtggcagaagagagacctgatctggaagaggctaagaaccagcttatcatttcaaatgccaagatgcgccaagagctaaaggacatcgaggaccagatcttgtacaggctgtcttcatccgaggggaatcccgtggatgacatggagttgattaaagttctggaagccagcaagatgaaggctgccgaaatccaagctaaggtacgaattgctgaacagacagaaaaagatattgatcttacccgtatggaatatattccagtggccattcggactcaaattctgttcttttgcgtgtccgacctggctaatgtggatccaatgtaccagtactcactcgagtggttcctgaacatctttctgtccggaattgcaaattccgagcgagctgacaacctaaagaagcgaattagtaacatcaacagatatcttacctactctctgtattcaaatgtgtgcaggtcccttttcgaaaagcataagcttatgtttgcttttttactctgtgttcgcataatgatgaacgagggtaagattaatcagtctgagtggcgctatctactgtccggcggatctatctccattatgacggagaacccagcgccagactggctctctgatcgggcttggcgggacatccttgccctgagcaacctacctacattttcaagtttcagttctgacttcgtgaaacacctatccgaattcagggtcatattcgacagcctggagccccaccgtgagcccctgcctgggatctgggatcagtatctggatcagtttcagaagctgttggtgctcaggtgcctgaggggcgacaaggtgacaaacgccatgcaggactttgttgccaccaatctggagcccaggtttattgagcctcagactgctaatctgagtgtggtgtttaaggattccaattctactaccccactgatctttgtgctcagtcccggaacagaccccgctgccgacctgtacaagttcgcagaggagatgaaattctcaaaaaagctcagcgccatctccctgggacagggacaggggccacgcgctgaggctatgatgcgaagctccattgagcgtggtaagtgggtgttcttccagaactgtcatttggccccatcttggatgcctgcgctagagagactgatcgaacacatcaacccagacaaagtccatcgagattttcgcttatggctgacgtccttgccctcgaacaaatttcctgtctccattctccagaatggttcaaagatgaccattgaaccaccacggggagtgagggccaatctgctgaagagctatagcagtttaggagaagactttctgaacagctgtcataaagttatggaatttaaaagcctactgttgtccctctgtctgttccacgggaacgctcttgaacgtcataagtttggtccccttggatttaacatcccatatgaattcaccgatggtgacttgcggatctgcataagccagttaaagatgtttctggatgagtacgacgacatcccctacaaggttttgaagtacacggccggtgagattaactatgggggacgagtgaccgatgattgggaccggcgatgcattatgaatatcctggaagacttttacaacccagatgtgctgtctccagaacacagctacagcgcctcgggcatttatcaccaaattcctccaacctacgaccttcacgggtatctgtcatatattaaatctctccctctgaatgatatgcccgaaatctttggtctgcacgacaatgcaaacatcacatttgcccagaacgagacgttcgcgttgctcggcactatcatccaactgcagccaaagtcctcttcagcgggttcccagggccgtgaggaaattgtcgaagacgttacccagaatatcctgctgaaggtgcccgagcccattaatctccaatgggtcatggctaagtaccccgtgctttacgaggagagcatgaacacagtactggtgcaagaagtcatacgctacaatcggctgttgcaggtaattacccagaccttacaggatttactcaaggccctcaagggcctggtggtcatgtcgtcacagctggagctcatggctgcttctctgtataacaatactgtgcctgaactgtggagcgctaaagcctacccaagcctgaaacctctcagcagttgggtcatggatctgctccagcgtcttgatttcctccaagcctggatccaggacggcatccctgcagtgttctggatcagcggctttttttttccccaggctttcaatcggcacagtgcggaattctgcccccagatttgccacctccattag

SEQ ID NO: 187095 - DNA, 12798 bp, Artificial Sequence
  derived and/or modified sequence
atggaacaacccaatagcaaggggtactcactgggcagaaccccccaggggccagagtgctcaagcgcccctgccgtgcaggtcggcacccatcggggactcgagtataaccccggaaaaattctgcctgggtcggactacggccttggtaatccgcctgctctggatcccaaattacctcatcttccccttcctcccgcacccccaaccctctccgatctggggcaaccacggaagagtccactaactggcaccgataaaaaataccccttgatgaaacagagaggcttctacagcgacatcctgagtcctggcactcttgaccagctcggtgaggtgtgccgaggccctaggatgtcccagaatttgttgcgacaggcagatctggacaagttcactcccagggtcggatctttcgaggtgccggaggacttccaagaacggatggagcaacagtgcattgggtcaacaacaaggctcttggcacagacagactttcccctgcaagcgtacgagccaaagatgcaggtaccttttcaggtgttgcccggacagcatcccaggaaaattgaaattgagcgccgaaaacagcagtatctcagcctggatattgagcaactgctcttctcacagggcatagatagtaataagttgatgccgaggcacttggatcaccagcaccctcagaccatcgagcagggccacgaccctatatttccgatttacctgccccttaaggtgttcgacaacgaagatttcgattgtcgtactcctcgggagtggataaacatgggcttagagcctggctcccttgaccgcaagcccgtgccgggaaaggccctcctgccaacagatgactttctgggccacgaagatccaaaaagccaaaagctcaaatataagtggtgtgaggttggtgtgctggattacgatgaggaaaagaagctctacttagtgcataagaccgatgagaaggggctggttcgtgacgagatgggtaggcctatcttgaatgccggagtaaccaccgagggaaggccccctctgcaagtgtgccagtattgggtcccacggatccaactgctgttttgcgcggaggatccgtgcatgttcgctcaacgggttgtccaggccaatgctctgcgcaagaataccgaagctctgctactgtacaatttatatgtcgattgcatgccatccgatggccagcacgtgatctcagagcagtcactgtcgaagatcaaacagtgggctctcagtaccccgaggatgagaaagggaccatctgttctggaacatctgtcatccttggcgcgagaagtctctttggattacgaaaggtcaatgaataagatcaacttcgaccatgtggtcagtagcaagcccgagactttcagctacgtgactctgcccaagaaagaggaggaacaagtcccagagagggggttagtaagtgtgcccaaatatcacttttgggagcagaaggaggatttcacattcgtttctcttctcacgcgcccagaagtgatcactgcactaagtaaggtgcgggctgagtgcaacaaagtgacggccatgtccctttttcactcctctctgtccaagtactcacatctggaggagttcgaacagattcagtctcagacttttagccaggtgcagatgtttctgaaagattcttggatctcatcgctcaaggtcgcaatgagatcaagtctccgggacatgtcaaaaggttggtacaacctgtacgagactaactgggaggtctatctcatgtcaaaattaagaaaacttatggaactcgttaaatacatgctccaagatacacttcgcttcctagttcaggattccttggctagtttttcacaatttatcagtgatacatgctgctctgtgctgaattgcacagatgacatggtctggggggacgatctgataaactctccctacaggcccaggaagaacccattgtttattatggatctggttctggacagtagcggggtccactacagcactcctcttgaacagtttgaggcatcccttctgaacttatttgataaaggcatccttgccactcacgcagtgccacagctagagaaactcgttatggaagacatctttatttccggagacccattactcgaatccgttggattgcacgagccactggttgaggagctacgggctacaatagctagcgccgtttcaaaggctatgatcccgctgcaagcctacgcaaaagaatatcggaagtatttggaactgaacaacaacgatattgcttcattccttaaaacttatcagacgcagggactgttggcccaagaagtccgcgaggtagttctaacacacctgagagaaaaagagatcttggactctagtctgccaagttctattattatcgggcctttttatattaacactgataatgttaaacagtctcttagcaagaagcggaaagccttggccactagcgtgctagatatactggcaaagaacttacacaaggaggtggactccatctgcgaagagtttagatccatctcaaggaaaatatatgaaaaaccgaattcaattgaagaactcgcggagttgagggaatggatgaagggcatacccgaacgcctcgtcggcctcgaagaaaggatagtgaaagtgatggatgattaccaggttatggacgaatttctgtataatctctcttcagacgacttcaacgacaagtggatcgcttccaactggcctagcaagatcctgggtcagatagaactggtgcagcaacagcatgtggaagacgaggagaagtttagaaagatacagatcatggatcagaataatttccaggaaaaactggaaggactccagctggtggtcgccggatttagtatacacgttgagatcagtagagcccacgagatcgctaacgaggttcgccgtgtcaagaagcagctgaaggattgtcagcaactggccatgttgtacaacaatcgcgaaagaattttttccctgcctatcaccaactatgataagctgtcacgaatggtgaaggaattccaaccctacctggacctgtggaccactgccagcgattggttacgctggtcagagagttggatgaacgacccgttaagcgccatcgatgctgagcagctggagaaaaacgttgtggaagcttttaaaacaatgcacaagtgcgttaagcagttcaaagatatgcctgcatgccaggaggttgcacttgatattagagccaggatagaagaattcaagccttacatccctctgatccagggcctacggaatccaggcatgcgtatacggcattgggagaccctgagcaaccagataaatatcaatgtgaggccaaaggccaatctaacgttcgccaggtgcctcgagatgaatctccaggaccacattgaatctattagcaaagtcgccgaggtggcaggcaaggaatacgccattgaacaggccctcgataagatggaaaaggaatggtcaactatcctgttcaatgtgctgccatataaagccacagacacctatatcctcaaatcacccgacgaagcctcccaactgcttgatgaccatatagtaatgacacagaatatgagtttttctccttataagaagccttttgagcagcggattaactcatgggaaaataaattaaagcttacgcaggaagtcctggaagaatggttaaactgccagcggtcttggctttatttggagcctattttctccagcgaggatatcaatcagcagctgcctgtcgagtccaagcgctatcaaacaatggagaggatctggaaaaagataatgaaaaatgcttacgagaatagggaagttataaacgtttgtagcgacctgaggatgctggattccctgcgcgactgtaataagatcctcgatttagtccaaaagggcttaagcgaatacttagaaaccaagcggtcggcctttcctcgcttctactttttgtctgatgatgagctcctggaaattctgtctcagactaaggatcccaccgcagtccagccacaccttcggaagtgcttcgaaaatatcgctcgtttgctattccaggaggaccttgagatcacgcacatgtactccgccgaaggagaggaggttcagttatgctttagtatctaccccagcagcaacgtagaagattggctgcgggaggtggagcgctccatgaaagcttccgtgcatgacatcattgaaaaggcaattagggcttaccctactatgcctcgcacccaatgggttcttaattggccaggccaggtcacaattgcgggatgtcagacatactggactatggaggtggccgaagccctggaggctggcaacctgcgttcgcagttgtttcctcagctgtgccagcagctgtcggatctcgttgccctggttcggggaaaacttagtaggatgcagcgcgcagttctgtcagctctgatcgtgatcgaagtccatgccaaagatgtcgtatctaagctaatccaggagaatgtagtcagtgtgaatgatttccagtggatctctcagctgcggtactactggacaaacaacgacctgtacatcagggctgtcaacgcggagttcatttatgggtacgaatatctcggaaacagtgggcgtctcgtgattaccccattgaccgatagatgttacctgacactgaccggtgctctccatctgaaatttggcggagcgcctgctggccctgcaggaaccggcaaaacagagacaactaaggacctcggcaaggcactggccattcaaactgtcgtctttaattgctcagatcagttagactttatggcaatgggcaagttctttaagggactcgccagcgcgggagcctgggcttgtttcgatgagttcaaccgcatagacatcgaagtactctctgtggtggcccaacaaatcacaactattcaaaaagctcagcagcaacgcgtggagcgctttatgtttgagggtgtggaaataccacttgtgccgtcgtgtgcagtcttcatcaccatgaaccctgggtatgccggtaggactgaactccctgataatctcaaagctctgttccggcctgtcgcaatgatggtgccggactatgcgatgattaccgaaatcagcctgtactcttttgggttcaatgaagcgagcgtcctcgcgaagaaaattaccactacattcaaactatccagtgagcaactcagcagtcaggatcactacgactttggcatgagggccgtcaagaccgtcattagcgccgcagggaatctgaagagagagaacccttcgatgaacgaggaactgatttgccttagggcaatacgggatgtcaatgttcccaagtttctgcaggaagacttaaagttattttccggcatcgtatctgacctgttccctacaatcaaagaagaggacactgattacgggatcctcgacgaagccattcgtgaagcctgccgtaattctaatcttaaggacgtcgaaggattcctgacaaaatgtatacagctctacgaaaccaccgtcgttaggcacggattgatgttggtgggaccaacaggctcgggcaaaagcacctgctacagggttctcgccgctgcgatgacatcattgaagggccagccaagtatatctggaggcatgtacgaagccgtaaactactacgttctgaatcctaaatccataaccatgggtcagctgtatggcgaatttgaccttctgacccatgaatggacggacggaatcttctctagctttatccgggcaggggctatcacaagcgacacaaataagaaatggtatatgttcgacggacccgttgacgcaatttggatcgaaaatatgaataccgttcttgacgataacaagaaactctgtctctctagtggggaaattatcaagctaacagaggcgatgacgatgatgtttgaggtgcaagatctggcggttgcatctcccgctaccgtgtctaggtgcggcatggtttacctggagcctagtatcctgggtttgatgcccttcattgagtgctggcttagaaagctgcctcctctgctcaaaccttatgaagaacacttcaaagctctgttcgtttcctttttagaagagtcaatttcttttgtgaggtcatctgtcaaagaggtgattgcctctacaaattgtaatctcacaatgtcactcctgaagctactcgactgtttcttcaagcctttcctgcctagagagggtctcaagaagattccatcagagaaacttagcagaattgtcgaattgatcgagccatggtttatattctcccttatctggtccgtgggtgcgaccggggacagttcaggcagaacaagttttagccactggctgcggctgaagatggagaatgagcagctcactctgttgttcccggaagaggggttagtgttcgactatcgcttggaggatgcgggtataagcggcactaacgacagcgaggacgaagaagaagagtacaagcaggttgcttgggtcaagtggatggactctagtgccccttttactatggtgccggatacgaactattgtaacatcattgtacccaccatggacacagtccagatgtctcacctgctggacatgctgctcacaaataagaagccggtgctttgcatcggtccaaccggtaccggcaagaccctcaccatttcagataaactgctaaagaatttggccctggattatatttcacatttcctgacattttctgcaagaacgtccgccaaccaaactcaggatttcattgatagcaaactggataagaggcggaaaggggtgtttggaccccctcttgggcgaaactttatttttttcatcgacgatctcaatatgcctgcgctggagacctatggcgctcagccccctatcgagctactgaggcaatggatggatcacggaggctggtatgaccgtaagattatcggcgctttcaaaaacctcgtggatatcaattttgtttgtgccatgggcccacccggagggggtcgaaatacagtaacacccaggttgatgcgacacttcaattacctgagcttcgcagaaatggacgaagtaagcaagaagcgcatcttttctaccatcctgggtaactggctggacggactgttgggcgaaaagtcctatagggaacgcgtccctggggctccccatattgcacattttaccgagcccttggtggaggcaacaattatggtatacgccaccattaccagccagctccttccaactccagctaagtctcactacacatttaatctgagagatctgagcaaagtgttccagggcatgctaatggccgatcccgcaaaggtcgaggatcaagtgcaactactgcggctttggtatcatgagaattgccgagtgttcagggaccggctggtcaatgaagaagacaggtcatggttcgatcagttgttaaagagatgcatggagcagtgggaagtgacatttaacaaagtctgtcctttccagcctatactttacggggacttcatgagccccggtagcgatgtaaagtcatacgagctgataaccagcgagtcaaagatgatgcaggtcatcgaagaatacattgaggattataatcagatcaataccgcaaagttgaagctagtgctgtttatggacgctatgtcgcatatttgccgaatttccagaactctgagacaggctttgggcaatgccctcttgctgggtgtgggcggtagcggcaggtcgagcttaacacgcctggcttcccacatggcagaatacgagtgtttccaaattgagctctccaagaattatggtatgagcgagtggagggacgatgtgaagaaagtacttctcaaagctggcctgcagaacctgcccatcacattcctgttttccgacacccagattaaaaacgagagctttctcgaggacatcaacaatgttctcaactctggtgacattcctaacctctataccgcagacgagcaggatcagatcgtgtctacaatgcgaccctatatccaagagcaggggctgcagccgaccaaagctaatctaatggcagcttatactggacgggtgcgcagcaacattcatatggttctgtgtatgtcccccatcggcgaggttttcagggccaggttgaggcagttcccatccctggtcaattgctgtactattgattggttcaatgagtggccagctgaggctctgaagtccgtcgctaccgtgttcctcaacgagattccggagctggaatcttcccaggaggagatccaagggcttatccaggtgtgtgtctatattcatcaatcagtaagcaaaaaatgtattgagtacttggccgaattgaccagacataactatgttacacccaagtcctatctcgaactcctgcatatttttagtatcctcatcggccagaagaaactagaactcaagaccgctaaaaaccgtatgaagagcgggctcgacaagctcttgcggaccagtgaggatgttgccaagatgcaggaggatctcgagtctatgcatccactgctggaagaagctgcaaaggatactatgctgaccatggaacaaataaaggtagacacagcaatcgcagaggaaacacggaactctgttcagacagaggaaataaaagcaaatgaaaaagccaaaaaggcacaggcaattgccgacgatgcccagaaggatctcgatgaggcattgccagctttggacgctgcgctcgcaagtctgcgcaatctgaacaaaaacgatgtgactgaagtccgagcgatgcagcggccacctcctggagtgaaactggttatcgaggccgtttgtattatgaaaggcatcaagcctaaaaaggtgcctggggagaaacccggaacaaaggtggatgattattgggagccaggaaagggtttgctacaggacccaggacactttctggaatctctgttcaagtttgataaggataatatcggggacgtggtgatcaaggctatccagccttacatcgataacgaggaattccaacctgctacaatagccaaggtatcgaaagcctgcacttccatctgccagtgggtaagggcgatgcataaataccattttgttgcgaaagccgttgagcccaagaggcaggcgctgttggaggctcaagatgatctgggagtaacacagcggattctcgatgaggccaagcaaaggttgcgggaggtggaggatgggattgccaccatgcaggccaaatacagggaatgcatcacgaaaaaggaagaacttgaacttaagtgcgagcagtgcgaacaaagactcgggagagctggaaagctgattaacggcctgtctgacgagaaagtgcggtggcaagaaacagtggagaatcttcagtatatgctaaataatatatccggggatgtgttagttgccgcaggctttgtggcatacctgggtcctttcacaggacagtatagaactgtgctgtatgattcatgggtgaagcaacttcgatctcacaatgttccccacacaagtgagcccactcttatcggaacactcggtaatcctgttaagatacggtcctggcagattgcagggctgcctaatgacacgctctccgtcgaaaatggtgtgattaatcagtttagtcagcgctggacacatttcatcgacccacaatctcaggccaataagtggatcaagaatatggaaaaagacaatggcttagatgtgtttaagttgtccgatagagactttctcagaagcatggagaacgccatccgttttgggaaaccctgcttgcttgagaatgttggagaggagctggaccccgctctggagcctgtgcttctgaaacagacctacaaacagcagggtaatacagttttgaagctgggcgataccgtgatcccctatcatgaggactttagaatgtacatcaccacgaagctgcctaacccacattatacgcctgaaatcagcacaaagcttacactgatcaacttcaccctgagcccaagtggactcgaagaccagttgttgggacaggtggtagccgaggagcgacctgacctagaagaggccaaaaatcagttgatcatttccaatgctaaaatgcggcaagagcttaaagatatagaggatcagattctctaccgccttagttcctcagaagggaatccagtggacgatatggagctgatcaaagtgctggaggccagtaaaatgaaggcggcagaaattcaggctaaagtgagaatcgcggagcaaaccgaaaaagatatcgatctgacccgaatggaatatattccggtggctatccgtacccagatactgtttttctgcgtttcggacctcgccaacgtggatccaatgtaccaatacagtctggaatggttcctgaacatcttcttatctggcattgccaatagcgagcgcgctgataatctgaagaagcggatctcaaatataaacagatatctaacatattctctctacagcaacgtgtgccgcagcctgttcgaaaaacacaaattaatgttcgcatttctcttgtgtgtgagaatcatgatgaatgagggcaagattaaccagagtgagtggcgctatctgttgagcggagggtctatttctatcatgaccgagaatcctgcacccgattggctctcagatcgagcatggagagacattctggcattatccaatttacccactttcagtagctttagttctgacttcgtgaagcacctgagtgagtttagggtcatatttgactccctcgagcctcacagagagcccttaccaggcatttgggaccagtacctggatcaatttcagaaactgcttgtgttgcggtgcttaagaggggacaaggttacaaatgcaatgcaggatttcgtcgccaccaacctagagccacgtttcatagaaccacagaccgcgaacttaagcgtggtgtttaaagactccaactcaaccacgccactaatctttgtacttagtccaggaacagatcccgctgccgacttatataagtttgcagaagaaatgaagttctccaagaaactgtctgctattagtctgggacagggtcagggacctcgagcagaagcaatgatgcgctcctcaatcgaacggggaaaatgggtgttcttccagaattgccacctcgcaccgagttggatgcctgcactggagaggctgattgagcatatcaacccagataaagtccaccgggacttccgcctgtggttgaccagcctcccatccaataagtttcctgtgagtatcttgcagaacggatccaaaatgacgatcgagcccccacgcggtgtccgagcgaacctgctaaagagctacagcagcctcggggaagattttctcaacagttgccataaggtgatggaatttaaatcactacttctttctctctgcctctttcacgggaacgctctggagcgccataagtttgggccactcggtttcaacattccatacgaatttactgacggcgatctcaggatttgtatatcacagctgaagatgtttttagacgagtacgatgacattccttacaaagtactgaaatatacggccggtgagataaactacgggggtcgtgttacagacgactgggacaggcgctgcataatgaatatcctagaggatttctacaaccccgatgttctgtcccccgagcatagctattccgcctctggtatctatcaccagattccaccaacctatgacctgcacggatatctgtcctacatcaaatcactccccctcaatgatatgccagagatcttcgggctccacgacaacgcaaacattactttcgctcaaaacgagacttttgcactgctgggcacgataatccaactgcagccaaagagttccagtgcgggttctcagggacgcgaggagatcgtggaagatgtaacgcagaatatcctgcttaaggtcccagagccgatcaacctccagtgggttatggcaaagtacccagttctttacgaagagagcatgaatacagtactcgtccaggaggtcattcggtataaccggttgttgcaagtcatcacacaaacattgcaggacctcctgaaggccctgaagggcctggtggtcatgagctcccagctggagctgatggccgcatctctctataacaataccgtgcccgagttgtggtcggctaaggcctatccctctctgaagcctctttcaagctgggtaatggatctcctgcagcggctggactttctacaagcctggatacaggacgggatacccgctgtgttctggatttccggcttcttttttccccaagcctttctcactggtactctccagaatttcgccaggaagtttgtcatctccattgacactatctcctttgactttaaggtcatgttcgaagcaccctctgaacttactcagcgaccacaggtgggctgttatatacatggcctattcctcgaaggcgctagatgggaccctgaggccttccagctggccgagtcacagcctaaagagctgtacaccgaaatggccgtcatctggctgctgcccactccaaacagaaaggcccaggatcaagatttctacctttgccccatctacaaaacactgacgcgcgctgggaccttgagtaccacgggtcatagtaccaactatgtcatcgcagtagagatcccaacccaccagccacagcggcattggatcaagcgaggcgtagcgctgatatgcgccctcgattactac

SEQ ID NO: 187096 - DNA, 2676 bp, Artificial Sequence
  derived and/or modified sequence
gagaaggacaacggcctggacgtgttcaagctgagcgacagagacttcctgagaagcatggagaacgccatcagattcggcaagccctgcctgctggagaacgtgggcgaggagctggaccccgccctggagcccgtgctgctgaagcagacctacaagcagcagggcaacaccgtgctgaagctgggcgacaccgtgatcccctaccacgaggacttcagaatgtacatcaccaccaagctgcccaacccccactacacccccgagatcagcaccaagctgaccctgatcaacttcaccctgagccccagcggcctggaggaccagctgctgggccaggtggtggccgaggagagacccgacctggaggaggccaagaaccagctgatcatcagcaacgccaagatgagacaggagctgaaggacatcgaggaccagatcctgtacagactgagcagcagcgagggcaaccccgtggacgacatggagctgatcaaggtgctggaggccagcaagatgaaggccgccgagatccaggccaaggtgagaatcgccgagcagaccgagaaggacatcgacctgaccagaatggagtacatccccgtggccatcagaacccagatcctgttcttctgcgtgagcgacctggccaacgtggaccccatgtaccagtacagcctggagtggttcctgaacatcttcctgagcggcatcgccaacagcgagagagccgacaacctgaagaagagaatcagcaacatcaacagatacctgacctacagcctgtacagcaacgtgtgcagaagcctgttcgagaagcacaagctgatgttcgccttcctgctgtgcgtgagaatcatgatgaacgagggcaagatcaaccagagcgagtggagatacctgctgagcggcggcagcatcagcatcatgaccgagaaccccgcccccgactggctgagcgacagagcctggagagacatcctggccctgagcaacctgcccaccttcagcagcttcagcagcgacttcgtgaagcacctgagcgagttcagagtgatcttcgacagcctggagccccacagagagcccctgcccggcatctgggaccagtacctggaccagttccagaagctgctggtgctgagatgcctgagaggcgacaaggtgaccaacgccatgcaggacttcgtggccaccaacctggagcccagattcatcgagccccagaccgccaacctgagcgtggtgttcaaggacagcaacagcaccacccccctgatcttcgtgctgagccccggcaccgaccccgccgccgacctgtacaagttcgccgaggagatgaagttcagcaagaagctgagcgccatcagcctgggccagggccagggccccagagccgaggccatgatgagaagcagcatcgagagaggcaagtgggtgttcttccagaactgccacctggcccccagctggatgcccgccctggagagactgatcgagcacatcaaccccgacaaggtgcacagagacttcagactgtggctgaccagcctgcccagcaacaagttccccgtgagcatcctgcagaacggcagcaagatgaccatcgagccccccagaggcgtgagagccaacctgctgaagagctacagcagcctgggcgaggacttcctgaacagctgccacaaggtgatggagttcaagagcctgctgctgagcctgtgcctgttccacggcaacgccctggagagacacaagttcggccccctgggcttcaacatcccctacgagttcaccgacggcgacctgagaatctgcatcagccagctgaagatgttcctggacgagtacgacgacatcccctacaaggtgctgaagtacaccgccggcgagatcaactacggcggcagagtgaccgacgactgggacagaagatgcatcatgaacatcctggaggacttctacaaccccgacgtgctgagccccgagcacagctacagcgccagcggcatctaccaccagatcccccccacctacgacctgcacggctacctgagctacatcaagagcctgcccctgaacgacatgcccgagatcttcggcctgcacgacaacgccaacatcaccttcgcccagaacgagaccttcgccctgctgggcaccatcatccagctgcagcccaagagcagcagcgccggcagccagggcagagaggagatcgtggaggacgtgacccagaacatcctgctgaaggtgcccgagcccatcaacctgcagtgggtgatggccaagtaccccgtgctgtacgaggagagcatgaacaccgtgctggtgcaggaggtgatcagatacaacagactgctgcaggtgatcacccagaccctgcaggacctgctgaaggccctgaagggcctggtggtgatgagcagccagctggagctgatggccgccagcctgtacaacaacaccgtgcccgagctgtggagcgccaaggcctaccccagcctgaagcccctgagcagctgggtgatggacctgctgcagagactggacttcctgcaggcctggatccaggacggcatccccgccgtgttctggatcagcggcttcttcttcccccaggccttcaacagacacagcgccgagttctgcccccagatctgccacctgcactag

SEQ ID NO: 187097 - DNA, 12798 bp, Artificial Sequence
  derived and/or modified sequence
atggagcagcccaacagcaagggctacagcctgggcagaaccccccagggccccgagtgcagcagcgcccccgccgtgcaggtgggcacccacagaggcctggagtacaaccccggcaagatcctgcccggcagcgactacggcctgggcaacccccccgccctggaccccaagctgccccacctgcccctgccccccgccccccccaccctgagcgacctgggccagcccagaaagagccccctgaccggcaccgacaagaagtaccccctgatgaagcagagaggcttctacagcgacatcctgagccccggcaccctggaccagctgggcgaggtgtgcagaggccccagaatgagccagaacctgctgagacaggccgacctggacaagttcacccccagagtgggcagcttcgaggtgcccgaggacttccaggagagaatggagcagcagtgcatcggcagcaccaccagactgctggcccagaccgacttccccctgcaggcctacgagcccaagatgcaggtgcccttccaggtgctgcccggccagcaccccagaaagatcgagatcgagagaagaaagcagcagtacctgagcctggacatcgagcagctgctgttcagccagggcatcgacagcaacaagctgatgcccagacacctggaccaccagcacccccagaccatcgagcagggccacgaccccatcttccccatctacctgcccctgaaggtgttcgacaacgaggacttcgactgcagaacccccagagagtggatcaacatgggcctggagcccggcagcctggacagaaagcccgtgcccggcaaggccctgctgcccaccgacgacttcctgggccacgaggaccccaagagccagaagctgaagtacaagtggtgcgaggtgggcgtgctggactacgacgaggagaagaagctgtacctggtgcacaagaccgacgagaagggcctggtgagagacgagatgggcagacccatcctgaacgccggcgtgaccaccgagggcagaccccccctgcaggtgtgccagtactgggtgcccagaatccagctgctgttctgcgccgaggacccctgcatgttcgcccagagagtggtgcaggccaacgccctgagaaagaacaccgaggccctgctgctgtacaacctgtacgtggactgcatgcccagcgacggccagcacgtgatcagcgagcagagcctgagcaagatcaagcagtgggccctgagcacccccagaatgagaaagggccccagcgtgctggagcacctgagcagcctggccagagaggtgagcctggactacgagagaagcatgaacaagatcaacttcgaccacgtggtgagcagcaagcccgagaccttcagctacgtgaccctgcccaagaaggaggaggagcaggtgcccgagagaggcctggtgagcgtgcccaagtaccacttctgggagcagaaggaggacttcaccttcgtgagcctgctgaccagacccgaggtgatcaccgccctgagcaaggtgagagccgagtgcaacaaggtgaccgccatgagcctgttccacagcagcctgagcaagtacagccacctggaggagttcgagcagatccagagccagaccttcagccaggtgcagatgttcctgaaggacagctggatcagcagcctgaaggtggccatgagaagcagcctgagagacatgagcaagggctggtacaacctgtacgagaccaactgggaggtgtacctgatgagcaagctgagaaagctgatggagctggtgaagtacatgctgcaggacaccctgagattcctggtgcaggacagcctggccagcttcagccagttcatcagcgacacctgctgcagcgtgctgaactgcaccgacgacatggtgtggggcgacgacctgatcaacagcccctacagacccagaaagaaccccctgttcatcatggacctggtgctggacagcagcggcgtgcactacagcacccccctggagcagttcgaggccagcctgctgaacctgttcgacaagggcatcctggccacccacgccgtgccccagctggagaagctggtgatggaggacatcttcatcagcggcgaccccctgctggagagcgtgggcctgcacgagcccctggtggaggagctgagagccaccatcgccagcgccgtgagcaaggccatgatccccctgcaggcctacgccaaggagtacagaaagtacctggagctgaacaacaacgacatcgccagcttcctgaagacctaccagacccagggcctgctggcccaggaggtgagagaggtggtgctgacccacctgagagagaaggagatcctggacagcagcctgcccagcagcatcatcatcggccccttctacatcaacaccgacaacgtgaagcagagcctgagcaagaagagaaaggccctggccaccagcgtgctggacatcctggccaagaacctgcacaaggaggtggacagcatctgcgaggagttcagaagcatcagcagaaagatctacgagaagcccaacagcatcgaggagctggccgagctgagagagtggatgaagggcatccccgagagactggtgggcctggaggagagaatcgtgaaggtgatggacgactaccaggtgatggacgagttcctgtacaacctgagcagcgacgacttcaacgacaagtggatcgccagcaactggcccagcaagatcctgggccagatcgagctggtgcagcagcagcacgtggaggacgaggagaagttcagaaagatccagatcatggaccagaacaacttccaggagaagctggagggcctgcagctggtggtggccggcttcagcatccacgtggagatcagcagagcccacgagatcgccaacgaggtgagaagagtgaagaagcagctgaaggactgccagcagctggccatgctgtacaacaacagagagagaatcttcagcctgcccatcaccaactacgacaagctgagcagaatggtgaaggagttccagccctacctggacctgtggaccaccgccagcgactggctgagatggagcgagagctggatgaacgaccccctgagcgccatcgacgccgagcagctggagaagaacgtggtggaggccttcaagaccatgcacaagtgcgtgaagcagttcaaggacatgcccgcctgccaggaggtggccctggacatcagagccagaatcgaggagttcaagccctacatccccctgatccagggcctgagaaaccccggcatgagaatcagacactgggagaccctgagcaaccagatcaacatcaacgtgagacccaaggccaacctgaccttcgccagatgcctggagatgaacctgcaggaccacatcgagagcatcagcaaggtggccgaggtggccggcaaggagtacgccatcgagcaggccctggacaagatggagaaggagtggagcaccatcctgttcaacgtgctgccctacaaggccaccgacacctacatcctgaagagccccgacgaggccagccagctgctggacgaccacatcgtgatgacccagaacatgagcttcagcccctacaagaagcccttcgagcagagaatcaacagctgggagaacaagctgaagctgacccaggaggtgctggaggagtggctgaactgccagagaagctggctgtacctggagcccatcttcagcagcgaggacatcaaccagcagctgcccgtggagagcaagagataccagaccatggagagaatctggaagaagatcatgaagaacgcctacgagaacagagaggtgatcaacgtgtgcagcgacctgagaatgctggacagcctgagagactgcaacaagatcctggacctggtgcagaagggcctgagcgagtacctggagaccaagagaagcgccttccccagattctacttcctgagcgacgacgagctgctggagatcctgagccagaccaaggaccccaccgccgtgcagccccacctgagaaagtgcttcgagaacatcgccagactgctgttccaggaggacctggagatcacccacatgtacagcgccgagggcgaggaggtgcagctgtgcttcagcatctaccccagcagcaacgtggaggactggctgagagaggtggagagaagcatgaaggccagcgtgcacgacatcatcgagaaggccatcagagcctaccccaccatgcccagaacccagtgggtgctgaactggcccggccaggtgaccatcgccggctgccagacctactggaccatggaggtggccgaggccctggaggccggcaacctgagaagccagctgttcccccagctgtgccagcagctgagcgacctggtggccctggtgagaggcaagctgagcagaatgcagagagccgtgctgagcgccctgatcgtgatcgaggtgcacgccaaggacgtggtgagcaagctgatccaggagaacgtggtgagcgtgaacgacttccagtggatcagccagctgagatactactggaccaacaacgacctgtacatcagagccgtgaacgccgagttcatctacggctacgagtacctgggcaacagcggcagactggtgatcacccccctgaccgacagatgctacctgaccctgaccggcgccctgcacctgaagttcggcggcgcccccgccggccccgccggcaccggcaagaccgagaccaccaaggacctgggcaaggccctggccatccagaccgtggtgttcaactgcagcgaccagctggacttcatggccatgggcaagttcttcaagggcctggccagcgccggcgcctgggcctgcttcgacgagttcaacagaatcgacatcgaggtgctgagcgtggtggcccagcagatcaccaccatccagaaggcccagcagcagagagtggagagattcatgttcgagggcgtggagatccccctggtgcccagctgcgccgtgttcatcaccatgaaccccggctacgccggcagaaccgagctgcccgacaacctgaaggccctgttcagacccgtggccatgatggtgcccgactacgccatgatcaccgagatcagcctgtacagcttcggcttcaacgaggccagcgtgctggccaagaagatcaccaccaccttcaagctgagcagcgagcagctgagcagccaggaccactacgacttcggcatgagagccgtgaagaccgtgatcagcgccgccggcaacctgaagagagagaaccccagcatgaacgaggagctgatctgcctgagagccatcagagacgtgaacgtgcccaagttcctgcaggaggacctgaagctgttcagcggcatcgtgagcgacctgttccccaccatcaaggaggaggacaccgactacggcatcctggacgaggccatcagagaggcctgcagaaacagcaacctgaaggacgtggagggcttcctgaccaagtgcatccagctgtacgagaccaccgtggtgagacacggcctgatgctggtgggccccaccggcagcggcaagagcacctgctacagagtgctggccgccgccatgaccagcctgaagggccagcccagcatcagcggcggcatgtacgaggccgtgaactactacgtgctgaaccccaagagcatcaccatgggccagctgtacggcgagttcgacctgctgacccacgagtggaccgacggcatcttcagcagcttcatcagagccggcgccatcaccagcgacaccaacaagaagtggtacatgttcgacggccccgtggacgccatctggatcgagaacatgaacaccgtgctggacgacaacaagaagctgtgcctgagcagcggcgagatcatcaagctgaccgaggccatgaccatgatgttcgaggtgcaggacctggccgtggccagccccgccaccgtgagcagatgcggcatggtgtacctggagcccagcatcctgggcctgatgcccttcatcgagtgctggctgagaaagctgccccccctgctgaagccctacgaggagcacttcaaggccctgttcgtgagcttcctggaggagagcatcagcttcgtgagaagcagcgtgaaggaggtgatcgccagcaccaactgcaacctgaccatgagcctgctgaagctgctggactgcttcttcaagcccttcctgcccagagagggcctgaagaagatccccagcgagaagctgagcagaatcgtggagctgatcgagccctggttcatcttcagcctgatctggagcgtgggcgccaccggcgacagcagcggcagaaccagcttcagccactggctgagactgaagatggagaacgagcagctgaccctgctgttccccgaggagggcctggtgttcgactacagactggaggacgccggcatcagcggcaccaacgacagcgaggacgaggaggaggagtacaagcaggtggcctgggtgaagtggatggacagcagcgcccccttcaccatggtgcccgacaccaactactgcaacatcatcgtgcccaccatggacaccgtgcagatgagccacctgctggacatgctgctgaccaacaagaagcccgtgctgtgcatcggccccaccggcaccggcaagaccctgaccatcagcgacaagctgctgaagaacctggccctggactacatcagccacttcctgaccttcagcgccagaaccagcgccaaccagacccaggacttcatcgacagcaagctggacaagagaagaaagggcgtgttcggcccccccctgggcagaaacttcatcttcttcatcgacgacctgaacatgcccgccctggagacctacggcgcccagccccccatcgagctgctgagacagtggatggaccacggcggctggtacgacagaaagatcatcggcgccttcaagaacctggtggacatcaacttcgtgtgcgccatgggcccccccggcggcggcagaaacaccgtgacccccagactgatgagacacttcaactacctgagcttcgccgagatggacgaggtgagcaagaagagaatcttcagcaccatcctgggcaactggctggacggcctgctgggcgagaagagctacagagagagagtgcccggcgccccccacatcgcccacttcaccgagcccctggtggaggccaccatcatggtgtacgccaccatcaccagccagctgctgcccacccccgccaagagccactacaccttcaacctgagagacctgagcaaggtgttccagggcatgctgatggccgaccccgccaaggtggaggaccaggtgcagctgctgagactgtggtaccacgagaactgcagagtgttcagagacagactggtgaacgaggaggacagaagctggttcgaccagctgctgaagagatgcatggagcagtgggaggtgaccttcaacaaggtgtgccccttccagcccatcctgtacggcgacttcatgagccccggcagcgacgtgaagagctacgagctgatcaccagcgagagcaagatgatgcaggtgatcgaggagtacatcgaggactacaaccagatcaacaccgccaagctgaagctggtgctgttcatggacgccatgagccacatctgcagaatcagcagaaccctgagacaggccctgggcaacgccctgctgctgggcgtgggcggcagcggcagaagcagcctgaccagactggccagccacatggccgagtacgagtgcttccagatcgagctgagcaagaactacggcatgagcgagtggagagacgacgtgaagaaggtgctgctgaaggccggcctgcagaacctgcccatcaccttcctgttcagcgacacccagatcaagaacgagagcttcctggaggacatcaacaacgtgctgaacagcggcgacatccccaacctgtacaccgccgacgagcaggaccagatcgtgagcaccatgagaccctacatccaggagcagggcctgcagcccaccaaggccaacctgatggccgcctacaccggcagagtgagaagcaacatccacatggtgctgtgcatgagccccatcggcgaggtgttcagagccagactgagacagttccccagcctggtgaactgctgcaccatcgactggttcaacgagtggcccgccgaggccctgaagagcgtggccaccgtgttcctgaacgagatccccgagctggagagcagccaggaggagatccagggcctgatccaggtgtgcgtgtacatccaccagagcgtgagcaagaagtgcatcgagtacctggccgagctgaccagacacaactacgtgacccccaagagctacctggagctgctgcacatcttcagcatcctgatcggccagaagaagctggagctgaagaccgccaagaacagaatgaagagcggcctggacaagctgctgagaaccagcgaggacgtggccaagatgcaggaggacctggagagcatgcaccccctgctggaggaggccgccaaggacaccatgctgaccatggagcagatcaaggtggacaccgccatcgccgaggagaccagaaacagcgtgcagaccgaggagatcaaggccaacgagaaggccaagaaggcccaggccatcgccgacgacgcccagaaggacctggacgaggccctgcccgccctggacgccgccctggccagcctgagaaacctgaacaagaacgacgtgaccgaggtgagagccatgcagagacccccccccggcgtgaagctggtgatcgaggccgtgtgcatcatgaagggcatcaagcccaagaaggtgcccggcgagaagcccggcaccaaggtggacgactactgggagcccggcaagggcctgctgcaggaccccggccacttcctggagagcctgttcaagttcgacaaggacaacatcggcgacgtggtgatcaaggccatccagccctacatcgacaacgaggagttccagcccgccaccatcgccaaggtgagcaaggcctgcaccagcatctgccagtgggtgagagccatgcacaagtaccacttcgtggccaaggccgtggagcccaagagacaggccctgctggaggcccaggacgacctgggcgtgacccagagaatcctggacgaggccaagcagagactgagagaggtggaggacggcatcgccaccatgcaggccaagtacagagagtgcatcaccaagaaggaggagctggagctgaagtgcgagcagtgcgagcagagactgggcagagccggcaagctgatcaacggcctgagcgacgagaaggtgagatggcaggagaccgtggagaacctgcagtacatgctgaacaacatcagcggcgacgtgctggtggccgccggcttcgtggcctacctgggccccttcaccggccagtacagaaccgtgctgtacgacagctgggtgaagcagctgagaagccacaacgtgccccacaccagcgagcccaccctgatcggcaccctgggcaaccccgtgaagatcagaagctggcagatcgccggcctgcccaacgacaccctgagcgtggagaacggcgtgatcaaccagttcagccagagatggacccacttcatcgacccccagagccaggccaacaagtggatcaagaacatggagaaggacaacggcctggacgtgttcaagctgagcgacagagacttcctgagaagcatggagaacgccatcagattcggcaagccctgcctgctggagaacgtgggcgaggagctggaccccgccctggagcccgtgctgctgaagcagacctacaagcagcagggcaacaccgtgctgaagctgggcgacaccgtgatcccctaccacgaggacttcagaatgtacatcaccaccaagctgcccaacccccactacacccccgagatcagcaccaagctgaccctgatcaacttcaccctgagccccagcggcctggaggaccagctgctgggccaggtggtggccgaggagagacccgacctggaggaggccaagaaccagctgatcatcagcaacgccaagatgagacaggagctgaaggacatcgaggaccagatcctgtacagactgagcagcagcgagggcaaccccgtggacgacatggagctgatcaaggtgctggaggccagcaagatgaaggccgccgagatccaggccaaggtgagaatcgccgagcagaccgagaaggacatcgacctgaccagaatggagtacatccccgtggccatcagaacccagatcctgttcttctgcgtgagcgacctggccaacgtggaccccatgtaccagtacagcctggagtggttcctgaacatcttcctgagcggcatcgccaacagcgagagagccgacaacctgaagaagagaatcagcaacatcaacagatacctgacctacagcctgtacagcaacgtgtgcagaagcctgttcgagaagcacaagctgatgttcgccttcctgctgtgcgtgagaatcatgatgaacgagggcaagatcaaccagagcgagtggagatacctgctgagcggcggcagcatcagcatcatgaccgagaaccccgcccccgactggctgagcgacagagcctggagagacatcctggccctgagcaacctgcccaccttcagcagcttcagcagcgacttcgtgaagcacctgagcgagttcagagtgatcttcgacagcctggagccccacagagagcccctgcccggcatctgggaccagtacctggaccagttccagaagctgctggtgctgagatgcctgagaggcgacaaggtgaccaacgccatgcaggacttcgtggccaccaacctggagcccagattcatcgagccccagaccgccaacctgagcgtggtgttcaaggacagcaacagcaccacccccctgatcttcgtgctgagccccggcaccgaccccgccgccgacctgtacaagttcgccgaggagatgaagttcagcaagaagctgagcgccatcagcctgggccagggccagggccccagagccgaggccatgatgagaagcagcatcgagagaggcaagtgggtgttcttccagaactgccacctggcccccagctggatgcccgccctggagagactgatcgagcacatcaaccccgacaaggtgcacagagacttcagactgtggctgaccagcctgcccagcaacaagttccccgtgagcatcctgcagaacggcagcaagatgaccatcgagccccccagaggcgtgagagccaacctgctgaagagctacagcagcctgggcgaggacttcctgaacagctgccacaaggtgatggagttcaagagcctgctgctgagcctgtgcctgttccacggcaacgccctggagagacacaagttcggccccctgggcttcaacatcccctacgagttcaccgacggcgacctgagaatctgcatcagccagctgaagatgttcctggacgagtacgacgacatcccctacaaggtgctgaagtacaccgccggcgagatcaactacggcggcagagtgaccgacgactgggacagaagatgcatcatgaacatcctggaggacttctacaaccccgacgtgctgagccccgagcacagctacagcgccagcggcatctaccaccagatcccccccacctacgacctgcacggctacctgagctacatcaagagcctgcccctgaacgacatgcccgagatcttcggcctgcacgacaacgccaacatcaccttcgcccagaacgagaccttcgccctgctgggcaccatcatccagctgcagcccaagagcagcagcgccggcagccagggcagagaggagatcgtggaggacgtgacccagaacatcctgctgaaggtgcccgagcccatcaacctgcagtgggtgatggccaagtaccccgtgctgtacgaggagagcatgaacaccgtgctggtgcaggaggtgatcagatacaacagactgctgcaggtgatcacccagaccctgcaggacctgctgaaggccctgaagggcctggtggtgatgagcagccagctggagctgatggccgccagcctgtacaacaacaccgtgcccgagctgtggagcgccaaggcctaccccagcctgaagcccctgagcagctgggtgatggacctgctgcagagactggacttcctgcaggcctggatccaggacggcatccccgccgtgttctggatcagcggcttcttcttcccccaggccttcctgaccggcaccctgcagaacttcgccagaaagttcgtgatcagcatcgacaccatcagcttcgacttcaaggtgatgttcgaggcccccagcgagctgacccagagaccccaggtgggctgctacatccacggcctgttcctggagggcgccagatgggaccccgaggccttccagctggccgagagccagcccaaggagctgtacaccgagatggccgtgatctggctgctgcccacccccaacagaaaggcccaggaccaggacttctacctgtgccccatctacaagaccctgaccagagccggcaccctgagcaccaccggccacagcaccaactacgtgatcgccgtggagatccccacccaccagccccagagacactggatcaagagaggcgtggccctgatctgcgccctggactactag

SEQ ID NO: 187098 - DNA, 3100 bp, Artificial Sequence
  derived and/or modified sequence
gagaaggacaatgggctggatgtgttcaagttgagtgaccgcgacttcctgcgcagcatggagaacgccatccgctttggcaagccatgtctcctggagaacgtgggcgaggagctagacccagccctggagccagtgctgctcaagcagacgtacaagcagcagggaaacacggtgctgaagctgggggacacggtgatcccctaccatgaggacttcaggatgtacatcaccaccaagctgcccaacccacactacacgcccgagatctccaccaaactcaccctcatcaacttcaccctgtcgcccagtggcctagaggaccagctactgggccaggtagtggcagaggagcgacccgacctggaggaggccaagaaccagctgattatcagtaatgccaagatgcgccaggagctgaaggacattgaggaccagatcctgtaccggctcagctcctccgagggcaaccctgtagatgacatggaactcatcaaggtgctggaagcctccaagatgaaggctgctgagatccaggccaaagtcaggattgcagagcagacggagaaggacatcgacctgacgcgcatggagtacatacccgtggccatccgcacccagatcctcttcttctgtgtgtccgacctggccaacgtggaccccatgtaccagtactcccttgagtggtttctcaacatcttcctctcgggcatcgccaactcagagagagcagacaacctgaagaagcgcatctccaacatcaaccgctacctgacctacagcctctacagcaacgtctgccgcagcctctttgagaagcacaagctgatgtttgccttcctgctgtgtgttcgcatcatgatgaacgagggcaaaatcaaccagagtgagtggcgatacctcctgtctgggggctccatctcgatcatgactgagaatccggcaccggactggctgtcagaccgggcttggcgagacatcctagcactctcgaacctgccaaccttttcctccttctcttccgacttcgtgaagcacctctcagaattccgggtcatcttcgacagccttgagccccaccgggagcctttgcctggcatctgggaccagtacctagaccagttccagaagctgctagtcctccgctgcctgcgtggggacaaggttaccaacgccatgcaggactttgtggccaccaacctggagccacgcttcattgaaccccagacagccaatctgtcagtggtgttcaaagactccaactccaccacacccctcatctttgtgctgtcacccggcacagaccctgctgccgacctctacaagtttgccgaagaaatgaagttctccaaaaagctctctgccatctccctgggccaggggcagggccctcgggcagaagccatgatgcgcagctccatagagaggggcaaatgggtcttcttccagaactgccacctggcaccaagctggatgccagccctagaacgcctcatcgagcacatcaaccccgacaaggtacacagggacttccgcctctggctcaccagcctgcccagcaacaagttcccagtgtccatcctgcagaacggctccaagatgaccattgagccgccacgcggtgtcagggccaacctgctgaagtcctatagtagccttggtgaagacttcctcaactcctgccacaaggtgatggagttcaagtctctgctgctgtctctgtgcttgttccatgggaacgccctggagcgccataagtttgggcccctgggcttcaacatcccctatgagttcacggatggagatctgcgcatctgcatcagccagctcaagatgttcctggacgaatatgatgacatcccctacaaggtcctcaagtacacggcaggggagatcaattacgggggccgtgtcactgatgactgggaccggcgctgcatcatgaacatcttggaggacttctacaaccctgacgtgctctcccctgagcacagctacagcgcctcgggcatctaccaccagatcccgcctacctacgacctccacggctacctctcctacatcaagagcctcccactcaatgatatgcctgagatctttggcctgcatgacaatgccaacatcacctttgcccagaacgagacgttcgccctcctgggcaccatcatccagctgcaacccaaatcatcttctgcaggcagccagggccgggaggagatagtggaggacgtcacccaaaacattctgctcaaggtgcctgagcctatcaacttgcaatgggtgatggccaagtacccagtgctgtatgaggaatcaatgaacacagtactagtacaagaggtcattaggtacaatcggctgctgcaggtgatcacacagacactgcaagacctactcaaggcactcaaggggctggtagtgatgtcctctcagctggagctgatggctgccagcctgtacaacaatactgtgcctgagctctggagtgccaaggcctacccatcgctcaagcctctgtcatcatgggtcatggacctgctgcaacgcctggactttctgcaggcctggatccaagatggcatcccagctgtcttctggatcagtggattcttcttcccccaggctttcaacaggcactctgcagaattttgcccgcaaatttgtcatctccattgacaccatctcctttgatttcaaggtgatgtttgaggcaccatcagagttaacacaaagaccccaagtagggtgctatatccatggattattcctggaaggtgcccgctgggatccagaggccttccagctggctgagtctcagcccaaggagctgtacacagagatggccgttatctggctcttgccaacacccaaccgcaaggcccaggaccaggacttttacctgtgccccatctacaagacactgactcgtgctggaacactatcaaccacaggacactctaccaactatgtcattgctgtggagatccccacccatcagccccagcgacactggataaagcgtggtgtggccctcatctgtgccctggactactagactcagacagaagggctggggccattaaagctgaattttctaagc

SEQ ID NO: 187099 - DNA, 13104 bp, Artificial Sequence
  derived and/or modified sequence
ggggggtacccaacctatacgcagacccattgagcagccagactgccctaaacagggctatggagtccttgtcccttctaagagctgtggacaccttgcctccagttcccctcacagtcctttcttccttctgcagtgatcactgagtacctgtgtgaatgccaacaagaaaaataaaaccacagtttggattcaggaaaggttgcaccaccatcaggtcttgaagggagcttcggctggggcatctccctgagaagcagcatggagcagcctaacagtaaaggctatagcctgggaaggacccctcagggcccagagtgcagcagtgctcctgcagtccaagtggggacccacaggggcctagagtataacccggggaagattcttccaggatcagactatgggttgggaaatcctccagcccttgaccccaagctcccacatttacccctgcccccggccccacccacactctcagacttggggcagccacggaagtcacccctgacaggcactgataagaagtacccgctgatgaagcagcgtgggttctactccgacatcctcagccctggaaccttagatcaacttggggaggtatgtcgtggcccccgaatgagccagaacctcctgcggcaggctgaccttgacaagttcaccccaagagtcggaagctttgaggttcctgaagacttccaggagcgcatggagcagcagtgcatcgggtccaccacccggctgctcgcccagactgacttcccactgcaggcctacgagcccaagatgcaggtgcctttccaggtgctgccaggccagcatcctcgcaagattgagatcgagaggaggaaacagcagtacctgagcctggacattgagcagttgctgttcagccagggcatcgactccaacaagctcatgcccaggcacctggaccaccagcacccccaaaccatcgaacagggccatgacccaatcttccccatctacctcccactgaaggtatttgacaatgaggactttgactgccggactcccagagagtggatcaacatgggcttggagccagggtctctggacaggaaacctgtcccgggaaaagccctcttgcccactgatgacttcctggggcatgaggaccccaagagtcagaagctgaagtacaaatggtgcgaggtcggcgtcctggactacgacgaggagaagaagctatacctggtacacaagacagacgagaaaggcctggtgcgagatgagatggggaggcccatcctgaatgcaggggtcaccactgaaggaaggccaccccttcaggtctgtcagtactgggtgccacggatccagcttctcttctgcgctgaggacccttgcatgttcgcacaacgtgtggtccaggccaacgccctgcgcaagaacacggaagcactgctgctctacaacttgtatgtggactgcatgccctctgacggccagcatgtcatcagtgaacagagcctgagcaagatcaagcagtgggccctgagcacgcctcggatgcgcaaaggcccctcggttctagagcacctcagcagtcttgccagagaagtgagcctggactatgagcgcagcatgaacaagatcaactttgaccacgttgtctcttccaagcccgagaccttctcctacgtcaccctccccaagaaggaggaggagcaggtgcctgagcgagggctggtgagtgtccccaagtaccacttctgggagcagaaggaggacttcactttcgtgtccctgctcacacggccagaggtcatcacggccctcagcaaggtgagggccgagtgcaacaaggtgaccgccatgtccctgttccactcgagcctctccaagtacagccacctggaggaatttgagcagatccagtcacagaccttctcccaggtgcagatgttcctcaaggacagctggatcagctcgctaaaggtggccatgcgcagcagcctgcgcgacatgagcaagggctggtacaacctctacgagaccaactgggaggtgtacctcatgtccaagctgcgcaagctgatggagctggtgaagtacatgctgcaggacacactgcgcttcctggtgcaggactcacttgccagcttctcacagttcatcagcgacacctgttgcagcgtgctcaactgcaccgatgacatggtctggggtgacgacttaattaacagcccctacaggccccggaagaatcccctgttcatcatggacctggtgctggacagctctggggtgcactatagcaccccactggagcagtttgaggcatctctgctgaacctcttcgacaagggcatcctggccacccatgccgtgccccagctggagaagctggtgatggaggacatcttcatcagcggtgaccccctgctggagtccgtgggccttcatgagccactggtggaagagctacgggccaccattgccagtgccgtgtccaaggccatgatcccactgcaggcctacgccaaggagtaccgaaagtacctggagctgaacaacaatgacattgcctcctttctcaaaacctaccagacgcagggcctgttggcccaggaggtgcgggaggtagtgctcacccacctgcgggagaaggagatcctggacagctcgctgcccagcagcatcatcattgggcctttctacatcaacaccgacaatgtcaagcagagcctgtccaagaaacgcaaggccctggccacttccgtgctggacatccttgccaagaacctgcataaggaggtggatagcatctgcgaggagttccgcagcatcagccgcaagatctatgagaagcccaacagcattgaggagctggctgagctgcgagagtggatgaagggcatcccggagaggctggtgggcctggaggagcggattgtgaaggtcatggatgactaccaggtcatggatgaattcctctacaacctcagctcagatgacttcaatgacaaatggattgccagcaactggccttctaagatccttgggcagatagagctggtgcagcagcagcatgtggaggatgaggagaagttccgcaaaatccagatcatggatcagaacaacttccaagagaagctggaagggctgcagctggtagtagctggcttctccatccatgtggagatttcacgtgcacacgagatcgccaacgaggtgcggcgtgtcaagaagcagctgaaggactgccagcagctggccatgctctacaacaaccgcgagcgcatcttcagcttgcccatcaccaattatgacaagctctccaggatggtgaaggagttccaaccctacctggacctttggaccacagcgtctgactggctgcgctggtcggagagctggatgaatgaccccctctctgccatcgatgctgagcagctggagaagaacgtggttgaagccttcaagaccatgcacaagtgcgtgaagcagtttaaggacatgccagcctgccaggaagtggccttggacatccgggcccgcatcgaggagttcaaaccatacatcccactgatccaggggctgcgcaaccctggcatgcggatccggcactgggagacactgtccaaccagatcaacatcaatgtcaggcccaaggccaacctgacctttgctcgctgcctggagatgaacctgcaggaccatatcgagagcatcagcaaggtggctgaggtggctggcaaggagtacgccatcgagcaggcactggacaagatggagaaggagtggtcgaccatcctgttcaatgtactgccctacaaggcgacagacacctacatcctgaagagcccggacgaggcctcacagctgctggacgaccacatcgtcatgacccagaatatgtcattttcaccctacaagaagccctttgagcagcgcatcaactcctgggagaacaaactgaagctgacccaggaggttctggaggagtggctgaactgtcagcggtcctggctctacctggagcccatctttagctctgaggacatcaaccagcagctgcctgtggagagcaagcgctaccagaccatggagcggatctggaagaagatcatgaagaatgcctacgagaaccgggaggtgatcaatgtgtgttccgacctgagaatgctggacagcctgcgggactgcaacaagattctggacctggtgcagaagggcctcagcgagtatctggagaccaagaggagcgccttccccagattctacttcctgtcagatgatgaactactagagatcttgtcgcagacaaaggaccccacggccgtgcagccacacctgcgcaagtgcttcgagaacatcgctcggctgctattccaggaggacctggagatcacgcacatgtactcagccgagggggaggaggtacagttgtgcttctccatctacccctccagcaacgtggaggactggctgcgggaggtggagcgcagcatgaaggccagtgtgcacgacatcattgagaaggccatcagggcctaccccacgatgcccaggacccagtgggttctgaactggcctggccaggtgaccatcgctgggtgccagacctactggaccatggaggtggcagaggctctggaggccggcaacctcagaagccaactgttcccccagctctgccagcagctcagtgatctggtggcccttgtgcgggggaagctgtcccgcatgcagcgggcagtgctgtcagcgctaatcgtcattgaggtccatgccaaggacgtggtgagcaagctaatccaggagaacgtggtcagcgtgaatgacttccagtggatctcacagctgaggtactactggacaaataatgacctgtatatccgtgctgtgaatgctgagttcatctatggctatgagtacctgggcaacagtgggaggctggtgatcacgcccctcaccgacaggtgctacctgacactgaccggagctctgcacctcaagtttgggggtgccccagctggcccagctggcacaggcaaaactgagaccaccaaagacctgggtaaggccttggccatacagaccgttgtgttcaactgctctgaccagctcgacttcatggccatgggcaagttcttcaagggcctggccagtgctggggcctgggcctgcttcgacgagttcaatcgcatcgacatcgaggtgctgtctgtggtggcgcagcagatcaccaccatccagaaggcgcagcagcagcgggtggaacgcttcatgtttgagggtgtggagatcccactggtgccatcctgcgcagtgtttatcaccatgaacccgggctacgctggccgcacggagctgcctgacaatctgaaggcgctcttccgacccgtggccatgatggttccagattacgccatgatcactgagatctccctctattcctttggctttaatgaggccagtgtgctggctaagaagatcacaaccaccttcaagctgtcttctgagcagctcagctcccaggatcactatgacttcgggatgagagccgtgaaaactgtgatctcggctgctgggaacctcaagcgagaaaaccccagcatgaatgaggagctgatctgcctccgggccatccgtgatgtgaacgtgcccaagttcctgcaggaggacctcaagctcttctctggcatcgtgtccgacctgtttcccaccatcaaggaggaggacacggactacggcatcctggatgaggccatccgcgaggcctgcaggaacagcaacctcaaggatgtggagggcttcctgacaaagtgcatccagctctacgagaccacggtggtacgacacggcctcatgctcgtcgggcccacaggctccggcaagagtacttgttacagagtcctggcagctgccatgacgtcactgaaagggcagccatccatcagtggtggcatgtacgaggctgtcaactactacgtgctcaaccccaagtccatcacgatgggccagctgtacggggagtttgacctcctcacccatgagtggacagacgggatattctcctcgttcatccgggcgggggccatcacctccgacaccaacaagaagtggtacatgttcgatgggccggtggatgccatctggattgagaacatgaacacggtgctggatgacaacaagaagctgtgcctcagctctggggagatcatcaagctcacagaggcaatgaccatgatgttcgaggtgcaagacctggcggtggcttcaccagctacagtctcccgctgtggcatggtgtacctggagcccagcatcctggggctcatgcccttcatcgagtgctggctgaggaagctgcctcccttgctgaagccctatgaggagcatttcaaggccctctttgtcagcttcctggaggaatccatctccttcgttcggtcctcagtgaaggaggtgatcgcctcaaccaactgcaacctgaccatgagcctcctcaagctgctggactgcttcttcaagccctttctgcctagagagggcctcaagaaaataccctctgaaaagctgagtcgcatcgtagagttgatcgagccctggttcatcttctccctgatctggagcgtgggtgccactggggacagcagtggccgcaccagtttcagccactggctaaggctcaagatggagaacgaacagctgactctgcttttcccagaagaggggctggtgttcgattacaggctggaggacgcgggcatcagtggcaccaacgacagtgaggatgaagaggaggaatacaagcaggttgcctgggtgaagtggatggactcctcagctccattcaccatggtaccagacaccaactactgcaacatcattgtgcccaccatggacaccgtgcagatgtcccatttactggacatgctgctcaccaacaagaagcccgtgctgtgcattgggccaacaggcacggggaagacgctcaccatctctgacaagctcctcaagaacctggcactggattacatcagccacttcctcaccttctcagcccgcacttcagccaaccagacccaggacttcattgacagcaagctggacaagaggcggaagggtgtgtttggaccacctctggggcgcaactttatcttcttcatcgatgacctgaacatgccggccctggagacctacggtgcacagccacccatcgagctgttgcgccagtggatggaccacggcggctggtacgaccgcaagatcattggtgccttcaagaacctagtggacatcaactttgtctgtgccatgggccccccgggtggaggcaggaacaccgtcaccccgcggctgatgcgtcacttcaactacctgtctttcgctgagatggacgaggtcagcaagaaacgcatcttctccaccatcctgggcaactggttggatggactccttggagaaaaaagctaccgggagcgtgtgcctggggccccccacattgcccacttcacggagccccttgtggaagccaccatcatggtgtatgcaaccatcacctcccagctgctgcccactccagccaagtcccactacaccttcaacctgagggacctctccaaggtcttccaaggcatgctcatggctgacccggccaaggtcgaggaccaagtgcagctgctgcgactgtggtatcacgagaactgccgcgtgttccgggaccgactggtgaatgaggaggaccgcagctggttcgaccagctcctcaagcgctgcatggagcagtgggaggtgaccttcaacaaggtctgccccttccagcccattctttacggggacttcatgtcaccaggctccgatgtcaagtcctacgagctcatcaccagtgagagtaagatgatgcaggtgatagaggagtacatagaggactacaaccagatcaacacggccaagctgaagctggtcctcttcatggacgccatgagccacatctgtcgcatcagccgcaccctacgccaggcgctgggcaatgcactcctgctgggcgtgggtggcagcggccgcagctccctcacaaggctcgcctcgcacatggccgagtacgagtgcttccagattgaactatccaagaactacggcatgtccgagtggcgagatgatgtgaagaaggtcctgctcaaggcgggcctacagaacctacccatcaccttcctcttctcagacacccagatcaagaacgaatccttcctggaagatatcaacaacgtcctaaactctggtgacattcccaatctgtatactgcggacgagcaggaccagatcgtcagcaccatgcggccctatatccaggagcagggcctacagcccaccaaggccaacctcatggctgcttacacagggcgtgtgcgcagcaacatccacatggtgctgtgcatgagccccatcggagaggtcttccgagctcgtctgaggcagtttccctccctggtcaactgctgtaccatcgactggtttaacgagtggccggcagaagccctgaagtctgtggccaccgtgttcctcaatgagatcccagaactggaatcctcccaggaagaaatccaaggactgatccaggtctgtgtgtacatccaccagtcggtgtccaagaagtgcatcgagtacctggcagagctgacccgccacaactatgtgacccccaagagctacttggagctgcttcatattttctccatcctcatcgggcagaagaaactggagctgaaaactgccaagaaccgcatgaagagcggcctcgacaagctgctgcgcacttctgaggatgtagccaagatgcaggaggacctggagagtatgcaccccctgctggaggaggctgccaaggacaccatgctcaccatggagcagatcaaggtggatacggccatcgccgaggagacccggaattcagtgcagacagaggagatcaaagccaatgagaaggccaagaaggcacaagctattgctgacgatgcccagaaggacctggacgaggcgttgccagccctggatgcggctctggccagcctgcgcaacctcaacaagaacgatgtgaccgaggtacgtgccatgcagcggccacccccgggtgtgaaactggtcatagaagctgtgtgcattatgaaaggcatcaagcccaagaaggtgcctggagaaaagccaggcaccaaggtggatgactactgggagcctggcaaggggctgctgcaggacccgggccacttccttgagagcctcttcaagtttgacaaggacaacattggggatgtggtgatcaaagccatccagccgtacatcgataatgaagagttccagccagccaccattgccaaggtgtccaaggcttgcacctccatctgccagtgggtgcgcgccatgcacaagtaccactttgtggccaaggccgtggagcccaagcggcaagccctgctggaggcccaggatgacctgggggtgacacagaggatcctggatgaggcaaaacagcgccttcgtgaggtggaggacggcatcgccacaatgcaggctaagtaccgggaatgcattaccaagaaggaggagctggagctgaagtgtgagcagtgtgagcagcggctgggccgagctggcaagctcatcaacgggctgtcggatgagaaggtgcgctggcaggagacggtggagaacctgcagtacatgctcaacaacatctccggcgatgtcctggtggccgctggctttgtggcctacctgggccccttcacgggccagtaccgcacggtgctctacgacagctgggtcaagcagctcaggagccacaatgtcccacacacctccgagcccacgctaatcgggacgctggggaaccctgtgaagatccgatcgtggcagatcgctggcctccccaacgacacactgtcagtggagaacggggtcatcaaccagttttcccagcgctggacccacttcattgaccctcagagccaggccaacaaatggatcaagaacatggagaaggacaatgggctggatgtgttcaagttgagtgaccgcgacttcctgcgcagcatggagaacgccatccgctttggcaagccatgtctcctggagaacgtgggcgaggagctagacccagccctggagccagtgctgctcaagcagacgtacaagcagcagggaaacacggtgctgaagctgggggacacggtgatcccctaccatgaggacttcaggatgtacatcaccaccaagctgcccaacccacactacacgcccgagatctccaccaaactcaccctcatcaacttcaccctgtcgcccagtggcctagaggaccagctactgggccaggtagtggcagaggagcgacccgacctggaggaggccaagaaccagctgattatcagtaatgccaagatgcgccaggagctgaaggacattgaggaccagatcctgtaccggctcagctcctccgagggcaaccctgtagatgacatggaactcatcaaggtgctggaagcctccaagatgaaggctgctgagatccaggccaaagtcaggattgcagagcagacggagaaggacatcgacctgacgcgcatggagtacatacccgtggccatccgcacccagatcctcttcttctgtgtgtccgacctggccaacgtggaccccatgtaccagtactcccttgagtggtttctcaacatcttcctctcgggcatcgccaactcagagagagcagacaacctgaagaagcgcatctccaacatcaaccgctacctgacctacagcctctacagcaacgtctgccgcagcctctttgagaagcacaagctgatgtttgccttcctgctgtgtgttcgcatcatgatgaacgagggcaaaatcaaccagagtgagtggcgatacctcctgtctgggggctccatctcgatcatgactgagaatccggcaccggactggctgtcagaccgggcttggcgagacatcctagcactctcgaacctgccaaccttttcctccttctcttccgacttcgtgaagcacctctcagaattccgggtcatcttcgacagccttgagccccaccgggagcctttgcctggcatctgggaccagtacctagaccagttccagaagctgctagtcctccgctgcctgcgtggggacaaggttaccaacgccatgcaggactttgtggccaccaacctggagccacgcttcattgaaccccagacagccaatctgtcagtggtgttcaaagactccaactccaccacacccctcatctttgtgctgtcacccggcacagaccctgctgccgacctctacaagtttgccgaagaaatgaagttctccaaaaagctctctgccatctccctgggccaggggcagggccctcgggcagaagccatgatgcgcagctccatagagaggggcaaatgggtcttcttccagaactgccacctggcaccaagctggatgccagccctagaacgcctcatcgagcacatcaaccccgacaaggtacacagggacttccgcctctggctcaccagcctgcccagcaacaagttcccagtgtccatcctgcagaacggctccaagatgaccattgagccgccacgcggtgtcagggccaacctgctgaagtcctatagtagccttggtgaagacttcctcaactcctgccacaaggtgatggagttcaagtctctgctgctgtctctgtgcttgttccatgggaacgccctggagcgccataagtttgggcccctgggcttcaacatcccctatgagttcacggatggagatctgcgcatctgcatcagccagctcaagatgttcctggacgaatatgatgacatcccctacaaggtcctcaagtacacggcaggggagatcaattacgggggccgtgtcactgatgactgggaccggcgctgcatcatgaacatcttggaggacttctacaaccctgacgtgctctcccctgagcacagctacagcgcctcgggcatctaccaccagatcccgcctacctacgacctccacggctacctctcctacatcaagagcctcccactcaatgatatgcctgagatctttggcctgcatgacaatgccaacatcacctttgcccagaacgagacgttcgccctcctgggcaccatcatccagctgcaacccaaatcatcttctgcaggcagccagggccgggaggagatagtggaggacgtcacccaaaacattctgctcaaggtgcctgagcctatcaacttgcaatgggtgatggccaagtacccagtgctgtatgaggaatcaatgaacacagtactagtacaagaggtcattaggtacaatcggctgctgcaggtgatcacacagacactgcaagacctactcaaggcactcaaggggctggtagtgatgtcctctcagctggagctgatggctgccagcctgtacaacaatactgtgcctgagctctggagtgccaaggcctacccatcgctcaagcctctgtcatcatgggtcatggacctgctgcaacgcctggactttctgcaggcctggatccaagatggcatcccagctgtcttctggatcagtggattcttcttcccccaggctttcttaacaggcactctgcagaattttgcccgcaaatttgtcatctccattgacaccatctcctttgatttcaaggtgatgtttgaggcaccatcagagttaacacaaagaccccaagtagggtgctatatccatggattattcctggaaggtgcccgctgggatccagaggccttccagctggctgagtctcagcccaaggagctgtacacagagatggccgttatctggctcttgccaacacccaaccgcaaggcccaggaccaggacttttacctgtgccccatctacaagacactgactcgtgctggaacactatcaaccacaggacactctaccaactatgtcattgctgtggagatccccacccatcagccccagcgacactggataaagcgtggtgtggccctcatctgtgccctggactactagactcagacagaagggctggggccattaaagctgaattttctaagc

SEQ ID NO: 187100 - protein, 420 aa, Artificial Sequence
  derived and/or modified sequence
MAPWPPKGLVPAMLWGLSLFLNLPGPIWLQPSPPPQSSPPPQPHPCHTCRGLVDSFNKGLERTIRDNFGGGNTAWEEENLSKYKDSETRLVEVLEGVCSKSDFECHRLLELSEELVESWWFHKQQEAPDLFQWLCSDSLKLCCPAGTFGPSCLPCPGGTERPCGGYGQCEGEGTRGGSGHCDCQAGYGGEACGQCGLGYFEAERNASHLVCSACFGPCARCSGPEESNCLQCKKGWALHHLKCVDIDECGTEGANCGADQFCVNTEGSYECRDCAKACLGCMGAGPGRCKKCSPGYQQVGSKCLDVDECETEVCPGENKQCENTEGGYRCICAEGYKQMEGICVKEQIPESAGFFSEMTEDELVVLQQMFFGIIICALATLAAKGDLVFTAIFIGAVAAMTGYWLSERSDRVLEGFIKGR

SEQ ID NO: 187101 - DNA, 1263 bp, Artificial Sequence
  derived and/or modified sequence
atggccccgtggcctccaaaaggccttgtgcccgctatgttatggggcttgtccttgtttctcaacctgcctggaccaatatggcttcagcccagcccacccccacagagttctcctccaccacagccccacccttgtcacacgtgtaggggcctagtggattcttttaacaaggggcttgagcgcacaattagagacaattttggcggcggaaacaccgcgtgggaagaggaaaacctgagcaagtacaaagactctgagactcgcttagttgaagtgctggaaggagtctgcagtaaatcggattttgagtgtcacaggctgctagaactctctgaagaactggtcgagtcttggtggttccataaacagcaggaggcccctgatctgttccagtggctttgttctgactctcttaaattatgctgcccagccggaacttttggcccttcttgcttgccttgtcccggaggtaccgagcgtccatgcggggggtacggccaatgcgagggagaaggtacacgcgggggatctgggcattgtgattgtcaagccggatacgggggagaagcgtgcggtcagtgtgggcttggttactttgaggcagaaaggaatgcatcacacctggtctgttctgcatgctttggtccatgtgctagatgttcaggccccgaggagagcaattgccttcagtgcaagaaaggttgggccctccatcacttgaaatgcgtggacatcgatgaatgtggtaccgagggcgcaaattgcggcgccgatcagttttgcgttaatacagagggaagctacgagtgcagggactgcgctaaggcctgcctaggctgcatgggcgcgggaccaggacgttgtaaaaaatgttccccaggatatcagcaggtaggtagcaagtgtctggacgtcgatgaatgtgaaaccgaggtatgcccaggggaaaacaaacagtgtgagaacacagaaggcggctacaggtgtatatgcgctgagggctacaagcaaatggaagggatctgtgtcaaggaacaaatacccgagtccgctgggttcttcagcgaaatgaccgaggacgaacttgtggtgctgcagcaaatgttcttcgggatcatcatctgtgccctggccacgctagccgcaaagggggatctggtgtttaccgcgatctttattggagcagtggctgccatgactggctattggttatcagaacggtcagaccgggtgctggaaggatttatcaagggccgatag

SEQ ID NO: 187102 - DNA, 1263 bp, Artificial Sequence
  derived and/or modified sequence
atggcgccttggccccctaagggtctcgtcccagcaatgttatggggtctttccttattcctgaatttgccaggccctatttggctgcagcctagtccaccccctcagtcttccccaccgccccaaccacacccttgccacacatgtcgcggcttagttgattcctttaacaagggcctggaaaggacaatccgcgataacttcggcggcgggaatacagcctgggaagaagaaaacctgagcaaatataaggactccgagacaaggcttgtggaggtgctggagggcgtttgttccaaaagtgattttgagtgccaccgcttgctggagttgagcgaagaactggtcgaatcgtggtggtttcataagcagcaggaagctcccgatctctttcagtggctctgtagcgacagtctgaagctttgctgcccggccggaacctttggacccagctgtttgccatgccctgggggcacagaaagaccatgtggcggatacggccaatgcgaaggggaagggaccagaggggggtctggacattgcgattgtcaggctggctatggtggcgaggcctgcggacagtgtggactcgggtactttgaggcagagcgcaatgcaagccatctggtctgcagcgcctgcttcggaccatgtgcacggtgctcggggcccgaagaatcgaattgcctgcaatgcaagaaaggctgggcattgcaccatctgaaatgtgtggacatcgatgagtgtggcacggagggcgccaactgtggagcggaccagttttgcgtgaatacagagggaagttatgaatgccgagattgcgccaaagcgtgccttggttgcatgggcgctggacccgggcggtgtaagaagtgcagcccaggttaccagcaggtgggctctaaatgtctggatgtggacgaatgcgagaccgaagtgtgtcccggcgagaataagcagtgcgagaatacggaaggtgggtatcggtgcatttgcgctgagggttataaacaaatggagggcatttgtgttaaggagcagattcccgaatcagccggtttcttttcggaaatgacagaggacgagttggtcgtactacagcagatgttcttcgggattatcatttgtgccctggctacgctcgcggctaagggcgacttggtgttcacagcaattttcataggagcagttgctgcaatgactggttactggctgagtgagcgaagcgacagggtgcttgaaggttttataaagggacggtag

SEQ ID NO: 187103 - DNA, 1263 bp, Artificial Sequence
  derived and/or modified sequence
atggctccatggccgccaaaggggctggtaccggccatgctttggggactctctttatttttaaatcttcccggccccatttggctgcagccaagccccccacctcaatcttcacctccccctcagccgcatccgtgccacacctgcaggggcctcgtggacagtttcaataaggggttagaacgtaccatcagggacaacttcggcggcggcaacaccgcttgggaagaggagaacttgagcaaatacaaggacagcgagacccgcttggtggaagtcttggagggggtctgctccaagtccgactttgaatgtcaccgactgctagaactgtccgaggagctggttgagtcatggtggttccataaacagcaggaagctccagacctcttccagtggctgtgctccgatagtctcaagctgtgttgcccagcagggacctttggaccctcctgcttaccgtgccccggagggactgagaggccttgcggagggtacggtcagtgtgagggtgaagggacccgtggaggaagcggacactgcgactgtcaagcgggctatggaggcgaagcctgtggacagtgcggactgggttacttcgaagctgaacgaaacgcctctcacctggtttgcagcgcctgcttcggcccatgcgcacgctgttccggaccggaggagtccaattgcttacaatgcaaaaaaggatgggctctccatcacttgaaatgtgtggacattgacgagtgcggtacggaaggtgcaaattgtggagccgaccagttctgtgtgaacaccgagggaagttacgagtgcagggactgtgcaaaagcttgcctgggttgtatgggggctggtccaggtcgatgtaagaaatgttcaccaggttatcaacaagtcggatcaaaatgtctggatgttgatgagtgcgaaacagaggtctgtccaggggaaaataaacagtgtgaaaatactgaggggggatacagatgtatttgcgcagagggctataaacagatggagggaatttgtgtgaaagagcagataccggaatcagccggattttttagcgagatgactgaggacgagctagtcgtccttcagcaaatgttttttgggattattatttgcgctctggcaaccttggctgccaaaggagatcttgtgttcaccgccatctttattggagcggttgcagccatgacgggctactggctgtctgagcggtcagatagggtactggagggctttataaaagggcgttag

SEQ ID NO: 187104 - DNA, 1263 bp, Artificial Sequence
  derived and/or modified sequence
atggccccctggccacccaagggcctggtgcctgccatgctgtggggcctgagcctcttcctgaacctgcccggccccatctggctgcagcccagccccccaccccagagcagccccccaccccagccccacccctgccacacctgccggggcctggtggacagcttcaacaagggcctggagaggaccatccgggacaactttggaggcggcaacacagcctgggaggaggagaacctgagcaagtacaaggacagcgagacccggctggtggaggtgctggagggcgtgtgcagcaagagtgactttgagtgccaccggctgctggagctgtctgaggagctggtggagagctggtggttccacaagcagcaggaggccccagacctcttccagtggctgtgcagcgacagcctgaagctgtgctgcccagctggcaccttcggccccagctgcctgccctgccctgggggcacagagcggccctgtggcggctacggccagtgtgagggggagggcacccggggcggcagcggccactgtgactgccaggccggctatggaggagaggcctgtggccagtgtggcctgggctactttgaggccgagagaaatgccagccacctggtgtgcagcgcctgcttcggcccctgtgcccgctgcagcggccctgaggagagcaactgcctgcagtgcaagaagggctgggccctgcaccacctgaagtgtgtggacattgatgaatgtggcacagaaggagccaactgtggggctgaccagttctgtgtgaacacagagggcagctatgagtgccgggactgtgccaaggcctgcctgggctgcatgggcgccggccctggccgctgcaagaagtgcagccctggctaccagcaggtgggcagcaagtgcctggatgtggatgaatgtgaaacagaggtgtgccctggagagaacaagcagtgtgagaacacagagggcggctaccgctgcatctgtgccgagggctacaagcagatggagggcatctgtgtgaaggagcagatccctgagagcgctggcttcttcagcgagatgacagaagatgagctggtggtgctgcagcagatgttcttcggcatcatcatctgtgccctggccaccctggccgccaagggggacctggtgttcaccgccatcttcatcggggctgtggccgccatgacaggctactggctgtctgagaggagtgacagagtgctggagggcttcatcaagggccgctag

SEQ ID NO: 187105 - DNA, 1263 bp, Artificial Sequence
  derived and/or modified sequence
atggccccctggccccccaagggcctggtgcccgccatgctgtggggtctgtcgcttttcttaaacttgcctgggcccatttggctccagccaagtccaccaccccagagctcccctccacctcaaccacacccctgtcatacctgcagaggcctcgttgatagcttcaacaagggactcgaaagaaccatccgggacaacttcgggggcggcaataccgcttgggaagaggagaatctgagtaaatataaagattctgaaaccaggttagtggaggttttagaaggagtgtgcagtaagtcagacttcgagtgtcaccgccttctggaactgagtgaggagctagttgagtcatggtggttccacaaacagcaggaggcccctgacttgtttcagtggctgtgctccgattccctcaagctgtgctgcccagcaggaacattcgggcccagctgcctaccctgccctggtggaactgagagaccttgtggaggatacggccagtgcgaaggtgaaggaacaaggggagggtccggccactgcgattgtcaagctgggtatggaggtgaagcgtgtggccaatgcgggctgggctactttgaagccgaacggaatgcgtcccacttggtctgcagtgcctgcttcggaccatgtgcgcgctgttcaggccccgaggaatcgaactgccttcagtgcaagaaggggtgggctttacaccatttgaaatgcgttgacatcgacgagtgcgggacagagggcgctaattgcggggcagaccagttctgcgtcaatacggagggctcttacgagtgccgggactgcgccaaggcctgcttgggttgtatgggcgctggccccggcaggtgcaagaagtgctctccagggtatcagcaagttggtagcaaatgtctcgatgtcgacgagtgcgagactgaagtgtgtccgggagaaaacaaacagtgtgaaaacacagagggcggttatagatgtatttgtgccgaggggtataaacagatggaaggtatatgtgtcaaggaacagattcctgagtcggccgggtttttttcagaaatgacagaggatgaactggtggttctccagcaaatgttttttggaattatcatatgcgcccttgctaccctcgctgccaagggagatctcgtctttaccgcaatctttatcggcgctgtggccgcaatgacgggctactggctctccgagagaagcgacagggtgctggagggattcataaaggggaggtag

SEQ ID NO: 187106 - DNA, 1263 bp, Artificial Sequence
  derived and/or modified sequence
atggccccctggccccccaagggcctggtgcccgccatgctgtggggacttagtcttttcctgaacctgcccggccctatttggctccagcccagcccacctcctcagtcttctcctccccctcagccccatccatgtcacacatgtcggggtctagtggactctttcaataaggggttagaaaggacaatcagggacaacttcggcgggggcaataccgcgtgggaagaggagaacctctcaaaatacaaggattctgagacgagactcgtggaagtcctggagggagtgtgctcgaagagcgacttcgaatgccaccggctgctggagctgtcagaagagcttgtggagtcctggtggttccataagcagcaggaagctcctgatctgtttcaatggctctgcagtgattcactaaagctgtgctgtccagcagggacttttggcccttcttgcttgccttgccctggcggcacagagaggccttgtggggggtacgggcagtgcgagggggagggcactcggggcggaagcggacactgcgattgccaggctgggtatggaggcgaggcgtgtggacagtgtgggctcggctattttgaagctgagcgcaatgcatctcacttagtatgctccgcttgttttgggccctgcgcaaggtgtagtgggcctgaggagagcaattgcctgcagtgtaagaaggggtgggcactccaccacctgaaatgcgttgacatcgatgagtgcggaaccgaaggagcgaactgtggtgcagaccagttttgcgtgaacaccgagggtagttacgagtgtagagactgcgcgaaagcctgcttgggatgcatgggagcgggccctggtagatgtaagaaatgctctcctggatatcagcaggtcggctcaaaatgcctagacgtcgacgaatgcgagacagaagtctgcccaggagagaacaaacaatgcgagaacacagagggcggctaccgatgtatctgcgctgagggatacaagcagatggaaggcatctgtgtcaaagaacagatccctgagtccgcaggcttcttctctgaaatgacagaggacgaattggtagtcctgcaacagatgtttttcggcatcatcatctgtgccctcgccaccttggctgctaagggggacctggtgttcactgccatcttcattggtgctgtagcagcaatgaccggatactggctgagtgagcgctccgatcgagtgttggagggattcatcaagggccgatag

SEQ ID NO: 187107 - DNA, 1263 bp, Artificial Sequence
  derived and/or modified sequence
atggccccctggccccccaagggcctggtgcccgccatgctgtggggtctgtcattgttcctgaatcttcctggaccaatatggctgcagccctccccaccgcctcagtcaagccccccaccccaaccacacccctgtcatacctgtcgcgggttggttgactccttcaataaaggtctcgagcggaccattcgagataatttcggtgggggcaacactgcatgggaggaggagaacctgtccaagtataaggattccgagacacggctggtggaggtgctggagggggtctgcagtaaaagcgattttgaatgccatcgtttgctcgagctatccgaggaattggtggaatcttggtggtttcataaacaacaggaggctcctgacctgtttcagtggctttgttccgatagcctcaaactgtgctgccccgcaggtaccttcggcccgtcctgtctaccatgtccaggagggactgaacgaccttgtgggggctacggccagtgtgagggagaggggacgagaggaggctctggccactgcgactgccaggcggggtacggaggggaagcatgcggacagtgtggattagggtactttgaggctgagagaaacgcctcgcacttagtgtgtagtgcttgttttgggccttgcgcgaggtgttctggccccgaggagagcaattgtctccaatgtaagaaggggtgggcgcttcaccatttgaagtgcgtcgacattgatgaatgtggcactgagggggcaaattgtggagcggatcagttctgcgtgaatacagaaggcagctacgaatgccgggattgcgccaaggcttgcctggggtgcatgggggccgggccgggtcgctgcaagaagtgtagccctggttatcaacaggtaggctccaagtgcctcgatgtcgatgaatgtgaaacggaggtctgccccggtgaaaataagcagtgcgagaacaccgaaggaggctaccgctgcatttgtgcggagggctataaacagatggaaggtatctgcgtcaaggagcaaattcctgaatcagctgggttcttttcggaaatgacagaagacgagcttgtcgtgctgcagcagatgtttttcggcataataatctgcgcactcgccactttagcagccaaaggggatctggttttcacggccatcttcattggtgccgtggccgctatgaccggctactggctgagcgaaagatccgacagagttctcgaaggctttatcaagggccggtag

SEQ ID NO: 187108 - DNA, 1263 bp, Artificial Sequence
  derived and/or modified sequence
atggcgccttggcctccaaaagggctggtgcccgcaatgttgtggggtttgtctctgtttctcaacttacctggcccaatttggctgcaaccaagcccacctccacaaagtagcccaccaccacagccccacccttgtcacacctgccgcggactcgttgattcatttaataaaggcctggagcggacaattcgtgacaatttcggtggaggaaacacagcctgggaggaggaaaacctctcaaagtacaaggactcagagactcggctggtggaggtgttagagggagtttgctcaaagagcgacttcgaatgtcaccgcctgttagaattgtcagaggagctggtcgaaagctggtggttccacaagcagcaggaggccccagatctcttccagtggctgtgtagtgacagcctgaagctctgttgccccgctggaaccttcggccctagttgccttccctgcccaggaggcacagaaaggccatgcggtgggtacggacagtgtgagggcgagggaacccggggaggatcaggacactgtgactgtcaggccggttacggtggagaagcctgtggacagtgtgggctgggctactttgaggcagagcgcaatgcgtcacatctggtctgttccgcttgctttggcccttgcgctaggtgtagtggacccgaggaatccaattgtctccagtgtaaaaaaggctgggcactgcatcatttaaagtgcgtcgatattgacgagtgcggcacagagggggcaaactgtggtgcggatcagttctgtgttaacaccgagggatcctacgagtgtagggactgtgctaaggcttgtctaggttgtatgggagccggacctggccgatgtaagaagtgttctcctggctatcagcaggtcgggtcaaaatgtctcgacgtagacgaatgcgagaccgaagtctgtcctggcgagaataagcagtgcgagaatactgaggggggataccgctgcatctgcgccgaaggttacaagcagatggagggcatttgcgtgaaagaacaaatccccgaaagcgctggattcttttccgagatgaccgaggacgagctggtggtcctccagcagatgttcttcggaattattatctgtgcactcgctaccttggcggcaaagggcgatttggtgtttacagctatatttatcggggctgtcgccgctatgactggctactggctttctgagagatccgacagagtcctggaaggcttcataaaaggtcggtag

SEQ ID NO: 187109 - DNA, 1263 bp, Artificial Sequence
  derived and/or modified sequence
atggccccttggcctcctaaagggttggtgcccgctatgctgtggggattgtctctgtttctaaatcttccaggccctatctggcttcagcccagcccccctcctcagagctcaccaccaccgcaaccccacccatgccatacctgccgcggactggtagatagcttcaataaggggttggaacgcacaatacgcgacaactttggcggaggcaatacagcttgggaggaggaaaacctatccaagtacaaggactccgagacacgcctggttgaggtgctcgaaggcgtttgttcaaagagcgactttgagtgtcataggctgttagagctgtctgaagagctggttgagagctggtggtttcataagcagcaggaggcacccgacctctttcagtggctgtgtagcgatagcctgaaactctgttgtcctgccggtacattcggcccttcctgcctcccttgtcccggtggtaccgaaagaccctgcgggggatatggacaatgcgaaggagaaggtacacgaggcggttccggccactgtgattgccaagcaggttatggcggagaggcttgcggacagtgtgggctcggctatttcgaggctgagcgcaacgcatcccatttggtgtgcagcgcttgctttgggccttgtgcgcgttgttctggtccagaggagtctaactgcctgcagtgcaagaagggttgggccttacatcacctcaagtgtgtcgatattgatgagtgtggcaccgagggcgcaaattgtggtgccgatcagttctgcgttaatacagaagggtcctatgagtgcagagactgtgccaaggcatgcctgggatgcatgggggcagggccaggtcgatgcaagaaatgttcccctggatatcaacaagtgggcagcaaatgcctggacgtggacgagtgcgaaacagaggtttgccccggagagaacaaacaatgcgagaacacagaagggggttaccgctgtatctgcgcagaaggttataagcagatggaagggatttgtgtaaaagagcagattccagaaagcgcgggtttcttttcagagatgaccgaagacgaacttgttgtgctccagcagatgttctttggcatcattatctgtgccctcgccacgttggctgctaaaggcgacttagtgtttacagcaatcttcataggcgcagtggcggcaatgaccggttactggctcagtgaaagaagcgaccgcgtgctggaaggcttcataaagggacgctag

SEQ ID NO: 187110 - DNA, 1263 bp, Artificial Sequence
  derived and/or modified sequence
atggcaccatggccgcctaagggactagttcccgctatgctctggggcttgagcctgtttttaaatctcccagggcctatttggctgcagccatctccaccgcctcagtctagccctccaccacagccccatccctgtcacacgtgtcgcggactggtggattctttcaacaagggccttgagcgtacgatccgagacaacttcggcggaggaaacacggcctgggaggaagagaatttatccaagtataaagacagcgaaactcggctggtggaagtgctggagggcgtttgcagtaaatccgacttcgagtgtcatagactacttgaactgtctgaagagttggtcgagagctggtggttccacaaacagcaggaggcgcctgacctgttccagtggctctgttctgactcactgaagctctgttgtcctgctggaacctttggcccaagctgtttaccctgtccaggcggaaccgaacggccttgtggcggatacgggcagtgtgagggcgaggggactcgcggtggatccggccactgtgactgtcaggctggatatgggggtgaagcatgcggtcaatgtggcctaggctactttgaggctgagagaaacgcttctcacctagtgtgttccgcgtgtttcggcccttgcgctaggtgtagcggccctgaggaatcaaattgcctccagtgcaagaaggggtgggctcttcatcacttgaaatgcgtcgatatagacgaatgtgggaccgagggtgccaattgtggcgcagatcaattttgcgtgaacaccgagggcagctatgaatgtagagactgcgctaaggcctgcctgggatgtatgggtgccggacctgggaggtgtaagaagtgttcccccggttaccaacaggtggggtcaaaatgcctagacgttgacgaatgtgaaacagaggtgtgccccggagaaaataaacagtgtgagaataccgaagggggatataggtgcatctgtgccgaggggtacaaacagatggaggggatctgtgttaaggagcaaatacccgaatctgcaggatttttttcagaaatgactgaagatgagttggtcgtgctgcagcagatgttctttggcatcatcatttgcgccctggctacactagctgccaagggcgacctggtgttcaccgctatctttatcggcgcagttgccgctatgacaggatattggctttcagaaagatccgaccgagttctggaaggattcatcaagggtcgttag

SEQ ID NO: 187111 - DNA, 2696 bp, Artificial Sequence
  derived and/or modified sequence
tggcagcgacgcggtgaggagacggcccacggcgcccgcgggctggggcggtcgcttcttccttctccgtggcctacgagggtctggatccttctctgccggctcgtgggccgtgcctttgcccttctgcgaggccctgaatctgatcccttcccttcatatccggatccgggctcctccctccaagcccggggttccggacacctcccccaagacaacccctctggcctcctctccttcagtacttggaatctgatctcttctccctaattctgcggatccggcccctaatattctttatcagaccctcagacaagaggctgacttctgcccccttgtcaaggagcgaggccactttcctctccaccccatgctagcgaggataacttatttctcttctggaattgcatcttatgcgcctttccccacccatccccacagcccctgcaatacccagtttggcctcttttgcttgtaataacgcagatcccagcgccacggcaccttagaacagacctttttctttctcgcgtggggcctgactccttcagtgaagcctctccacgccctctatctgcaggtccccagcctgggtaaagatggccccatggcccccgaagggcctagtcccagctatgctctggggcctcagcctcttcctcaacctcccaggacctatctggctccagccctctccacctccccagtcttctcccccgcctcagccccatccgtgtcatacctgccggggactggttgacagctttaacaagggcctggagagaaccatccgggacaactttggaggtggaaacactgcctgggaggaagagaatttgtccaaatacaaagacagtgagacccgcctggtagaggtgctggagggtgtgtgcagcaagtcagacttcgagtgccaccgcctgctggagctgagtgaggagctggtggagagctggtggtttcacaagcagcaggaggccccggacctcttccagtggctgtgctcagattccctgaagctctgctgccccgcaggcaccttcgggccctcctgccttccctgtcctgggggaacagagaggccctgcggtggctacgggcagtgtgaaggagaagggacacgagggggcagcgggcactgtgactgccaagccggctacgggggtgaggcctgtggccagtgtggccttggctactttgaggcagaacgcaacgccagccatctggtatgttcggcttgttttggcccctgtgcccgatgctcaggacctgaggaatcaaactgtttgcaatgcaagaagggctgggccctgcatcacctcaagtgtgtagacattgatgagtgtggcacagagggagccaactgtggagctgaccaattctgcgtgaacactgagggctcctatgagtgccgagactgtgccaaggcctgcctaggctgcatgggggcagggccaggtcgctgtaagaagtgtagccctggctatcagcaggtgggctccaagtgtctcgatgtggatgagtgtgagacagaggtgtgtccgggagagaacaagcagtgtgaaaacaccgagggcggttatcgctgcatctgtgccgagggctacaagcagatggaaggcatctgtgtgaaggagcagatcccagagtcagcaggcttcttctcagagatgacagaagacgagttggtggtgctgcagcagatgttctttggcatcatcatctgtgcactggccacgctggctgctaagggcgacttggtgttcaccgccatcttcattggggctgtggcggccatgactggctactggttgtcagagcgcagtgaccgtgtgctggagggcttcatcaagggcagataatcgcggccaccacctgtaggacctcctcccacccacgctgcccccagagcttgggctgccctcctgctggacactcaggacagcttggtttatttttgagagtggggtaagcacccctacctgccttacagagcagcccaggtacccaggcccgggcagacaaggcccctggggtaaaaagtagccctgaaggtggataccatgagctcttcacctggcggggactggcaggcttcacaatgtgtgaatttcaaaagtttttccttaatggtggctgctagagctttggcccctgcttaggattaggtggtcctcacaggggtggggccatcacagctccctcctgccagctgcatgctgccagttcctgttctgtgttcaccacatccccacaccccattgccacttatttattcatctcaggaaataaagaaaggtcttggaaagttaaaaggcatcagtcttactacctgtcccaccacccccaccttagggaaatgtcctagaatcctgggaaattgagggcttctttgatggtgagtggagaaaagatagaggagaaggttgcccctgaagtgctgttaggagaaggaggatagaggaatcagccttaggagggttccatgccagctgtcatttggcaaaggaccctggacagatgacttttgcctctgaacttcactcttctctttcctcaaatgggcttcataatgctttccactcaggcttaacatgagaattaaatgaggtgacaaatgtgaagacctggacagtacacaacagatattcaataaaagtgtggtcgccattatgaccagagcctccaagcctcaa

SEQ ID NO: 187112 - DNA, 1728 bp, Artificial Sequence
  derived and/or modified sequence
tgcgttttacgcaggctgtggcagcgacgcggtccccagcctgggtaaagatggccccatggcccccgaagggcctagtcccagctatgctctggggcctcagcctcttcctcaacctcccaggacctatctggctccagccctctccacctccccagtcttctcccccgcctcagccccatccgtgtcatacctgccggggactggttgacagctttaacaagggcctggagagaaccatccgggacaactttggaggtggaaacactgcctgggaggaagagaatttgtccaaatacaaagacagtgagacccgcctggtagaggtgctggagggtgtgtgcagcaagtcagacttcgagtgccaccgcctgctggagctgagtgaggagctggtggagagctggtggtttcacaagcagcaggaggccccggacctcttccagtggctgtgctcagattccctgaagctctgctgccccgcaggcaccttcgggccctcctgccttccctgtcctgggggaacagagaggccctgcggtggctacgggcagtgtgaaggagaagggacacgagggggcagcgggcactgtgactgccaagccggctacgggggtgaggcctgtggccagtgtggccttggctactttgaggcagaacgcaacgccagccatctggtatgttcggcttgttttggcccctgtgcccgatgctcaggacctgaggaatcaaactgtttgcaatgcaagaagggctgggccctgcatcacctcaagtgtgtagacattgatgagtgtggcacagagggagccaactgtggagctgaccaattctgcgtgaacactgagggctcctatgagtgccgagactgtgccaaggcctgcctaggctgcatgggggcagggccaggtcgctgtaagaagtgtagccctggctatcagcaggtgggctccaagtgtctcgatgtggatgagtgtgagacagaggtgtgtccgggagagaacaagcagtgtgaaaacaccgagggcggttatcgctgcatctgtgccgagggctacaagcagatggaaggcatctgtgtgaaggagcagatcccagagtcagcaggcttcttctcagagatgacagaagacgagttggtggtgctgcagcagatgttctttggcatcatcatctgtgcactggccacgctggctgctaagggcgacttggtgttcaccgccatcttcattggggctgtggcggccatgactggctactggttgtcagagcgcagtgaccgtgtgctggagggcttcatcaagggcagataatcgcggccaccacctgtaggacctcctcccacccacgctgcccccagagcttgggctgccctcctgctggacactcaggacagcttggtttatttttgagagtggggtaagcacccctacctgccttacagagcagcccaggtacccaggcccgggcagacaaggcccctggggtaaaaagtagccctgaaggtggataccatgagctcttcacctggcggggactggcaggcttcacaatgtgtgaatttcaaaagtttttccttaatggtggctgctagagctttggcccctgcttaggattaggtggtcctcacaggggtggggccatcacagctccctcctgccagctgcatgctgccagttcctgttctgtgttcaccacatccccacaccccattgccacttatttatt

SEQ ID NO: 187113 - DNA, 1778 bp, Artificial Sequence
  derived and/or modified sequence
gcgacgcggtgaggagacggcccacggcgcccgcgggctggggcggtcgcttcttccttctccgtggcctacgagggtccccagcctgggtaaagatggccccatggcccccgaagggcctagtcccagctatgctctggggcctcagcctcttcctcaacctcccaggacctatctggctccagccctctccacctccccagtcttctcccccgcctcagccccatccgtgtcatacctgccggggactggttgacagctttaacaagggcctggagagaaccatccgggacaactttggaggtggaaacactgcctgggaggaagagaatttgtccaaatacaaagacagtgagacccgcctggtagaggtgctggagggtgtgtgcagcaagtcagacttcgagtgccaccgcctgctggagctgagtgaggagctggtggagagctggtggtttcacaagcagcaggaggccccggacctcttccagtggctgtgctcagattccctgaagctctgctgccccgcaggcaccttcgggccctcctgccttccctgtcctgggggaacagagaggccctgcggtggctacgggcagtgtgaaggagaagggacacgagggggcagcgggcactgtgactgccaagccggctacgggggtgaggcctgtggccagtgtggccttggctactttgaggcagaacgcaacgccagccatctggtatgttcggcttgttttggcccctgtgcccgatgctcaggacctgaggaatcaaactgtttgcaatgcaagaagggctgggccctgcatcacctcaagtgtgtagacattgatgagtgtggcacagagggagccaactgtggagctgaccaattctgcgtgaacactgagggctcctatgagtgccgagactgtgccaaggcctgcctaggctgcatgggggcagggccaggtcgctgtaagaagtgtagccctggctatcagcaggtgggctccaagtgtctcgatgtggatgagtgtgagacagaggtgtgtccgggagagaacaagcagtgtgaaaacaccgagggcggttatcgctgcatctgtgccgagggctacaagcagatggaaggcatctgtgtgaaggagcagatcccagagtcagcaggcttcttctcagagatgacagaagacgagttggtggtgctgcagcagatgttctttggcatcatcatctgtgcactggccacgctggctgctaagggcgacttggtgttcaccgccatcttcattggggctgtggcggccatgactggctactggttgtcagagcgcagtgaccgtgtgctggagggcttcatcaagggcagataatcgcggccaccacctgtaggacctcctcccacccacgctgcccccagagcttgggctgccctcctgctggacactcaggacagcttggtttatttttgagagtggggtaagcacccctacctgccttacagagcagcccaggtacccaggcccgggcagacaaggcccctggggtaaaaagtagccctgaaggtggataccatgagctcttcacctggcggggactggcaggcttcacaatgtgtgaatttcaaaagtttttccttaatggtggctgctagagctttggcccctgcttaggattaggtggtcctcacaggggtggggccatcacagctccctcctgccagctgcatgctgccagttcctgttctgtgttcaccacatccccacaccccattgccacttatttattcatct

SEQ ID NO: 187114 - DNA, 1263 bp, Artificial Sequence
  derived and/or modified sequence
atggccccctggccccccaagggcctggtgcccgccatgctgtggggcctgagcctgttcctgaacctgcccggccccatctggctgcagcccagcccccccccccagagcagcccccccccccagccccacccctgccacacctgcagaggcctggtggacagcttcaacaagggcctggagagaaccatcagagacaacttcggcggcggcaacaccgcctgggaggaggagaacctgagcaagtacaaggacagcgagaccagactggtggaggtgctggagggcgtgtgcagcaagagcgacttcgagtgccacagactgctggagctgagcgaggagctggtggagagctggtggttccacaagcagcaggaggcccccgacctgttccagtggctgtgcagcgacagcctgaagctgtgctgccccgccggcaccttcggccccagctgcctgccctgccccggcggcaccgagagaccctgcggcggctacggccagtgcgagggcgagggcaccagaggcggcagcggccactgcgactgccaggccggctacggcggcgaggcctgcggccagtgcggcctgggctacttcgaggccgagagaaacgccagccacctggtgtgcagcgcctgcttcggcccctgcgccagatgcagcggccccgaggagagcaactgcctgcagtgcaagaagggctgggccctgcaccacctgaagtgcgtggacatcgacgagtgcggcaccgagggcgccaactgcggcgccgaccagttctgcgtgaacaccgagggcagctacgagtgcagagactgcgccaaggcctgcctgggctgcatgggcgccggccccggcagatgcaagaagtgcagccccggctaccagcaggtgggcagcaagtgcctggacgtggacgagtgcgagaccgaggtgtgccccggcgagaacaagcagtgcgagaacaccgagggcggctacagatgcatctgcgccgagggctacaagcagatggagggcatctgcgtgaaggagcagatccccgagagcgccggcttcttcagcgagatgaccgaggacgagctggtggtgctgcagcagatgttcttcggcatcatcatctgcgccctggccaccctggccgccaagggcgacctggtgttcaccgccatcttcatcggcgccgtggccgccatgaccggctactggctgagcgagagaagcgacagagtgctggagggcttcatcaagggcagatag

SEQ ID NO: 187115 - protein, 311 aa, Artificial Sequence
  derived and/or modified sequence
MAALGVLESDLPSAVTLLKNLQEQVMAVTAQVKSLTQKVQAGAYPTEKGLSFLEVKDQLLLMYLMDLTHLILDKASGGSLQGHDAVLRLVEIRTVLEKLRPLDQKLKYQIDKLIKTAVTGSLSENDPLRFKPHPSNMMSKLSSEDEEEDEAEDDQSEASGKKSVKGVSKKYVPPRLVPVHYDETEAEREKKRLERAKRRALSSSVIRELKEQYSDAPEEIRDARHPHVTRQSQEDQHRINYEESMMVRLSVSKREKGRRKRANVMSSQLHSLTHFSDISALTGGTVHLDEDQNPIKKRKKIPQKGRKKKGQ

SEQ ID NO: 187116 - DNA, 936 bp, Artificial Sequence
  derived and/or modified sequence
atggctgcattaggagtgctcgagagcgacctgccctctgctgtgacattgcttaaaaacctgcaggaacaggtgatggccgttactgcccaagtaaagagccttactcagaaggttcaagcaggggcctatcccactgaaaaaggactgtctttccttgaagtgaaagaccaacttcttctgatgtatctaatggacttaactcatctgatccttgataaggctagcggcgggagccttcagggccatgatgcagtgctgaggctggtcgagatcaggacagtattggagaagttgagaccactcgatcagaagttaaagtatcagattgacaaactgatcaaaacggccgtgacggggagcctgtctgagaacgatcctctcaggtttaaaccccatccctctaatatgatgagcaaattgtcctcggaagacgaggaggaagacgaagccgaggatgaccagtctgaggctagcggaaaaaagagcgttaagggcgtgtctaaaaagtacgtacccccaaggttggttcccgtacattacgacgagactgaagccgagagggagaaaaagagactagaaagagcgaagaggcgcgccctaagctcgtcagtgattcgggaacttaaggaacaatacagcgacgcccccgaggagatcagggacgcgcgtcaccctcatgtgactcgtcagtcccaggaagaccagcacaggatcaattatgaagagtccatgatggtacggctgtccgtcagcaagagagaaaaaggccggaggaagagggccaacgtcatgagctcgcaactccactctctcacgcatttcagtgatatctcagcgttgacagggggcaccgttcatctggatgaagaccaaaatccaattaagaagcgaaagaagatcccacagaaggggaggaagaagaaaggacagtag

SEQ ID NO: 187117 - DNA, 948 bp, Artificial Sequence
  derived and/or modified sequence
atggctgctttgggtgtgttagagtccgacctcccctccgccgtaactcttctgaagaatttgcaagagcaggtcatggcggtaaccgcgcaggtcaagtccctgactcagaaggtgcaagctggagcttaccctaccgaaaaagggctttcgttcctggaggtaaaggaccaactcctcctgatgtacctgatggacctgacccacctcattctggacaaggcgtcaggcggatcattgcagggacatgatgccgtgctccgactggtggagatacggacagtcctcgagaaactcaggcctctagaccagaaactcaagtatcaaatcgacaagctgattaagacggctgtgacagggagcctatcagaaaatgatcctctgcggttcaagccacatcctagcaacatgatgtccaagctgtcctccgaggatgaggaggaagatgaggcagaagacgaccaatcggaagcatccggaaagaaatccgtaaagggagtctctaagaaatacgtgccccctcggctcgtccctgtgcactacgatgagaccgaggccgaaagagagaagaagcgcctcgaacgagcaaagaggcgggcccttagttcatcggtgatacgggagctgaaggagcagtatagcgacgcccctgaggaaatccgggacgcccgtcatccccacgtgactagacagagtcaggaggaccaacatcgcatcaactacgaagagagcatgatggtgcgcctctcagtttctaaacgcgagaagggcagacggaaacgggctaacgtcatgtcgtctcagcttcactctcttacacacttctcggatatttccgccctcactgggggtacggtccaccttgacgaggatcaaaaccctattaagaagcggaaaaaaatcccccagaagggaaggaagaagaaggggttcagacggcgcaggtag

SEQ ID NO: 187118 - DNA, 936 bp, Artificial Sequence
  derived and/or modified sequence
atggccgccctgggcgtgctggagagtgacctgcccagcgctgtgaccctgctgaagaacctgcaggagcaggtgatggctgtgacagcccaggtgaagagcctgacccagaaggtgcaggccggggcctaccccacagagaagggcctgtccttcctggaggtgaaggaccagctgctgctgatgtacctgatggacctgacccacctgatcctggacaaggccagcggcggcagcctgcagggccatgatgctgtgctgcggctggtggagatcagaacagtgctggagaagctgcggcccctggaccagaagctgaagtaccagattgacaagctgatcaagacagctgtgacaggcagcctgtctgaaaatgaccccctgcgcttcaagccccaccccagcaacatgatgagcaagctgagcagtgaagatgaggaggaggatgaagcagaagatgaccagagcgaggccagcggcaagaagtctgtgaagggcgtgtccaagaagtatgtgcccccccggctggtgcctgtgcactatgatgaaacagaggccgagcgggagaagaagaggctggagcgggccaagaggcgggccctgagcagcagcgtcatccgggagctgaaggagcagtacagtgatgcccctgaggagatcagagatgcccggcacccccacgtgacccggcagagccaggaggaccagcaccgcatcaactatgaggagagcatgatggtgcggctgtctgtgtccaagcgggagaagggccgcaggaagagggccaacgtgatgagcagccagctgcacagcctgacccacttcagtgacatcagcgccctgaccggcggcaccgtgcacctggatgaggaccagaaccccatcaagaagaggaagaagatcccccagaagggcaggaagaagaagggccagtag

SEQ ID NO: 187119 - DNA, 948 bp, Artificial Sequence
  derived and/or modified sequence
atggccgccctgggcgtgctggagagtgacctgcccagcgctgtgaccctgctgaagaacctgcaggagcaggtgatggctgtgacagcccaggtgaagagcctgacccagaaggtgcaggccggggcctaccccacagagaagggcctgtccttcctggaggtgaaggaccagctgctgctgatgtacctgatggacctgacccacctgatcctggacaaggccagcggcggcagcctgcagggccatgatgctgtgctgcggctggtggagatcagaacagtgctggagaagctgcggcccctggaccagaagctgaagtaccagattgacaagctgatcaagacagctgtgacaggcagcctgtctgaaaatgaccccctgcgcttcaagccccaccccagcaacatgatgagcaagctgagcagtgaagatgaggaggaggatgaagcagaagatgaccagagcgaggccagcggcaagaagtctgtgaagggcgtgtccaagaagtatgtgcccccccggctggtgcctgtgcactatgatgaaacagaggccgagcgggagaagaagaggctggagcgggccaagaggcgggccctgagcagcagcgtcatccgggagctgaaggagcagtacagtgatgcccctgaggagatcagagatgcccggcacccccacgtgacccggcagagccaggaggaccagcaccgcatcaactatgaggagagcatgatggtgcggctgtctgtgtccaagcgggagaagggccgcaggaagagggccaacgtgatgagcagccagctgcacagcctgacccacttcagtgacatcagcgccctgaccggcggcaccgtgcacctggatgaggaccagaaccccatcaagaagaggaagaagatcccccagaagggcaggaagaagaagggcttcagaagaagaagatag

SEQ ID NO: 187120 - DNA, 936 bp, Artificial Sequence
  derived and/or modified sequence
atggccgccctgggcgtgctggagagcgacctgcccagcgccgtgacactcctcaagaatttacaggaacaggttatggctgtgaccgcacaggtgaagtccttaacccagaaggtacaggcgggggcgtacccaaccgagaaaggtctgagctttctagaggttaaggaccagctcttgctgatgtatctgatggatctgacgcacctcatcctggataaagcgtctgggggctcgctgcaggggcacgacgccgtgctgagattggtcgagattagaaccgtccttgaaaagctacggcctttggaccagaagttgaagtaccaaatcgacaagctgattaaaaccgccgtgaccggctccctgtccgagaacgacccattacgattcaaaccacatccttcaaatatgatgagtaaactgagttccgaggatgaagaggaagatgaagcggaggacgaccaatccgaagcctcaggcaaaaaatctgtcaagggagtttccaagaaatatgtgcctcctaggctcgttcctgtccactacgacgagacagaggctgaacgcgaaaagaagcggctggaacgcgctaagcggcgagccctgtcatcgtctgttattagagaattgaaggaacaatatagcgatgcaccagaggaaatccgcgatgcaagacatccacatgttacgagacagtcccaagaggaccagcatcgaattaactacgaagaaagcatgatggtgcggctttcggtgagcaaacgagagaagggtaggaggaaacgagctaacgtaatgagctcccagctacattcattgacacactttagcgatataagcgccctgaccggaggaacagtccatctggacgaggaccagaatcctatcaagaagcgcaaaaagattccccagaaaggccggaagaaaaagggtcaatag

SEQ ID NO: 187121 - DNA, 948 bp, Artificial Sequence
  derived and/or modified sequence
atggccgccctgggcgtgctggagagcgacctgcccagcgccgtgacattactcaagaacctgcaggagcaggtgatggccgtaacagcccaggttaagagtctaactcagaaagtgcaggccggagcttacccaacagaaaaaggcctgagtttcctcgaggtgaaggaccagctgctgctaatgtatctcatggacctgacccacctcatcctggacaaggccagtggaggctcgctacagggccatgatgctgtgttgaggttagtcgaaattcggaccgtgctggaaaagctaaggcccctcgaccagaaattgaaataccagatcgataagcttattaaaactgccgttactgggtccttgagcgagaatgatcctctgaggtttaaacctcacccatccaatatgatgtctaaactgtcgtctgaagacgaagaggaggatgaggccgaggacgaccagtccgaggcgagcggcaaaaagagtgttaagggtgtgagcaagaagtacgtgcctccacgcctggttcctgtccactatgacgaaactgaggcggagagggagaagaagcgcctagaacgagcgaaacgacgcgccctgtcaagtagcgttattagggaattgaaagagcagtattcagacgcaccagaggagatacgtgatgcccgacaccctcatgtgacacgacagagccaggaggatcaacatcgtatcaattacgaggagtcaatgatggtgaggcttagcgtgtctaagagagagaagggccgccgtaagagagccaatgtcatgagcagccagctgcactctttgactcacttttcagatataagcgcacttactggagggaccgtgcacctagacgaagaccagaatccaatcaagaaacgaaagaagattcctcagaaaggccgtaagaagaagggcttccggagaaggcgctag

SEQ ID NO: 187122 - DNA, 2204 bp, Artificial Sequence
  derived and/or modified sequence
gggctttgcgaagatggcggcgctgggggtgctggagtccgacctgccaagtgccgtgacacttctgaaaaatctccaggagcaagtgatggctgtaactgcacaagtgaaatcactgacacaaaaagttcaagctggtgcctatcctacagaaaagggtctcagcttcttggaagtgaaagaccagctgctgctcatgtaccttatggatttgacccacctcattctggacaaagcctcaggaggatctcttcagggacatgatgcagttttgagactggtggagattcgcacggttttggaaaagcttcgtcccttggaccaaaagctgaagtatcaaattgacaagctgatcaagactgcagtgacaggcagccttagtgagaatgacccacttcgttttaagcctcatcccagcaatatgatgagcaagttgagctctgaggatgaggaggaagatgaagcagaagatgaccagtctgaggcttcagggaagaaatctgtgaagggagtgtctaagaaatatgttcctccacgcttggttccagtacattatgatgaaacagaagctgagcgggagaagaagcgtctagaacgagccaagagacgggcattgagcagctctgtcattcgtgaacttaaggagcagtactcagatgctccagaggaaatccgtgatgctcggcatccccatgttacccgccagagtcaggaggaccaacacaggattaactatgaggagagcatgatggtgcgtttgagcgtcagtaagcgagagaaaggacggcgaaaacgagcaaatgtcatgagctcacaacttcattcccttacacacttcagtgacatcagtgctttgacagggggaactgttcatcttgatgaggatcagaatcctattaagaagcggaagaagatacctcagaaaggtcggaagaaaaaaggtcagtgaactgctgggacttaggtgatcaggtgcaaggtggggagtacaaattgagtctctttggatttgccattctgggtctcaccaagccctgtagtatctcttccatactgggcaataatctccttaggtgggcttttattttttgctttcctgagctggaaatcagcatcattcacaaaatgaatctctggattctgcctctaaggtcccacagctcctgttcaggcttccctaaatagaactggtaaagtgtcacttgaaggaaccattatcccatttcaattttattcctacttctcgtcttttgtcctgggaagatattcagggtactgcctaggagaccccacccctgtgagcccttccctctagatgtcctgttttcctgtccctttagcttttccaactgtcctttgcctcattcttggtttcccttcctttcaggttttcggaggcggcggtgattatgggtgtacatatttgtatattttttgtcatcctgagatacttctaatttcattgtatataggtggttttccctggaattcattaattgtttgctttggacatgtggaaagagccttactaataaaattgattttgcttatgaattaaagcccctttttgcacatgtattgtacgactggagtcgttgggtttgggatatttttggtgagtggttggtgaaaagggaaattttttttggaagtgcaaaacatttgtattgttttctttgataatatatttttcccaaaaactaaaaattggttacgtcacaaaaagtattgagagacgaggctggtataatcaactctttcaacccatgttgccacaacttcctgtatgatttgttataatacaatacagattgagatattaacacatgaattttaggttttattagtgttatctgggctggccaccaggtggcataagtggttcaagaaacttgagcttggctgtaatcaaaagcaagatagaacctttccacatcagcaagattattcttatctccacttctctgaatgtttttcatttctttctgaaatagcatgaacataaggctgatctttggtcagttactgagggagtttgtagaaaatagtagagtgagtaagaaggctagagtgaagagtcagtatagtcttgtgtttttcagactctgacccccacccccccgccttcaactgagggtcattttaccagagtcaataaaggccaacccttctataaagagctggcaaaaaaaaaaaaaaaaaaa

SEQ ID NO: 187123 - DNA, 1143 bp, Artificial Sequence
  derived and/or modified sequence
gacaccggaaggggtgggctttgcgaagatggcggcgctgggggtgctggagtccgacctgccaagtgccgtgacacttctgaaaaatctccaggagcaagtgatggctgtaactgcacaagtgaaatcactgacacaaaaagttcaagctggtgcctatcctacagaaaagggtctcagcttcttggaagtgaaagaccagctgctgctcatgtaccttatggatttgacccacctcattctggacaaagcctcaggaggatctcttcagggacatgatgcagttttgagactggtggagattcgcacggttttggaaaagcttcgtcccttggaccaaaagctgaagtatcaaattgacaagctgatcaagactgcagtgacaggcagccttagtgagaatgacccacttcgttttaagcctcatcccagcaatatgatgagcaagttgagctctgaggatgaggaggaagatgaagcagaagatgaccagtctgaggcttcagggaagaaatctgtgaagggagtgtctaagaaatatgttcctccacgcttggttccagtacattatgatgaaacagaagctgagcgggagaagaagcgtctagaacgagccaagagacgggcattgagcagctctgtcattcgtgaacttaaggagcagtactcagatgctccagaggaaatccgtgatgctcggcatccccatgttacccgccagagtcaggaggaccaacacaggattaactatgaggagagcatgatggtgcgtttgagcgtcagtaagcgagagaaaggacggcgaaaacgagcaaatgtcatgagctcacaacttcattcccttacacacttcagtgacatcagtgctttgacagggggaactgttcatcttgatgaggatcagaatcctattaagaagcggaagaagatacctcagaaaggtcggaagaaaaaaggttttcggaggcggcggtgattatgggtgtacatatttgtatattttttgtcatcctgagatacttctaatttcattgtatataggtggttttccctggaattcattaattgtttgctttggacatgtggaaagagccttactaataaaattgattttgcttatgaattaaagcccctttttgcaca

SEQ ID NO: 187124 - DNA, 936 bp, Artificial Sequence
  derived and/or modified sequence
atggctgccctcggagtcctcgaaagcgacctcccgtctgcggtcaccctgttgaagaaccttcaggagcaggtgatggcagtgactgctcaggtcaaatcactgactcagaaggtgcaggcaggcgcttatcctaccgagaagggcttatccttcctggaggtcaaggaccagttattactgatgtatctgatggatttgacacatctgattttggataaggccagtggaggatcactccaaggccacgacgccgtgctgcggctagtggaaataagaactgtgctggagaaactgaggccgctggaccaaaagctgaaatatcagatcgacaagctcattaaaaccgccgtcaccgggagcctgtccgaaaatgacccgttgaggttcaagccccatccaagcaacatgatgtctaaactctctagcgaggatgaagaggaggatgaggcggaagatgaccagtctgaggcctccggaaagaaatcagtcaagggggtaagcaaaaagtacgtgcctcccaggctagtccccgtgcactacgacgaaacagaggctgagagggagaagaagcgtctagagcgggctaagcggcgagccctcagtagtagcgtgattagggagctcaaagaacaatattctgacgctccagaggagatacgggacgcacggcatccccacgtgactaggcagtcccaggaagaccagcatcgtatcaattacgaagagagcatgatggttagattaagcgtctctaagagggagaaaggcaggaggaagcgggctaatgttatgagctcccagctccactcactgactcacttctctgacatcagtgctcttacaggcggtactgtccatctcgatgaagatcagaaccccatcaaaaagagaaagaaaatcccacaaaaaggaaggaaaaagaaaggacagtag

SEQ ID NO: 187125 - DNA, 948 bp, Artificial Sequence
  derived and/or modified sequence
atggcagccctgggagtactcgaaagcgacttgccttccgctgtgacactgctaaagaatctccaggagcaggtcatggcagttaccgctcaggtgaaatctctaactcagaaagtacaggccggagcctaccctactgaaaagggcctgagctttttagaggtcaaagaccagctcctcctaatgtacttgatggaccttacccacctgatcttggataaggccagcggcggatctctgcagggacacgatgcagtattgcggctggtggagatcagaaccgtgttagaaaaactgagacctttagaccagaaactgaaataccagatcgataagctgatcaaaaccgcagtcacaggatctttatcagagaacgatcctctgcggttcaagccccacccttccaacatgatgtcaaagctctcttccgaggatgaagaggaggatgaggccgaagatgaccaatcagaggcctcagggaagaaatctgtcaaaggcgtgagcaagaagtatgtcccccctaggctcgtgccagttcattatgacgaaaccgaggccgaaagggaaaaaaagaggcttgagagggcaaagcggcgagccttgtcctcgtccgttattagagaactgaaagaacagtactccgatgctccagaagagatccgagacgcgcgtcacccacacgtgacgcggcaatcccaagaggaccagcaccgaatcaactatgaggagtccatgatggtgagactgtctgtgtccaaaagagaaaaaggacggaggaaaagggctaatgtgatgtcaagccagcttcactccctgacccactttagtgacatatcagccctgaccggtggtaccgttcacctcgacgaggaccagaaccctatcaaaaaaaggaaaaagataccccagaaaggcagaaaaaagaagggttttcggaggagacgctag

SEQ ID NO: 187126 - DNA, 936 bp, Artificial Sequence
  derived and/or modified sequence
atggccgccctgggcgtgctggagagcgacctgcccagcgccgtgaccctgctgaagaacctgcaggagcaggtgatggccgtgaccgcccaggtgaagagcctgacccagaaggtgcaggccggcgcctaccccaccgagaagggcctgagcttcctggaggtgaaggaccagctgctgctgatgtacctgatggacctgacccacctgatcctggacaaggccagcggcggcagcctgcagggccacgacgccgtgctgagactggtggagatcagaaccgtgctggagaagctgagacccctggaccagaagctgaagtaccagatcgacaagctgatcaagaccgccgtgaccggcagcctgagcgagaacgaccccctgagattcaagccccaccccagcaacatgatgagcaagctgagcagcgaggacgaggaggaggacgaggccgaggacgaccagagcgaggccagcggcaagaagagcgtgaagggcgtgagcaagaagtacgtgccccccagactggtgcccgtgcactacgacgagaccgaggccgagagagagaagaagagactggagagagccaagagaagagccctgagcagcagcgtgatcagagagctgaaggagcagtacagcgacgcccccgaggagatcagagacgccagacacccccacgtgaccagacagagccaggaggaccagcacagaatcaactacgaggagagcatgatggtgagactgagcgtgagcaagagagagaagggcagaagaaagagagccaacgtgatgagcagccagctgcacagcctgacccacttcagcgacatcagcgccctgaccggcggcaccgtgcacctggacgaggaccagaaccccatcaagaagagaaagaagatcccccagaagggcagaaagaagaagggccagtag

SEQ ID NO: 187127 - DNA, 948 bp, Artificial Sequence
  derived and/or modified sequence
atggccgccctgggcgtgctggagagcgacctgcccagcgccgtgaccctgctgaagaacctgcaggagcaggtgatggccgtgaccgcccaggtgaagagcctgacccagaaggtgcaggccggcgcctaccccaccgagaagggcctgagcttcctggaggtgaaggaccagctgctgctgatgtacctgatggacctgacccacctgatcctggacaaggccagcggcggcagcctgcagggccacgacgccgtgctgagactggtggagatcagaaccgtgctggagaagctgagacccctggaccagaagctgaagtaccagatcgacaagctgatcaagaccgccgtgaccggcagcctgagcgagaacgaccccctgagattcaagccccaccccagcaacatgatgagcaagctgagcagcgaggacgaggaggaggacgaggccgaggacgaccagagcgaggccagcggcaagaagagcgtgaagggcgtgagcaagaagtacgtgccccccagactggtgcccgtgcactacgacgagaccgaggccgagagagagaagaagagactggagagagccaagagaagagccctgagcagcagcgtgatcagagagctgaaggagcagtacagcgacgcccccgaggagatcagagacgccagacacccccacgtgaccagacagagccaggaggaccagcacagaatcaactacgaggagagcatgatggtgagactgagcgtgagcaagagagagaagggcagaagaaagagagccaacgtgatgagcagccagctgcacagcctgacccacttcagcgacatcagcgccctgaccggcggcaccgtgcacctggacgaggaccagaaccccatcaagaagagaaagaagatcccccagaagggcagaaagaagaagggcttcagaagaagaagatag

SEQ ID NO: 187128 - protein, 422 aa, Artificial Sequence
  derived and/or modified sequence
MNSGHSFSQTPSASFHGAGGGWGRPRSFPRAPTVHGGAGGARISLSFTTRSCPPPGGSWGSGRSSPLLGGNGKATMQNLNDRLASYLEKVRALEEANMKLESRILKWHQQRDPGSKKDYSQYEENITHLQEQIVDGKMTNAQIILLIDNARMAVDDFNLKYENEHSFKKDLEIEVEGLRRTLDNLTIVTTDLEQEVEGMRKELILMKKHHEQEMEKHHVPSDFNVNVKVDTGPREDLIKVLEDMRQEYELIIKKKHRDLDTWYKEQSAAMSQEAASPATVQSRQGDIHELKRTFQALEIDLQTQYSTKSALENMLSETQSRYSCKLQDMQEIISHYEEELTQLRHELERQNNEYQVLLGIKTHLEKEITTYRRLLEGESEGTREESKSSMKVSATPKIKAITQETINGRLVLCQVNEIQKHA

SEQ ID NO: 187129 - DNA, 1269 bp, Artificial Sequence
  derived and/or modified sequence
atgaacagcggccacagcttcagccagacccccagcgccagcttccacggcgccggcggcggctggggcagacccagaagcttccccagagcccccaccgtgcacggcggcgccggcggcgccagaatcagcctgagcttcaccaccagaagctgccccccccccggcggcagctggggcagcggcagaagcagccccctgctgggcggcaacggcaaggccaccatgcagaacctgaacgacagactggccagctacctggagaaggtgagagccctggaggaggccaacatgaagctggagagcagaatcctgaagtggcaccagcagagagaccccggcagcaagaaggactacagccagtacgaggagaacatcacccacctgcaggagcagatcgtggacggcaagatgaccaacgcccagatcatcctgctgatcgacaacgccagaatggccgtggacgacttcaacctgaagtacgagaacgagcacagcttcaagaaggacctggagatcgaggtggagggcctgagaagaaccctggacaacctgaccatcgtgaccaccgacctggagcaggaggtggagggcatgagaaaggagctgatcctgatgaagaagcaccacgagcaggagatggagaagcaccacgtgcccagcgacttcaacgtgaacgtgaaggtggacaccggccccagagaggacctgatcaaggtgctggaggacatgagacaggagtacgagctgatcatcaagaagaagcacagagacctggacacctggtacaaggagcagagcgccgccatgagccaggaggccgccagccccgccaccgtgcagagcagacagggcgacatccacgagctgaagagaaccttccaggccctggagatcgacctgcagacccagtacagcaccaagagcgccctggagaacatgctgagcgagacccagagcagatacagctgcaagctgcaggacatgcaggagatcatcagccactacgaggaggagctgacccagctgagacacgagctggagagacagaacaacgagtaccaggtgctgctgggcatcaagacccacctggagaaggagatcaccacctacagaagactgctggagggcgagagcgagggcaccagagaggagagcaagagcagcatgaaggtgagcgccacccccaagatcaaggccatcacccaggagaccatcaacggcagactggtgctgtgccaggtgaacgagatccagaagcacgcctag

SEQ ID NO: 187130 - DNA, 1269 bp, Artificial Sequence
  derived and/or modified sequence
atgaattctggacatagttttagccagacgccttcggcttcttttcacggagccggagggggctggggtaggcctaggtcttttccacgagctcctaccgtgcacggtggtgccggtggagccagaatatcgctgagttttaccactcgatcgtgccccccacccgggggcagctgggggtccgggcggtctagtcctctcctgggaggcaatggtaaagccactatgcaaaatcttaacgacagactagcatcttatctagaaaaggttagggccctggaggaagctaatatgaaactggagtcgaggatcctgaagtggcaccagcaacgtgaccccgggtctaagaaagactattcccagtatgaggagaatatcacccatcttcaggaacaaatcgtggacggcaagatgacaaacgcacagataatcttgctgatagacaacgcaaggatggcggttgacgacttcaacctgaagtatgagaacgagcactcctttaagaaggacctcgaaatcgaggttgaaggcctgcgaagaacactggacaacctgacaattgtcactaccgatctggagcaggaagtcgagggtatgcgaaaagagttgatacttatgaaaaagcaccatgagcaagagatggagaaacaccatgtcccctccgattttaatgtcaatgtaaaagtggacactgggcctagagaagatctgattaaagtgctggaagacatgcgccaggagtacgaattgattataaaaaagaagcatcgggatctggatacatggtataaagaacagagcgcggctatgtcccaggaggcagcaagccctgcaaccgtgcaatcgcggcagggagacatccatgaattgaagcgcacctttcaggccctagaaatcgatttgcagacccagtatagtaccaaatctgcactggagaacatgctgtcagaaactcagtcgcgatatagctgtaaattgcaggacatgcaggagatcatatcccactacgaggaggagctgacacagcttcggcacgagctagagaggcagaataacgagtatcaggtgttactggggatcaaaacacaccttgaaaaggagattacaacataccgcagacttctggaaggggagtcggaggggacaagggaagagtcaaagtctagcatgaaggtctcggccacccctaagatcaaggcaatcacgcaggagactatcaatggccggctggtcctgtgtcaggtgaatgagatccagaaacatgcttag

SEQ ID NO: 187131 - DNA, 1269 bp, Artificial Sequence
  derived and/or modified sequence
atgaacagcggccacagcttcagccagacccccagcgccagcttccacggggccggcggcggctggggccggcccaggagcttcccccgggcccccaccgtgcatggaggagctgggggcgcccgcatcagcctgtccttcaccaccaggagctgccccccacctgggggctcctggggcagcggccgcagcagccccctgctgggcggcaatggcaaggccaccatgcagaacctgaatgaccggctggccagctacctggagaaggtgcgggccctggaggaggccaacatgaagctggagagccgcatcctgaagtggcaccagcagagggaccccggcagcaagaaggactacagccagtatgaggagaacatcacccacctgcaggagcagatcgtggatggcaagatgaccaatgcccagatcatcctgctgattgacaatgccaggatggctgtggatgacttcaacctgaagtatgaaaatgagcacagcttcaagaaggacctggagattgaggtggagggcctgcggaggaccctggacaacctgaccatcgtgaccacagacctggagcaggaggtggagggcatgaggaaggagctgatcctgatgaagaagcaccacgagcaggagatggagaagcaccacgtgcccagcgacttcaacgtgaatgtgaaggtggacaccggccccagagaagatctcatcaaggtgctggaggacatgaggcaggagtatgagctgatcatcaagaagaagcaccgggacctggacacctggtacaaggagcagagcgctgccatgagccaggaggccgccagccctgccaccgtgcagagccggcagggcgacatccacgagctgaagaggaccttccaggccctggagattgacctgcagacccagtacagcaccaagagcgccctggagaacatgctgtctgagacccagagccgctacagctgcaagctgcaggacatgcaggagatcatcagccactatgaggaggagctgacccagctgcggcatgagctggagcggcagaacaatgagtaccaggtgctgctgggcatcaagacccacctggagaaggagatcaccacctaccgccgcctgctggagggggagagcgagggcacccgggaggagagcaagagctccatgaaggtgtctgccacccccaagatcaaggccatcacccaggagaccatcaatggccgcctggtgctgtgccaggtgaatgagatccagaagcacgcctag

SEQ ID NO: 187132 - DNA, 1269 bp, Artificial Sequence
  derived and/or modified sequence
atgaacagcggccacagcttcagccagacccccagcgccagcttccatggggctggtggcgggtggggaagacctagaagtttcccccgagccccaactgttcatggtggcgcagggggagctcggattagcctaagcttcaccacacgatcatgccctcccccgggtggctcttggggatcaggccgctcctctccactgttaggggggaatggcaaggctaccatgcagaaccttaacgaccggcttgccagttacctagagaaggtgagagccctggaagaggccaacatgaagctggagtcacggattcttaaatggcatcaacaaagagatccaggcagtaagaaagattactctcagtatgaggagaatattacccatcttcaggaacaaattgtggatggcaagatgaccaacgcccagattattctccttatagacaatgcccgcatggctgtggacgattttaatctgaagtacgagaacgaacactcattcaagaaggacctggaaattgaggtggagggactgcgccggacacttgataatctgacaatagtgaccactgatctggagcaagaagtggagggcatgaggaaggagttgatactgatgaaaaagcaccatgagcaggaaatggagaaacatcacgtaccctcagacttcaacgttaacgtgaaggtcgatactgggcctcgcgaggatctcatcaaagtcctggaagacatgaggcaggaatatgagctgatcattaagaaaaaacacagagatttggacacctggtataaggagcaaagtgccgcaatgagtcaggaagctgcctcccctgctacagtgcagtctcgacaaggggatatccacgaactgaaacgcacctttcaggctctcgaaattgacctgcagacacagtattctaccaagtctgccctggaaaatatgctcagtgaaacacagagccgatattcctgtaaactgcaggacatgcaggagatcatttcccactacgaggaagagctgacccagctgaggcatgaactcgaacggcagaacaatgaataccaggtcttgctaggcataaaaacacatctggaaaaggaaatcaccacgtataggcggctgctagaaggtgaatccgaaggtacacgcgaggagtctaaatcatccatgaaggtgtcagcaacccctaagattaaagctattacacaggagaccatcaatggccgcttagtattatgccaggtgaatgagatacaaaaacacgcgtag

SEQ ID NO: 187133 - DNA, 1269 bp, Artificial Sequence
  derived and/or modified sequence
atgaattccggccactcctttagtcagacgccctctgcaagcttccatggggcagggggtggctggggcagacccagaagcttcccaagagcaccaacggtgcatggaggggcaggcggagctcggattagtctgagttttaccacccgcagctgccccccacctggtgggagctggggctctggtagaagttctccgttgcttggcggaaatgggaaggccactatgcagaatctgaatgatcggctcgcgtcctaccttgagaaagtcagggctttggaggaggccaacatgaagctggaatcaaggatattaaaatggcaccagcagagggaccctgggagtaaaaaggactactcacaatatgaggagaacatcactcacctacaggagcagatcgtggatggcaaaatgacaaatgctcagattattcttcttattgataatgcacgaatggctgttgatgattttaatttaaaatacgagaacgaacactcattcaagaaggacctcgagatcgaggtcgaaggcctaaggcgtacgctggacaatttgactatcgtcacaacagatctggagcaagaagtcgaggggatgcgcaaagagcttattttgatgaagaaacaccatgagcaggagatggagaaacatcatgtcccttcagactttaatgtgaacgtgaaagtggatacggggcctagagaggaccttataaaggttcttgaagacatgaggcaagagtacgaactaattataaagaagaaacaccgcgacctggacacctggtacaaggaacagtccgccgctatgtcccaggaggcagcaagccccgctacggtacagagtcgccagggcgacattcatgagttaaagagaacattccaagcactggaaatcgatttgcaaacacagtatagcaccaagagtgcgctcgaaaacatgctgagtgaaactcaaagtcgttatagctgtaagctgcaggacatgcaagagattatctcccactacgaggaggaacttacacagctgaggcacgagctggaacgccagaataatgagtaccaggtgcttctgggcatcaagacgcatctggagaaagagatcacaacttatcgcagactgctggaaggcgagtccgagggcaccagggaggaatccaaaagttcaatgaaggtgtccgctacacctaaaatcaaggccattacacaggagacaattaatggtcgactcgtgttatgtcaggtcaacgaaatccagaagcacgcatag

SEQ ID NO: 187134 - DNA, 1987 bp, Artificial Sequence
  derived and/or modified sequence
gggaaatcctgagcgcaggccagggttgtttggttttgaggtgtgctgggatgaaaggcaccctggaagtggaaggtaaatgaacaatggaaaaacttcacggcaagattagaaagatacctgagcccaatacccgcctgatgtcgtgggccacacctccgggttaccaggggaagggaggaagcaaactgtcatattgatgtggctctaaacaacaacagtgtgcgaaggcccaggggcactttgggattgaccaagaggaaacacaagttgcacaatgatacaatcttgttggtacaattgtcagagaagggaactcccacagcaaaggccataaaaccatccagggcagtctggggcggctcagttctgcggtgccagggagtggagcagagctcagccccgtcccaaacacagatgggaccatgaactccggacacagcttcagccagaccccctcggcctccttccatggcgccggaggtggctggggccggcccaggagcttccccagggctcccaccgtccatggcggtgcggggggagcccgcatctccctgtccttcaccacgcggagctgcccaccccctggagggtcttggggttctggaagaagcagccccctactaggcggaaatgggaaggccaccatgcagaatctcaacgaccgcctggcctcctacctggagaaggttcgcgccctggaggaggccaacatgaagctggaaagccgcatcctgaaatggcaccagcagagagatcctggcagtaagaaagattattcccagtatgaggaaaacatcacacacctgcaggagcagatagtggatggtaagatgaccaatgctcagattattcttctcattgacaatgccaggatggcagtggatgacttcaacctcaagtatgaaaatgaacactcctttaagaaagacttggaaattgaagtcgagggcctccgaaggaccttagacaacctgaccattgtcacaacagacctagaacaggaggtggaaggaatgaggaaagagctcattctcatgaagaagcaccatgagcaggaaatggagaagcatcatgtgccaagtgacttcaatgtcaatgtgaaggtggatacaggtcccagggaagatctgattaaggtcctggaggatatgagacaagaatatgagcttataataaagaagaagcatcgagacttggacacttggtataaagaacagtctgcagccatgtcccaggaggcagccagtccagccactgtgcagagcagacaaggtgacatccacgaactgaagcgcacattccaggccctggagattgacctgcagacacagtacagcacgaaatctgctttggaaaacatgttatccgagacccagtctcggtactcctgcaagctccaggacatgcaagagatcatctcccactatgaggaggaactgacgcagctacgccatgaactggagcggcagaacaatgaataccaagtgctgctgggcatcaaaacccacctggagaaggaaatcaccacgtaccgacggctcctggagggagagagtgaagggacacgggaagaatcaaagtcgagcatgaaagtgtctgcaactccaaagatcaaggccataacccaggagaccatcaacggaagattagttctttgtcaagtgaatgaaatccaaaagcacgcatgagaccaatgaaagtttccgcctgttgtaaaatctattttcccccaaggaaagtccttgcacagacaccagtgagtgagttctaaaagatacccttggaattatcagactcagaaacttttattttttttttctgtaacagtctcaccagacttctcataatgctcttaatatattgcacttttctaatcaaagtgcgagtttatgagggtaaagctctactttcctactgcagccttcagattctcatcattttgcatctattttgtagccaataaaactccgcactagctgca

SEQ ID NO: 187135 - DNA, 1487 bp, Artificial Sequence
  derived and/or modified sequence
taacaacggctacattcctcccccagggccaagggaaatcctgagcgcaggccagggttgtttggttttgaggtgtgctgggatgaaaggcaccctggaagtggaaggttcggtcattcattaattaattacatctataattgagggtttgttcttaagagcgagtcctttgaaagtactttccttcaaacagtgactgccacaaaggcatcagatattcaccaccttctcggctgcctcagcacagcaagctttattctgggacctgagatcctgttctgagctggctttcccttctccaggctcgctcaccctccctttagagatagtggatggtaagatgaccaatgctcagattattcttctcattgacaatgccaggatggcagtggatgacttcaacctcaagtatgaaaatgaacactcctttaagaaagacttggaaattgaagtcgagggcctccgaaggaccttagacaacctgaccattgtcacaacagacctagaacaggaggtggaaggaatgaggaaagagctcattctcatgaagaagcaccatgagcaggaaatggagaagcatcatgtgccaagtgacttcaatgtcaatgtgaaggtggatacaggtcccagggaagatctgattaaggtcctggaggatatgagacaagaatatgagcttataataaagaagaagcatcgagacttggacacttggtataaagaacagtctgcagccatgtcccaggaggcagccagtccagccactgtgcagagcagacaaggtgacatccacgaactgaagcgcacattccaggccctggagattgacctgcagacacagtacagcacgaaatctgctttggaaaacatgttatccgagacccagtctcggtactcctgcaagctccaggacatgcaagagatcatctcccactatgaggaggaactgacgcagctacgccatgaactggagcggcagaacaatgaataccaagtgctgctgggcatcaaaacccacctggagaaggaaatcaccacgtaccgacggctcctggagggagagagtgaagggacacgggaagaatcaaagtcgagcatgaaagtgtctgcaactccaaagatcaaggccataacccaggagaccatcaacggaagattagttctttgtcaagtgaatgaaatccaaaagcacgcatgagaccaatgaaagtttccgcctgttgtaaaatctattttcccccaaggaaagtccttgcacagacaccagtgagtgagttctaaaagatacccttggaattatcagactcagaaacttttattttttttttctgtaacagtctcaccagacttctcataatgctcttaatatattgcacttttctaatcaaagtgcgagtttatgagggtaaagctctactttcctactgcagccttcagattctcatcattttgcatctattttgtagccaataaaactccgcactagc

SEQ ID NO: 187136 - DNA, 372 bp, Artificial Sequence
  derived and/or modified sequence
atgcccgatgccagtctgggcagcttgggaattacgtggtgcttcctggagagccccctggaggtatccagcggaaggttcggactggcacggctgttagggtcccaggatcatggagatgacccagccgaacgcggtcggacagcaacagatgcatggggaccttccaggtgggggcagagtccgggtaatggaggcggttactgcgacgcatcccctccatctgcgcttgcaccaggggaccgcgcgtgggctctgccagcctccccctctagcggcgctcctgcctctcagcattgctgcctggagaaggctggaaccaggactaaggcgtcacccgtctgggggcgggacggaaatacttggaattag

SEQ ID NO: 187137 - protein, 1287 aa, Artificial Sequence
  derived and/or modified sequence
MSKVIQKKNHWTSRVHECTVKRGPQGELGVTVLGGAEHGEFPYVGAVAAVEAAGLPGGGEGPRLGEGELLLEVQGVRVSGLPRYDVLGVIDSCKEAVTFKAVRQGGRLNKDLRHFLNQRFQKGSPDHELQQTIRDNLYRHAVPCTTRSPREGEVPGVDYNFLTVKEFLDLEQSGTLLEVGTYEGNYYGTPKPPSQPVSGKVITTDALHSLQSGSKQSTPKRTKSYNDMQNAGIVHAENEEEDDVPEMNSSFTADSGEQEEHTLQETALPPVNSSIIAAPITDPSQKFPQYLPLSAEDNLGPLPENWEMAYTENGEVYFIDHNTKTTSWLDPRCLNKQQKPLEECEDDEGVHTEELDSELELPAGWEKIEDPVYGIYYVDHINRKTQYENPVLEAKRKKQLEQQQQQQQQQQQQQQQQQQQQTEEWTEDHSALVPPVIPNHPPSNPEPAREVPLQGKPFFTRNPSELKGKFIHTKLRKSSRGFGFTVVGGDEPDEFLQIKSLVLDGPAALDGKMETGDVIVSVNDTCVLGHTHAQVVKIFQSIPIGASVDLELCRGYPLPFDPDDPNTSLVTSVAILDKEPIIVNGQETYDSPASHSSKTGKVNGMKDARPSSPADVASNSSHGYPNDTVSLASSIATQPELITVHIVKGPMGFGFTIADSPGGGGQRVKQIVDSPRCRGLKEGDLIVEVNKKNVQALTHNQVVDMLVECPKGSEVTLLVQRGGLPVPKKSPKSQPLERKDSQNSSQHSVSSHRSLHTASPSHSTQVLPEFPPAEAQAPDQTDSSGQKKPDPFKIWAQSRSMYENRPMSPSPASGLSKGEREREINSTNFGECPIPDYQEQDIFLWRKETGFGFRILGGNEPGEPIYIGHIVPLGAADTDGRLRSGDELICVDGTPVIGKSHQLVVQLMQQAAKQGHVNLTVRRKVVFAVPKTENEVPSPASSHHSSNQPASLTEEKRTPQGSQNSLNTVSSGSGSTSGIGSGGGGGSGVVSTVVQPYDVEIRRGENEGFGFVIVSSVSRPEAGTTFGNACVAMPHKIGRIIEGSPADRCGKLKVGDRILAVNGCSITNKSHSDIVNLIKEAGNTVTLRIIPGDESSNATLLTNAEKIATITTTHTPSQQGTQETRNTTKPKQESQFEFKAPQATQEQDFYTVELERGAKGFGFSLRGGREYNMDLYVLRLAEDGPAERCGKMRIGDEILEINGETTKNMKHSRAIELIKNGGRRVRLFLKRGDGSVPEYAMIPPNIAACMRNEKLGEACFYLMGHNQTTTPAATATAPPPVHKVFRK

SEQ ID NO: 187138 - protein, 1183 aa, Artificial Sequence
  derived and/or modified sequence
GGRLNKDLRHFLNQRFQKGSPDHELQQTIRDNLYRHAVPCTTRSPREGEVPGVDYNFLTVKEFLDLEQSGTLLEVGTYEGNYYGTPKPPSQPVSGKVITTDALHSLQSGSKQSTPKRTKSYNDMQNAGIVHAENEEEDDVPEMNSSFTADSGEQEEHTLQETALPPVNSSIIAAPITDPSQKFPQYLPLSAEDNLGPLPENWEMAYTENGEVYFIDHNTKTTSWLDPRCLNKQQKPLEECEDDEGVHTEELDSELELPAGWEKIEDPVYGIYYVDHINRKTQYENPVLEAKRKKQLEQQQQQQQQQQQQQQQQQQQQTEEWTEDHSALVPPVIPNHPPSNPEPAREVPLQGKPFFTRNPSELKGKFIHTKLRKSSRGFGFTVVGGDEPDEFLQIKSLVLDGPAALDGKMETGDVIVSVNDTCVLGHTHAQVVKIFQSIPIGASVDLELCRGYPLPFDPDDPNTSLVTSVAILDKEPIIVNGQETYDSPASHSSKTGKVNGMKDARPSSPADVASNSSHGYPNDTVSLASSIATQPELITVHIVKGPMGFGFTIADSPGGGGQRVKQIVDSPRCRGLKEGDLIVEVNKKNVQALTHNQVVDMLVECPKGSEVTLLVQRGGLPVPKKSPKSQPLERKDSQNSSQHSVSSHRSLHTASPSHSTQVLPEFPPAEAQAPDQTDSSGQKKPDPFKIWAQSRSMYENRPMSPSPASGLSKGEREREINSTNFGECPIPDYQEQDIFLWRKETGFGFRILGGNEPGEPIYIGHIVPLGAADTDGRLRSGDELICVDGTPVIGKSHQLVVQLMQQAAKQGHVNLTVRRKVVFAVPKTENEVPSPASSHHSSNQPASLTEEKRTPQGSQNSLNTVSSGSGSTSGIGSGGGGGSGVVSTVVQPYDVEIRRGENEGFGFVIVSSVSRPEAGTTFGNACVAMPHKIGRIIEGSPADRCGKLKVGDRILAVNGCSITNKSHSDIVNLIKEAGNTVTLRIIPGDESSNATLLTNAEKIATITTTHTPSQQGTQETRNTTKPKQESQFEFKAPQATQEQDFYTVELERGAKGFGFSLRGGREYNMDLYVLRLAEDGPAERCGKMRIGDEILEINGETTKNMKHSRAIELIKNGGRRVRLFLKRGDGSVPEYAMIPPNIAACMRNEKLGEACFYLMGHNQTTTPAATATAPPPVHKVFRK

SEQ ID NO: 187139 - DNA, 3864 bp, Artificial Sequence
  derived and/or modified sequence
atgtccaaggtaattcagaagaagaatcactggaccagtagagtgcacgagtgtactgtgaagagaggaccacagggagagctcggtgttactgtgttggggggcgctgaacacggggaattcccctacgtgggagcagtcgccgctgtggaggcagccgggcttccgggcggaggcgagggacccagactgggtgagggggaactcttactggaggtgcagggggtgagagtgagcggccttccccgttacgacgtcctgggggtgattgactcatgtaaagaagccgtgaccttcaaagccgtacgccagggtgggcggctcaataaagatctacgacattttctgaaccaaaggtttcagaagggttcacccgaccacgagctgcagcagactattcgtgataacctgtacaggcacgctgtgccctgtaccactcggtctccccgagagggagaggtgccgggcgttgactacaacttcctcacggtaaaagagttcctcgacctcgagcagagcggcaccctgttagaagtgggaacttacgagggtaactattatgggacccccaaaccgcccagtcagcctgtgagtgggaaagtgattactactgatgctttgcatagcttgcaatcggggagcaaacagtcaaccccgaaaagaacaaagtcttataacgatatgcagaacgctggaattgttcatgcagaaaatgaagaagaagatgatgtcccagagatgaattccagcttcaccgcggactcaggcgagcaagaagagcacaccttgcaggagacagctctgcctccagtcaactccagcattatcgcagccccaatcacggatccatcacagaagtttcctcagtaccttcccctgagtgccgaagataacttaggccctctcccagagaattgggagatggcgtacacagagaatggtgaagtatatttcattgatcacaataccaagactacaagctggctggaccctcgctgcctaaacaagcagcagaagcctctcgaggaatgcgaggatgacgagggcgtgcacaccgaggagctggatagcgagctcgagcttcctgccggatgggaaaaaatagaggatccagtctatggcatctactacgtcgaccacataaatagaaagactcagtacgagaatcctgtcctcgaggccaaaagaaaaaagcaactggaacagcagcagcagcagcagcaacagcagcagcagcagcagcagcaacagcaacaacaacagaccgaggagtggacagaggatcacagtgcccttgttccccctgtgatccctaatcaccctcctagcaaccccgagcccgcacgcgaagttcccttgcaggggaaaccatttttcaccaggaatccttcagagctaaaaggtaagtttattcacacaaagctgagaaagtcatcacggggctttgggttcaccgtggtggggggtgacgaaccagatgagttcctgcaaataaagtcactcgtgctggacggccccgcagctctggatggtaaaatggagacaggagacgtgatcgtttcagtgaacgatacatgtgtcctggggcacactcatgcgcaggtagttaagatcttccagtcaatccctatcggggctagcgttgatctagaactttgccgcggctatccgttgccctttgatccagatgaccccaatacgtcccttgttactagcgtggcaatcctggataaagagccaattatcgtgaacggccaagagacatatgactcccctgcgtcccactccagcaagaccggcaaagtgaatggtatgaaagatgccagaccctcatctccggccgatgtggcctccaacagctcgcacggataccctaatgataccgtgtccttagctagcagtattgctacacagccagaactgataaccgtgcatattgtgaaggggccaatgggcttcggctttacgatcgctgattctccaggaggcggcggccagcgggtcaagcagattgtggacagtccaaggtgcagaggcctgaaggagggcgacttgattgtcgaggtcaataagaaaaatgtccaggctctgacacacaatcaggtcgttgacatgctggtcgaatgcccaaaagggagcgaggtgacactgcttgtgcagagaggcggattacccgtccccaagaagagtccaaagtctcagcctcttgagcgcaaagactcacagaattcaagtcagcattccgtgtcctcccaccgatctctccataccgcaagcccctcccacagcactcaggtgcttccagagtttccccctgccgaggctcaggcccccgaccagacagattccagcggccaaaagaaacctgacccctttaagatttgggcccagagccggagcatgtatgagaatcggcctatgtctccatcccctgcgtcagggctgagcaagggggagcgggagcgtgagattaattcgacaaactttggcgagtgccccatcccggactatcaggagcaggatatctttctttggagaaaagagaccggctttggcttccggattttgggcgggaatgagcctggtgagccaatttatatcggacacatcgtgccccttggcgctgccgataccgatggacgcctgaggagcggggatgagctgatctgtgtggacggcacacctgtaatcggaaaaagccaccagctggtcgtccagttgatgcagcaggccgctaagcaggggcatgtgaatctcacagtgcggagaaaggtcgtgttcgccgtgcccaaaacagagaacgaagtgccttctcctgcatcttctcaccattcatcaaatcagccagctagcctgaccgaagaaaaaagaacacctcagggttcacaaaactccttgaacaccgtaagcagtggctctggctcaacatccggaatcggatctggcggggggggaggttccggcgttgtctcgacagtggttcagccctacgacgtagagatcaggagaggtgaaaatgaagggttcggtttcgtgattgtgtctagcgtcagccgccccgaggcgggaacgacattcggaaatgcctgcgtggctatgccacataagataggcaggatcattgagggaagccctgctgaccgctgcgggaagttgaaggtaggtgacagaatcctcgctgtaaacgggtgtagcatcacaaacaaaagccactccgatatcgttaatttaatcaaagaggcagggaacacagtgaccctgcgcattattcctggcgatgaatctagtaatgcaacccttctcaccaacgccgagaaaatagctactatcacaacaacgcatactccctctcagcaggggacgcaagagaccagaaataccactaagccgaagcaggagtctcagtttgaatttaaagctccgcaagccacacaagagcaggacttctatactgttgagctcgaacggggtgcaaaggggtttggcttcagtctcagaggcggacgcgagtataacatggatctatatgttttgcggctggccgaagatgggcccgccgagcgatgtgggaagatgagaattggcgacgaaatcctggagatcaatggagaaactaccaaaaacatgaagcactccagggccattgaactgattaagaatggcggccgccgggtgcggctgtttctgaagcgcggtgacggatctgtccctgaatacgccatgattcctcccaatattgccgcctgtatgcgcaacgagaagttgggtgaagcctgtttctacctgatgggccataatcagaccaccactcccgccgccacggccacagctccaccacctgtgcataaagtgtttaggaagtag

SEQ ID NO: 187140 - DNA, 3552 bp, Artificial Sequence
  derived and/or modified sequence
ggggggcgcctgaacaaggatcttcgccacttcttgaatcaaagattccagaaaggcagcccggatcatgagctgcagcagaccattcgggacaacctctacaggcatgccgtcccttgtactactagatccccacgtgaaggagaggtgcctggcgtggattataacttccttactgtcaaagagttcttagacttggagcagtcaggaacacttctagaagtcgggacctatgagggaaactactatggaacccccaagcctccctcccagcctgtatcaggtaaagtgattaccacagatgctctccactcactgcagtccggatctaagcagagtacgcccaagcgaacaaaaagctataatgatatgcagaatgcgggcattgtccatgctgagaacgaagaagaggatgacgtgcctgagatgaacagctcctttaccgcagactcaggggagcaggaggaacatacactgcaggagaccgctctgccacccgttaactctagtatcatcgcggcacccattaccgatcccagccaaaagtttccacaatatcttccattatcagcagaagacaatttgggccccttacctgaaaattgggagatggcgtataccgagaacggagaggtttatttcatcgatcacaacaccaagaccacatcgtggttagacccacgctgccttaataagcagcagaagccattagaagagtgcgaggacgatgaaggagtacatactgaggaacttgactctgagcttgaactccccgccggctgggagaaaatcgaggaccccgtttacggaatatattacgtggatcacattaatagaaaaacccagtacgaaaacccggtattggaggcaaagcgcaagaagcaacttgaacagcagcaacagcagcagcagcagcagcagcagcagcaacagcagcaacagcagcaacagacagaagagtggaccgaagaccactccgctctggtgccacccgtgatccccaatcaccctccatcaaatccagagcctgcccgcgaggtccccctccagggaaagccattcttcaccaggaacccgtcagagttgaaaggcaagtttatacacaccaagctccggaaatccagtcggggctttggctttactgttgtggggggcgatgagccagacgagttccttcaaattaagtccctggtcttggacggccctgcagcattagatgggaaaatggagactggggatgtgatcgtcagcgtaaatgacacatgcgtactgggccacacacacgcacaggtggtgaagattttccaatctatcccgatcggcgcaagcgtggatcttgaattatgtagaggatatccactgcccttcgacccggacgatcccaacacctctttagtgacctctgtcgctatcctggacaaggaaccgatcattgtgaatggtcaggagacctacgactcaccagctagccactcatcaaaaaccgggaaggtcaatggaatgaaagacgccagaccttctagtccagcagacgtagcatcgaacagcagccatggctaccctaatgacaccgtctccttggcaagctctattgctactcagcctgagctgataacagttcatatcgtgaaagggccgatgggctttggattcacaatcgcagattcgccaggcgggggaggccagagagttaagcaaattgtagatagccccaggtgtcggggactgaaggaaggagatctgattgtggaggtcaacaaaaaaaacgtccaggctctgacccataaccaggtagtcgacatgctggttgaatgtccaaaaggaagcgaagtaacccttctggttcagcgtgggggactcccagtccctaagaagtcccccaagtctcagccactcgaaaggaaggactctcagaactcgtctcagcactctgtctctagccatcgctcactacacacagcgtcgccatcacacagcacacaggttctgcctgagttccctccagcagaggctcaggctccagatcagactgattcttctggtcagaagaagcccgacccctttaaaatttgggctcagtccaggtcaatgtacgagaaccgtcccatgtcaccctctcccgcaagcgggttgtctaagggagagcgggagagagaaatcaattcaaccaactttggggaatgccccatccccgactaccaggagcaggatatcttcctgtggaggaaagaaaccgggttcggtttcagaatcctgggtggaaacgagccaggagaacccatttatatagggcatatcgtgcctctcggcgccgcagacactgacggccgcctgcgaagcggcgatgagctcatatgcgtcgacggtactcccgttatcgggaaaagccatcagctcgtggttcaacttatgcagcaggctgcaaaacaaggccacgtgaaccttactgtgcgccggaaagtggtctttgcggtccctaagacagaaaacgaggtgcctagccccgcctcaagtcatcacagttccaatcaacccgctagtctgacagaggaaaagagaacaccccagggcagccagaattccttgaatacagtgtccagtggctccggaagcacgtcaggtatagggtccggaggcgggggcggtagcggagtggtatctactgtagttcagccctatgatgtggagatcagacggggggagaatgaaggcttcggttttgttatcgtgtcatcggtctcccggccagaagctggtacgacatttggcaacgcatgcgtggccatgccgcacaagatcgggcggatcattgagggaagccccgcggacagatgtgggaagctaaaagtgggagataggattctggcagtaaacggttgctctattacaaacaagagtcattctgatatcgttaatttaatcaaagaagccggaaacacagttacgctgagaattattcccggcgatgagagttcgaatgctacccttctgactaacgcagaaaagatcgctacaataactaccactcacaccccatctcaacagggcacacaggagacacgtaacaccaccaagcccaagcaggaatctcaatttgaattcaaggcacctcaggccacacaggagcaggatttctacaccgttgaattagagcgaggcgctaagggctttggtttctccttgagagggggtcgcgagtacaacatggacctgtacgtgctgcggttagccgaggacggcccggcagaaaggtgtgggaaaatgaggatcggtgacgaaatcctcgagataaacggtgagactactaagaacatgaaacattccagggcaatagagctgatcaagaatggtggcaggcgggtgcggctgtttttgaagcgcggcgacgggtctgttccagagtatgcaatgattcctcccaatatagccgcgtgtatgcgcaacgaaaagcttggtgaggcatgtttctatctgatgggtcacaatcagacgacaaccccggctgccacggccacagccccaccgcctgtccacaaagtgtttcgcaaatag

SEQ ID NO: 187141 - DNA, 3864 bp, Artificial Sequence
  derived and/or modified sequence
atgagcaaggtgatccagaagaagaaccactggaccagccgggtgcatgaatgtactgtgaagaggggcccccagggcgagctgggcgtgacagtgctgggcggcgctgagcacggggagttcccctacgtgggcgctgtggccgctgtggaggccgccggcctgcccggcggcggggagggcccccggctgggggagggggagctgctgctggaggtgcagggcgtgcgggtgtctggcctgcccaggtatgatgtgctgggcgtcatcgacagctgcaaggaggccgtgaccttcaaggctgtgcggcagggcggccgcctgaacaaggacctgcggcacttcctgaaccagcgcttccagaagggcagcccagaccacgagctgcagcagaccatccgggacaacctgtacagacatgctgtgccctgcaccaccaggagcccccgggagggggaggtgcctggggtggactacaacttcctgactgtgaaggagttcctggacctggagcagagcggcaccctgctggaggtgggcacctatgagggcaactactacggcacccccaagccacccagccagcctgtgtctgggaaggtgatcaccacagatgccctgcacagcctgcagagcggcagcaagcagagcacccccaagaggaccaagagctacaatgacatgcagaatgccggcatcgtgcatgctgaaaatgaggaggaggatgatgtgcctgagatgaacagcagcttcaccgctgacagcggggagcaggaggagcacaccctgcaggagacagccctgccccctgtgaacagcagcatcatcgccgcccccatcacagaccccagccagaagttcccccagtacctgcccctgtctgctgaggacaacctgggccccctgcctgagaactgggagatggcctacacagaaaatggagaggtgtacttcatcgaccacaacaccaagaccacctcctggctggacccccgctgcctgaacaagcagcagaagcccctggaggagtgtgaagatgatgaaggagtgcacacagaggagctggacagcgagctggagctgcctgctggctgggagaagattgaagatcctgtgtatggcatctactacgtggaccacatcaacaggaagacccagtatgagaaccctgtgctggaggccaagaggaagaagcagctggagcagcagcagcagcagcagcagcagcagcagcagcagcagcagcagcagcagcagcagcagacagaggagtggacagaggaccacagcgccctggtgccccctgtgatccccaaccacccccccagcaaccctgagcccgcccgggaggtgcccctgcagggcaagcccttcttcaccaggaaccccagcgagctgaagggcaagttcatccacaccaagctgaggaagagcagccggggcttcggcttcaccgtggtgggcggagatgagccagatgagttcctgcagatcaagagcctggtgctggatggccctgctgccctggatggcaagatggagactggagatgtgattgtgtctgtgaatgacacctgtgtgctgggccacacccacgcccaggtggtgaagatcttccagagcatccccatcggggcctctgtggacctggagctgtgccggggctaccccctgccctttgatcctgatgaccccaacaccagcctggtgacctctgtggccatcctggacaaggagcccatcatcgtgaatggccaggagacctatgacagccctgccagccacagcagcaagacaggcaaggtgaatggcatgaaggatgcccggcccagcagccctgcagatgtggccagcaacagcagccacggctacccaaatgacacagtgtccctggccagcagcatcgccacccagcctgagctgatcaccgtgcacatcgtgaagggccccatgggcttcggcttcaccatcgctgacagccctgggggcggcggccagagggtgaagcagatcgtggacagcccccgctgccggggcctgaaggagggggacctgattgtggaggtgaacaagaagaatgtgcaggccctgacccacaaccaggtggtggacatgctggtggagtgccccaagggcagcgaggtgaccctgctggtgcagaggggcggcctgcctgtgcccaagaagagccccaagagccagcccctggagaggaaggacagccagaacagcagccagcacagcgtgagcagccacaggagcctgcacacagccagccccagccacagcacccaggtgctgcctgagttccccccagctgaggcccaggccccagaccagacagacagcagcggccagaagaagccagaccccttcaagatctgggcccagagccgctccatgtatgaaaatcggcccatgagccccagccctgccagcggcctgagcaaaggagagcgggagcgggagatcaacagcaccaactttggagaatgtcccatcccagactaccaggagcaggacatcttcctgtggaggaaggagactggatttggcttccgcatcctgggcggcaatgaacctggagagcccatctacatcggccacatcgtgcccctgggcgctgctgacacagatggccgcctgcggtctggagatgagctgatctgtgtggatggcacccctgtgattggcaagagccaccagctggtggtgcagctgatgcagcaggccgccaagcagggccacgtgaacctgactgtgcggaggaaggtggtgtttgctgtgcccaagacagaaaatgaggtgcccagccctgccagcagccaccacagcagcaaccagcctgccagcctgacagaggagaagaggaccccccagggcagccagaacagcctgaacacagtgagcagcggcagcggcagcaccagcggcatcggcagcggcggcggcggcggcagcggcgtggtgtccacagtggtgcagccctatgatgtggagatcagaagaggagaaaatgaaggatttggatttgtgattgtgtcctctgtgtccaggcctgaggccggcaccacctttggaaatgcctgtgtggccatgccccacaagattggccgcatcatcgagggcagccctgctgacagatgtgggaagctgaaggtgggggaccgcatcctggccgtgaatggctgcagcatcaccaacaagagccacagcgacatcgtgaacctgatcaaggaggccggcaacacagtgaccctgcgcatcatccctggagatgagagcagcaatgccaccctgctgaccaatgctgagaagatcgccaccatcaccaccacccacacccccagccagcagggcacccaggagaccaggaacaccaccaagcccaagcaggagagccagtttgagttcaaggccccccaggccacccaggagcaggacttctacacagtggagctggagcggggggccaagggcttcggcttcagcctgcggggcggccgggagtacaacatggacctgtatgtgctgcggctggccgaggatggccctgctgagcgctgtgggaagatgagaattggagatgagatcctggagatcaacggggagaccaccaagaacatgaagcacagccgggccatcgagctgatcaagaatggaggaagaagagtgcggctcttcctgaagagaggagatggctctgtgcctgaatatgccatgatcccccccaacattgctgcctgcatgagaaatgagaagctgggggaggcctgcttctacctgatgggccacaaccagaccaccaccccagctgccacagccacagcccctcctcctgtgcacaaggtgttcaggaagtag

SEQ ID NO: 187142 - DNA, 3552 bp, Artificial Sequence
  derived and/or modified sequence
gggggccgcctgaacaaggacctgcggcacttcctgaaccagcgcttccagaagggcagcccagaccacgagctgcagcagaccatccgggacaacctgtacagacatgctgtgccctgcaccaccaggagcccccgggagggggaggtgcctggggtggactacaacttcctgactgtgaaggagttcctggacctggagcagagcggcaccctgctggaggtgggcacctatgagggcaactactacggcacccccaagccacccagccagcctgtgtctgggaaggtgatcaccacagatgccctgcacagcctgcagagcggcagcaagcagagcacccccaagaggaccaagagctacaatgacatgcagaatgccggcatcgtgcatgctgaaaatgaggaggaggatgatgtgcctgagatgaacagcagcttcaccgctgacagcggggagcaggaggagcacaccctgcaggagacagccctgccccctgtgaacagcagcatcatcgccgcccccatcacagaccccagccagaagttcccccagtacctgcccctgtctgctgaggacaacctgggccccctgcctgagaactgggagatggcctacacagaaaatggagaggtgtacttcatcgaccacaacaccaagaccacctcctggctggacccccgctgcctgaacaagcagcagaagcccctggaggagtgtgaagatgatgaaggagtgcacacagaggagctggacagcgagctggagctgcctgctggctgggagaagattgaagatcctgtgtatggcatctactacgtggaccacatcaacaggaagacccagtatgagaaccctgtgctggaggccaagaggaagaagcagctggagcagcagcagcagcagcagcagcagcagcagcagcagcagcagcagcagcagcagcagcagacagaggagtggacagaggaccacagcgccctggtgccccctgtgatccccaaccacccccccagcaaccctgagcccgcccgggaggtgcccctgcagggcaagcccttcttcaccaggaaccccagcgagctgaagggcaagttcatccacaccaagctgaggaagagcagccggggcttcggcttcaccgtggtgggcggagatgagccagatgagttcctgcagatcaagagcctggtgctggatggccctgctgccctggatggcaagatggagactggagatgtgattgtgtctgtgaatgacacctgtgtgctgggccacacccacgcccaggtggtgaagatcttccagagcatccccatcggggcctctgtggacctggagctgtgccggggctaccccctgccctttgatcctgatgaccccaacaccagcctggtgacctctgtggccatcctggacaaggagcccatcatcgtgaatggccaggagacctatgacagccctgccagccacagcagcaagacaggcaaggtgaatggcatgaaggatgcccggcccagcagccctgcagatgtggccagcaacagcagccacggctacccaaatgacacagtgtccctggccagcagcatcgccacccagcctgagctgatcaccgtgcacatcgtgaagggccccatgggcttcggcttcaccatcgctgacagccctgggggcggcggccagagggtgaagcagatcgtggacagcccccgctgccggggcctgaaggagggggacctgattgtggaggtgaacaagaagaatgtgcaggccctgacccacaaccaggtggtggacatgctggtggagtgccccaagggcagcgaggtgaccctgctggtgcagaggggcggcctgcctgtgcccaagaagagccccaagagccagcccctggagaggaaggacagccagaacagcagccagcacagcgtgagcagccacaggagcctgcacacagccagccccagccacagcacccaggtgctgcctgagttccccccagctgaggcccaggccccagaccagacagacagcagcggccagaagaagccagaccccttcaagatctgggcccagagccgctccatgtatgaaaatcggcccatgagccccagccctgccagcggcctgagcaaaggagagcgggagcgggagatcaacagcaccaactttggagaatgtcccatcccagactaccaggagcaggacatcttcctgtggaggaaggagactggatttggcttccgcatcctgggcggcaatgaacctggagagcccatctacatcggccacatcgtgcccctgggcgctgctgacacagatggccgcctgcggtctggagatgagctgatctgtgtggatggcacccctgtgattggcaagagccaccagctggtggtgcagctgatgcagcaggccgccaagcagggccacgtgaacctgactgtgcggaggaaggtggtgtttgctgtgcccaagacagaaaatgaggtgcccagccctgccagcagccaccacagcagcaaccagcctgccagcctgacagaggagaagaggaccccccagggcagccagaacagcctgaacacagtgagcagcggcagcggcagcaccagcggcatcggcagcggcggcggcggcggcagcggcgtggtgtccacagtggtgcagccctatgatgtggagatcagaagaggagaaaatgaaggatttggatttgtgattgtgtcctctgtgtccaggcctgaggccggcaccacctttggaaatgcctgtgtggccatgccccacaagattggccgcatcatcgagggcagccctgctgacagatgtgggaagctgaaggtgggggaccgcatcctggccgtgaatggctgcagcatcaccaacaagagccacagcgacatcgtgaacctgatcaaggaggccggcaacacagtgaccctgcgcatcatccctggagatgagagcagcaatgccaccctgctgaccaatgctgagaagatcgccaccatcaccaccacccacacccccagccagcagggcacccaggagaccaggaacaccaccaagcccaagcaggagagccagtttgagttcaaggccccccaggccacccaggagcaggacttctacacagtggagctggagcggggggccaagggcttcggcttcagcctgcggggcggccgggagtacaacatggacctgtatgtgctgcggctggccgaggatggccctgctgagcgctgtgggaagatgagaattggagatgagatcctggagatcaacggggagaccaccaagaacatgaagcacagccgggccatcgagctgatcaagaatggaggaagaagagtgcggctcttcctgaagagaggagatggctctgtgcctgaatatgccatgatcccccccaacattgctgcctgcatgagaaatgagaagctgggggaggcctgcttctacctgatgggccacaaccagaccaccaccccagctgccacagccacagcccctcctcctgtgcacaaggtgttcaggaagtag

SEQ ID NO: 187143 - DNA, 4562 bp, Artificial Sequence
  derived and/or modified sequence
atgtccaaagtgatccagaagaagaaccactggactagcagggttcacgaatgcaccgtgaagcggggaccccagggcgagctgggggtgacggtgctgggaggcgcggagcacggggagtttccgtacgtcggagcggtggcggcggtcgaggcagcggggcttcccggcggcggcgagggcccgaggctgggcgaaggggagctgcttctggaggtgcagggggtccgggtgtccggcttgccccgctatgacgtgctgggggtcatcgacagctgcaaggaggccgtcaccttcaaggccgtcagacaaggaggaaggctgaacaaggacctgcgacattttctcaatcagcgattccagaaggggtctcctgatcatgagctccagcagaccataagggataacctttaccgccatgctgtgccttgcacaacccgatctcccagagaaggagaagtgcctggcgtggactataactttctgactgtgaaggagttcttggacctcgagcagagtgggactcttctggaagtcggcacctatgaaggaaactattatgggacacccaagcctcctagccagccagtcagtgggaaagtgatcacgacggatgccttgcacagccttcagtctggctctaagcagtcgaccccgaagcgaaccaagtcctacaatgatatgcaaaatgctggcatagtccacgcggagaatgaggaggaggatgacgttcctgaaatgaacagcagctttacagccgattctggtgaacaagaggagcacactctccaagaaacagcattaccacctgtgaatagtagcatcatcgctgctcccatcacggacccttctcagaagttccctcaatacctacctctttctgcagaggataatttaggtcctctacctgaaaactgggagatggcctatactgaaaatggagaagtctattttatagaccataacacgaaaacaacatcttggttagaccctcggtgcctaaacaagcagcagaagccactggaagagtgtgaagatgatgaaggggtacacaccgaggagctggacagtgaactagaactgcctgctggttgggaaaagattgaagaccctgtctatggtatctactatgtagaccacatcaacaggaagacacaatatgagaacccggttctagaagccaaacggaagaagcagcttgagcagcagcagcagcagcaacagcagcagcaacagcagcagcagcagcagcagcagcagcagacagaagaatggacagaagatcactcagcccttgtgcctcctgttattccaaaccaccctccaagcaatccagagccagccagagaagttccacttcagggcaaacccttttttacacgaaacccttctgagttgaaaggcaagttcattcacacaaagctgcggaaaagcagtcgtggctttggcttcacggtggttggaggggatgaacctgatgagtttctccagatcaagagcttggtcctagatggtcctgctgcattggatggcaagatggaaacaggggatgtgattgtaagtgtgaatgacacctgtgttttgggacacacacatgctcaagttgtgaagatcttccagtccatccccattggtgccagcgtggaccttgaactctgccgaggttatccattgccttttgatccagatgaccccaatacaagtttagtgacctcggtagccattttggataaagaaccaattattgtgaatgggcaagagacctatgattcaccagctagccacagtagtaaaacaggcaaagtcaatggcatgaaggatgccaggccaagcagcccagcggacgtggcttcaaatagttctcatggttatcctaatgacactgtttctttggcttcctccatagccactcagccagaactcataactgttcatattgtcaaagggccaatgggctttggttttactatcgcagacagtcctggtgggggtggccaaagagtgaaacagattgttgacagcccaaggtgccgaggcctgaaagaaggggatctcatagtggaagttaataagaagaacgtgcaggccctaactcacaaccaagtggtggatatgctggttgagtgtcctaagggaagtgaggtcacattgttggtgcaacgaggagggctgccagttcccaagaagagcccaaagtcgcaaccactggaaaggaaagacagccagaatagttctcagcacagtgtttccagccaccgaagcctgcacacagcatccccaagccacagcacacaggtgctccccgagttcccacctgcagaggcccaagctccagatcaaactgacagctctggccagaaaaaaccagatccttttaaaatctgggcccagtccaggagcatgtatgaaaaccgacctatgtcaccttcacctgcgtcgggattgagcaagggtgagagagagagagaaatcaattccacgaattttggagaatgtccgattccagattaccaggaacaggacatcttcctctggagaaaagagactggatttggatttaggattctgggtggaaatgaaccaggggaacctatttatattggtcacatcgtaccactgggtgctgctgatactgacggccgcctgaggtctggagatgaattaatctgtgtggatgggacgccagtaattggaaaatcacaccagcttgtggtccagcttatgcaacaagctgccaagcaaggccacgtcaatctcacggtgcggcgtaaagtggtttttgcggtgcccaaaaccgagaacgaggtgccctcgccagcctcctctcatcacagtagcaaccagccggcctcgctgacagaagagaagcgcactccgcagggcagccagaactcgctgaacacggtgagctcgggcagcggcagcaccagcggcatcggcagtggcggcggcgggggcagcggcgtggtcagcaccgtggtgcagccctacgacgtggagatccggcgcggggagaacgagggcttcggcttcgtcatcgtgtcctcggtgagcaggcccgaagcaggcacgacctttggcaatgcatgtgtggctatgcctcacaaaataggtcggattattgaggggagccctgctgaccgctgtggcaagctgaaagtaggagaccggatcttggcagtaaatggatgttccatcaccaacaaatcccattcagacattgtgaacctaatcaaggaagcgggaaacacagttaccctccgcatcattcctggggatgagtcctcgaatgccaccttgctgaccaatgcagagaagattgccaccatcaccaccacacacaccccttctcagcaagggacccaggagacaaggaataccaccaaaccaaagcaggaatctcaatttgagttcaaagcaccccaagcaacacaggagcaagatttttacactgtggaactggaaagaggagccaagggatttggctttagccttcgaggaggccgagagtataacatggacctctatgttctgcgcttagcagaggacggtcctgcggagaggtgtggaaagatgaggattggtgatgaaattttagagatcaatggtgagaccaccaaaaacatgaagcattctcgagctatagaactgattaagaatggtggccgcagagttcgtctgtttctgaagcggggagacggctcagtaccagaatatgcgatgatacctcctaatatcgctgcatgtatgagaaatgaaaagctcggggaggcttgcttctaccttatgggccataatcaaactacgaccccagcagcgaccgccacggccccgccaccggtccacaaggtgttccggaagtgagggccgggcccgaccgccggcagcatccgtcattggagtccagttacccacccgatcttcacaaatcatcaccacatggggaaaagcgggcacacgcaagggatccgaaaggcagcagagagtatagcagacaacccaatgaacaccacacctggaatgggacttcgaggaaacccgacagcggggcatgccgacccaaggaccgggcgccggagggacggagggacgcgcaggccgagcgcgcggcagccgccaacggccccaagaggcggtccccagagaagcggagggagggcacccgcagcgccgacaacactttggagaggagggagaagcacgagaagagacgagacgtctctccggagcggaggcgagagcggtcacccacccgcaggagagacggctcccccagccggcggagacggtctctggagagactcctggagcagaggaggtcccccgagcgcaggagagggggctcgcccgagcgcagggccaagtccaccgaccggaggcgcgcacgctcccccgagcgcaggagagagcggtccctggacaaaaggaacagagaggacagagccagccaccgagaaagggaagaggcgaatctgaaacaggatgccggcagaagttccagacatcccccggagcagagaaggcgaccttacaaagaatgtagcaccgacctcagtatctga

SEQ ID NO: 187144 - DNA, 4250 bp, Artificial Sequence
  derived and/or modified sequence
ggaggaaggctgaacaaggacctgcgacattttctcaatcagcgattccagaaggggtctcctgatcatgagctccagcagaccataagggataacctttaccgccatgctgtgccttgcacaacccgatctcccagagaaggagaagtgcctggcgtggactataactttctgactgtgaaggagttcttggacctcgagcagagtgggactcttctggaagtcggcacctatgaaggaaactattatgggacacccaagcctcctagccagccagtcagtgggaaagtgatcacgacggatgccttgcacagccttcagtctggctctaagcagtcgaccccgaagcgaaccaagtcctacaatgatatgcaaaatgctggcatagtccacgcggagaatgaggaggaggatgacgttcctgaaatgaacagcagctttacagccgattctggtgaacaagaggagcacactctccaagaaacagcattaccacctgtgaatagtagcatcatcgctgctcccatcacggacccttctcagaagttccctcaatacctacctctttctgcagaggataatttaggtcctctacctgaaaactgggagatggcctatactgaaaatggagaagtctattttatagaccataacacgaaaacaacatcttggttagaccctcggtgcctaaacaagcagcagaagccactggaagagtgtgaagatgatgaaggggtacacaccgaggagctggacagtgaactagaactgcctgctggttgggaaaagattgaagaccctgtctatggtatctactatgtagaccacatcaacaggaagacacaatatgagaacccggttctagaagccaaacggaagaagcagcttgagcagcagcagcagcagcaacagcagcagcaacagcagcagcagcagcagcagcagcagcagacagaagaatggacagaagatcactcagcccttgtgcctcctgttattccaaaccaccctccaagcaatccagagccagccagagaagttccacttcagggcaaacccttttttacacgaaacccttctgagttgaaaggcaagttcattcacacaaagctgcggaaaagcagtcgtggctttggcttcacggtggttggaggggatgaacctgatgagtttctccagatcaagagcttggtcctagatggtcctgctgcattggatggcaagatggaaacaggggatgtgattgtaagtgtgaatgacacctgtgttttgggacacacacatgctcaagttgtgaagatcttccagtccatccccattggtgccagcgtggaccttgaactctgccgaggttatccattgccttttgatccagatgaccccaatacaagtttagtgacctcggtagccattttggataaagaaccaattattgtgaatgggcaagagacctatgattcaccagctagccacagtagtaaaacaggcaaagtcaatggcatgaaggatgccaggccaagcagcccagcggacgtggcttcaaatagttctcatggttatcctaatgacactgtttctttggcttcctccatagccactcagccagaactcataactgttcatattgtcaaagggccaatgggctttggttttactatcgcagacagtcctggtgggggtggccaaagagtgaaacagattgttgacagcccaaggtgccgaggcctgaaagaaggggatctcatagtggaagttaataagaagaacgtgcaggccctaactcacaaccaagtggtggatatgctggttgagtgtcctaagggaagtgaggtcacattgttggtgcaacgaggagggctgccagttcccaagaagagcccaaagtcgcaaccactggaaaggaaagacagccagaatagttctcagcacagtgtttccagccaccgaagcctgcacacagcatccccaagccacagcacacaggtgctccccgagttcccacctgcagaggcccaagctccagatcaaactgacagctctggccagaaaaaaccagatccttttaaaatctgggcccagtccaggagcatgtatgaaaaccgacctatgtcaccttcacctgcgtcgggattgagcaagggtgagagagagagagaaatcaattccacgaattttggagaatgtccgattccagattaccaggaacaggacatcttcctctggagaaaagagactggatttggatttaggattctgggtggaaatgaaccaggggaacctatttatattggtcacatcgtaccactgggtgctgctgatactgacggccgcctgaggtctggagatgaattaatctgtgtggatgggacgccagtaattggaaaatcacaccagcttgtggtccagcttatgcaacaagctgccaagcaaggccacgtcaatctcacggtgcggcgtaaagtggtttttgcggtgcccaaaaccgagaacgaggtgccctcgccagcctcctctcatcacagtagcaaccagccggcctcgctgacagaagagaagcgcactccgcagggcagccagaactcgctgaacacggtgagctcgggcagcggcagcaccagcggcatcggcagtggcggcggcgggggcagcggcgtggtcagcaccgtggtgcagccctacgacgtggagatccggcgcggggagaacgagggcttcggcttcgtcatcgtgtcctcggtgagcaggcccgaagcaggcacgacctttggcaatgcatgtgtggctatgcctcacaaaataggtcggattattgaggggagccctgctgaccgctgtggcaagctgaaagtaggagaccggatcttggcagtaaatggatgttccatcaccaacaaatcccattcagacattgtgaacctaatcaaggaagcgggaaacacagttaccctccgcatcattcctggggatgagtcctcgaatgccaccttgctgaccaatgcagagaagattgccaccatcaccaccacacacaccccttctcagcaagggacccaggagacaaggaataccaccaaaccaaagcaggaatctcaatttgagttcaaagcaccccaagcaacacaggagcaagatttttacactgtggaactggaaagaggagccaagggatttggctttagccttcgaggaggccgagagtataacatggacctctatgttctgcgcttagcagaggacggtcctgcggagaggtgtggaaagatgaggattggtgatgaaattttagagatcaatggtgagaccaccaaaaacatgaagcattctcgagctatagaactgattaagaatggtggccgcagagttcgtctgtttctgaagcggggagacggctcagtaccagaatatgcgatgatacctcctaatatcgctgcatgtatgagaaatgaaaagctcggggaggcttgcttctaccttatgggccataatcaaactacgaccccagcagcgaccgccacggccccgccaccggtccacaaggtgttccggaagtgagggccgggcccgaccgccggcagcatccgtcattggagtccagttacccacccgatcttcacaaatcatcaccacatggggaaaagcgggcacacgcaagggatccgaaaggcagcagagagtatagcagacaacccaatgaacaccacacctggaatgggacttcgaggaaacccgacagcggggcatgccgacccaaggaccgggcgccggagggacggagggacgcgcaggccgagcgcgcggcagccgccaacggccccaagaggcggtccccagagaagcggagggagggcacccgcagcgccgacaacactttggagaggagggagaagcacgagaagagacgagacgtctctccggagcggaggcgagagcggtcacccacccgcaggagagacggctcccccagccggcggagacggtctctggagagactcctggagcagaggaggtcccccgagcgcaggagagggggctcgcccgagcgcagggccaagtccaccgaccggaggcgcgcacgctcccccgagcgcaggagagagcggtccctggacaaaaggaacagagaggacagagccagccaccgagaaagggaagaggcgaatctgaaacaggatgccggcagaagttccagacatcccccggagcagagaaggcgaccttacaaagaatgtagcaccgacctcagtatctga

SEQ ID NO: 187145 - DNA, 3864 bp, Artificial Sequence
  derived and/or modified sequence
atgagcaaggtgatccagaagaagaaccactggaccagccgggtgcatgagtgcacagtgaaacgaggcccccaaggcgagctaggggtgaccgtgctgggtggcgctgagcacggagaattcccctatgtgggagcggttgcagctgtggaagcggccggactgcctggcggaggagaaggcccccggctcggagaaggagaactgctgctggaggtgcagggggtgagagtctccggcctaccacggtacgacgtgctgggcgttatcgactcatgcaaagaggccgtgacgtttaaggcagtcaggcagggtggtcgattgaacaaagacttgaggcactttctcaaccagcggtttcaaaaagggtctcctgaccatgagctccagcaaaccattcgcgataatttgtatagacatgcggtcccttgtaccactcgaagccctcgagaaggcgaggtgcctggtgtagactacaacttcttaacagtgaaggagtttctggatctggaacagtccggtaccctgctggaagtcggcacgtacgagggaaattattacggcaccccaaagccaccctctcaaccagtatcaggaaaggttatcacaactgacgctctgcatagtcttcagtcagggagtaagcagtccaccccaaagcgaactaaatcctacaacgatatgcagaacgcggggatagtacacgctgaaaatgaggaagaagatgatgttcccgagatgaactcgtcttttacagcagactctggtgagcaagaggaacacacattgcaggaaaccgctctgccgccagtgaactcctcaataatcgccgcgccaatcaccgaccccagccagaaatttccgcagtatcttcctttgtccgccgaagacaacctcggccctctgcccgagaattgggagatggcatacacggagaacggggaggtgtacttcattgatcacaacaccaagacaacgagctggttggaccccagatgccttaataagcagcaaaaaccgctggaggaatgtgaggatgacgagggagttcacacagaggagctggattctgaactagagctacccgcaggctgggagaaaattgaggatccggtgtacgggatttactatgttgatcatatcaaccgcaaaacccaatacgaaaacccggtgctggaagctaagcgaaaaaagcagcttgagcaacagcagcagcagcaacaacagcaacagcagcaacaacaacagcagcagcagcaacagacagaggaatggaccgaagatcacagtgcactggtgcccccggtaattcccaaccatccaccatcgaatcccgaacctgcacgggaagtgcctctgcaagggaagcccttctttacgcggaacccaagcgagcttaaaggtaagttcatacatactaagctcaggaaatcttcccgcggatttggattcaccgtcgtcgggggggacgaaccggacgagttcctgcagatcaaatccctggtgctagacggacctgctgctcttgacgggaaaatggagacaggagatgtgatcgtgagcgttaatgatacctgcgttcttggtcacacccacgcccaggtggttaagattttccagagtatcccaatcggggcaagcgtggacctggagctgtgccgtggttatcctctcccctttgatcctgacgatcctaacaccagtctagtgaccagcgtcgctatcttggacaaggaaccaattatcgtgaacggccaggagacctacgacagtcccgccagccacagctccaagaccggcaaagtgaacgggatgaaggacgctcggccaagctctcccgctgacgtggccagtaattcgtcccacgggtaccccaacgataccgtgtccctggcgtctagcattgcgacccagcctgagctgattacggtgcatatcgtcaaggggccgatggggttcggctttaccattgctgactcccctggtggaggcggtcagagagtgaagcagatagtggacagccccaggtgccgagggctgaaagagggagatctcattgtggaggtgaacaagaagaatgttcaggcactgactcataatcaggtcgttgacatgctggtcgaatgtccaaagggtagtgaggttaccctgctggtgcagagaggaggccttcccgtaccgaaaaagtcaccgaaaagccagcctttggaacggaaagactctcagaactcttcccaacactccgtctcctctcaccgctcgcttcatacagctagtccctcccattccacccaggtgctgcccgaattccccccagcagaggcccaggctcctgaccagacagatagcagcgggcagaaaaagcccgacccattcaaaatctgggctcagtcaagatcaatgtatgaaaataggcccatgtccccaagtcccgcttcaggtctaagcaagggggagcgagaacgggaaattaattctactaacttcggcgagtgtcccatcccagattaccaggagcaggacatttttttgtggcgaaaggaaacgggctttggttttaggattctggggggcaacgaacctggcgagccaatttacatcgggcatattgtgcccctgggcgccgcggacacagacggccgcctaaggtccggtgatgaactgatttgcgtggacgggacgcccgtcatcggaaaatcccaccaactagtggttcaattgatgcagcaggctgccaagcagggacacgtgaatttgacggtgagaaggaaggtggtctttgcagttcccaaaacagaaaacgaggtacctagccccgcatctagtcaccactcttcaaatcagcccgcaagtctaacagaagaaaaaagaacaccacagggcagtcagaacagtctcaacaccgtgtcttccggctccggatctacctccggaatcggctcgggcggtggaggaggaagcggcgtggtgtcaactgtggtacagccatacgacgttgaaattcggaggggcgagaacgaaggcttcggctttgtgatcgtctcctcagtgtcaagacccgaagcagggacaacattcggcaatgcttgtgttgccatgcctcacaaaattggcagaattattgaggggtcgccagcggaccggtgcggtaagctgaaggtgggcgacaggattctggcggttaatggatgctctatcactaataaatctcacagcgacattgtgaacctaatcaaggaagcagggaacaccgtgactttaaggataatcccgggagatgagagcagcaatgccacattgttgaccaacgcagagaagatcgcaaccatcactaccacccacactcctagtcagcagggaacacaggagacacgaaatacaacaaaacccaaacaggagagccaatttgagttcaaagcaccccaggccacccaggagcaagacttctataccgtggagctagagcgcggcgctaaaggcttcggattctcgctgcgagggggcagggaatacaacatggacctctacgtccttagactggcagaggatggacctgctgaaaggtgtggtaaaatgagaatcggcgatgaaatcctagaaattaacggggagaccactaaaaacatgaagcacagcagggccattgagcttattaagaatgggggtcgtagggttcggctcttcctcaagcggggtgatggctctgttcctgagtatgctatgatcccgccaaacatcgccgcttgcatgcgaaatgaaaagctgggggaagcgtgcttttacctcatgggacacaatcagaccactacaccagccgccactgccactgcccctccgccagttcataaagtcttcaggaagtag

SEQ ID NO: 187146 - DNA, 3552 bp, Artificial Sequence
  derived and/or modified sequence
ggcggccggctgaacaaggacctgcggcacttcctgaaccagcggtttcagaagggctcccccgaccacgaattgcagcaaactatcagggacaatctctaccggcacgccgtgccttgtactactcgcagcccacgggagggtgaggtcccaggcgtggattacaatttcctgacagtgaaagagttcctggatctcgaacagagtggcacgttgctagaagtgggcacttacgaggggaattactatggtacacctaaacctccatcccagccagtgtcaggaaaggtgatcacaactgatgcccttcattcccttcagtccgggtctaagcaatccactcccaaaagaactaagagctacaatgatatgcagaacgccgggattgtgcacgctgagaacgaggaggaagatgacgttccggagatgaatagtagcttcacagcggattcgggggagcaggaagaacacacattgcaagagactgcactgccaccagtcaattccagtattattgccgccccaataaccgatccatcacagaagtttccccagtatttgcccctgtccgccgaagacaatctgggtcctctgcctgaaaactgggagatggcttataccgaaaacggagaagtgtactttatcgaccataacaccaagacaaccagctggctggaccctaggtgtttaaataaacagcaaaagcccctcgaggaatgtgaagacgacgaaggagtgcatacagaggaactggacagtgaactggaacttcctgccgggtgggagaagatcgaggatccagtatatgggatatattatgtggaccacatcaatcggaaaacgcagtacgagaatcctgtgctggaagcaaaacgcaagaaacagctggagcagcagcagcagcagcagcagcagcagcagcagcagcagcagcagcagcaacagcagcagaccgaagagtggaccgaggatcatagtgccttagtaccaccggtaatccctaatcacccgcccagtaaccctgaacccgctagggaagtgccgctccagggaaaaccctttttcaccaggaatccaagcgaactgaagggtaagttcatccacacaaagcttcgcaagagttcacgaggcttcggctttacagttgtgggcggagatgagcccgatgaattcctccagatcaagagtttagtgttagatggccctgctgctcttgacggaaagatggaaacaggggacgtcatagtatctgttaatgacacatgcgttctgggccacacccacgcacaggtggtgaaaatcttccagtcgattcctattggcgcctccgtcgatcttgagctttgcagaggatatcctctgccgtttgatcctgatgatcccaatacaagcctggtcacttcagtggccatcttggataaggagcctattattgtaaatggccaggagacatatgactcccctgctagccacagcagtaagaccggtaaagtaaatggcatgaaggatgcacgtccttcctcacccgcggacgtcgcatcgaactccagccacggataccccaatgacaccgtttctctcgcctcatcaatagctacacaacccgaactgataaccgtgcacattgttaagggacccatggggttcggctttaccatagcggactcccccggtggcggggggcaaagagttaagcagatcgtagactcaccccgctgccggggtctgaaggagggcgacctgattgtcgaggtgaacaagaagaatgtacaagctctgacccataaccaggtagttgacatgctcgttgagtgccccaagggctcagaggtgacactcctggttcagaggggcggactgccagttcctaaaaaatcacccaagtcccaaccccttgaaaggaaagatagccagaatagctctcaacatagtgtgtcctctcataggtctcttcacacagcgagccctagtcactctactcaggtactccccgagtttcccccggccgaagcccaggcacctgatcagaccgacagctctggacagaagaagccagatcctttcaagatctgggctcaatctaggtcaatgtatgaaaacaggcccatgtctccgagccccgcctccggtctgtcaaagggcgaacgggaaagagagatcaactccacgaatttcggagagtgccccatccctgattaccaggagcaggatatattcttgtggcgaaaggagacagggttcggattcaggatcctggggggtaacgagcctggagagccaatttacattggccacatcgttcccctgggggcagcagatacagacggcaggctgcgctccggagacgaactaatctgcgtggatggaacacctgtgattggaaagagccaccaattagttgtgcagctgatgcagcaagccgccaaacaaggacacgtcaacctgactgtgcgtcgcaaggtagtctttgctgttcctaagacggagaacgaggttccctctccggcttcaagccaccactcatctaaccagccagcttcccttaccgaagaaaagcggacacctcagggatcacagaacagtttgaacacagtgagcagcggcagcggttcaacctccggcatcgggagcggtggcggaggcggaagcggagttgtatccactgtcgtccagccttacgacgtggagatccggaggggcgaaaacgaaggatttggattcgtcatcgtaagctctgtctctagacctgaagccggaaccactttcggcaatgcttgtgttgcaatgccccataaaatcggccgtattatcgaaggttctccagcagaccggtgtgggaaactcaaagtgggagatcgtatactcgccgtgaatgggtgtagtataaccaacaaaagccattctgatatcgttaacctgattaaagaggccggaaacaccgttactctccgcatcatacccggagacgagagttccaacgctactttgctaaccaacgcagaaaagatcgcgactatcactaccacccataccccttcccagcagggtacccaagagacccgtaacaccacgaagcccaagcaggaaagccagttcgaatttaaagcacctcaggccactcaagagcaggacttttacacagtggaactagagcggggcgccaaagggtttggcttcagcctgagaggcggtagggaatacaatatggacctgtatgtgctgcgtctggctgaggatggccccgcagagaggtgtggcaagatgcgaataggcgatgagatattggaaatcaacggtgaaaccacaaagaacatgaagcactcacgtgccattgagcttattaagaatggaggcagacgagtgcgcctcttccttaaacgcggggacggaagcgtacccgagtatgccatgatccctcccaatattgcagcttgtatgcgaaatgagaaactaggtgaggcatgcttctatctcatgggacacaaccagaccacaactccagcggctactgccaccgccccccctccggtgcacaaagtgttccgaaaatag

SEQ ID NO: 187147 - DNA, 3864 bp, Artificial Sequence
  derived and/or modified sequence
atgagtaaggtgatccagaagaaaaaccactggacgtcacgtgtccacgaatgcacagtgaaaaggggacctcagggagagcttggcgtgactgtccttggaggcgctgagcacggggaattcccctatgtgggggctgtggcggctgtggaggccgcaggtctccctggcggtggcgaaggaccaaggttaggggagggtgagctgttactggaggtacagggtgtgcgggtttctggcttgcccagatatgacgtgctcggcgtgatcgattcctgtaaggaagccgtaacctttaaggccgttagacagggtggacggctgaacaaggacctgagacactttctgaatcagcggtttcagaaaggctcccctgatcatgagctgcagcagaccatccgggataatctctaccggcatgccgttccatgcactacccgttcccccagagagggagaggtccctggagttgattataatttccttactgtgaaggagttcctcgatctggagcaaagtggcaccctgctcgaggtggggacctatgagggcaactactatgggacaccaaagcccccttctcagccggtttcaggtaaagtcattactactgacgccctgcattcactgcagtctgggagcaaacagtctactccaaaacgcactaagagctacaatgacatgcaaaacgctggaattgtgcacgctgaaaacgaagaggaggacgacgtgcccgagatgaactcaagcttcaccgccgattcaggtgagcaggaggagcatactctgcaagaaaccgctctccctcctgttaattcatccatcatcgcggcaccgataactgatccttcccaaaaattcccacaatatctaccgttgtccgcagaggacaatctgggccctctaccagagaattgggagatggcgtacactgagaacggagaggtgtacttcatcgatcataacacaaaaaccacaagctggttggacccaaggtgcctgaacaaacaacagaagccccttgaagagtgtgaagatgatgagggagtacataccgaagagctggacagcgagttggagctgcccgctggctgggagaaaattgaggaccccgtgtacggcatctactacgtggatcatattaacaggaagacccagtacgagaaccctgttcttgaagctaagcgcaaaaaacagctagaacaacagcaacagcagcagcagcagcaacagcagcagcaacagcaacagcagcaacagcagaccgaggagtggactgaggatcattccgctttagtccctccggttattcctaatcacccccctagcaaccctgagccagccagggaggtgcccctccagggcaagccattcttcaccaggaacccctccgagctcaagggtaaatttatccacaccaaattgcgaaagtcatcccgagggtttggatttacagttgtcggtggggatgagcctgacgaatttctgcaaataaagagtctcgttcttgacggaccagccgcactggatgggaagatggagacgggggatgtaatcgtgagtgttaacgacacctgtgtgctcggccacacacacgcccaggtcgtcaagatcttccagtctatcccaatcggggcatcagtggatctcgaactctgtcgcggatatcccttgcccttcgatcccgacgatcccaacacctcccttgttacatccgttgctattctggataaagaaccaatcattgtcaacggccaggagacatatgacagccccgctagtcattcctccaaaacgggcaaggtgaatggtatgaaggatgccaggccctcatcacctgccgacgttgcaagcaactcttcccacgggtacccaaatgatacggtctcattggcctcctccattgccactcagccggagctgatcaccgttcacattgtaaagggtcccatggggttcgggttcaccatcgcagactctcccggtggaggaggacagcgcgtcaaacagattgttgactcgccgaggtgcagaggtctgaaggagggggacttaatcgtggaagtgaataagaagaatgtgcaggctctaacacacaaccaggtcgtggacatgctggtcgagtgccccaagggatcagaggtgacgttgttagtccaaagagggggattaccagtgcctaaaaagtcgcccaagtcgcagcctcttgaaagaaaagatagccagaacagctcccagcattccgtaagcagtcatcgaagcctgcataccgcctcgcctagccactccacccaagttctgccagagtttccccctgctgaagctcaagcacccgatcagaccgacagcagtggacagaagaagccagatccgtttaaaatctgggcccaaagcagaagcatgtacgagaacaggcccatgtccccctcgccagcatccggactatctaagggcgagagagagcgtgaaatcaacagtacgaacttcggcgagtgccccatccccgattaccaggagcaggatatcttcttatggaggaaggagaccggtttcgggttcagaattttaggcggaaacgagccgggagagccaatatatataggacatatcgtccccctcggggctgcggataccgatggtcggctgcgctctggagatgaactgatatgcgtggacggtactcccgtgattgggaagtcccaccagctggttgtgcagctgatgcagcaggccgctaaacaaggccatgtcaaccttaccgtccggagaaaggttgtgtttgctgttccaaagacggagaacgaggtgcccagccccgcttcgtcccatcattcttccaatcagcctgccagcctcacagaagagaaacggacaccccagggatctcagaattccctcaacacggtgtcatcaggctctgggtcgactagcggcatagggtcagggggtgggggaggttctggcgtcgtatctacagtagtccagccgtacgacgtcgagattagacgaggcgaaaacgaggggttcggctttgttatcgtgtcttccgtgtcccgcccagaagcgggaacaacatttggaaatgcttgtgtggcaatgccacacaagatcggacggatcatcgagggtagccccgctgaccggtgtgggaaacttaaagttggggataggatcttggccgtaaatgggtgtagcattactaacaaatctcattccgacatcgtgaacctgataaaggaggcagggaatactgtgaccctgcgcatcattcccggagacgagtcaagcaatgctacactgttgaccaatgctgaaaagatcgctacaattaccaccacccacaccccatcccagcaaggcacgcaggagacaagaaacacaactaaacctaagcaggaatctcagttcgagttcaaagctccacaggcaacccaggaacaggatttctataccgtggagctcgaacggggtgctaaagggttcggcttttcccttcggggaggcagggaatacaacatggatttatatgtgctcagactcgccgaagacggccctgctgagcgctgcggaaagatgcgaattggagatgagatcctggaaatcaacggagaaacaacaaaaaacatgaaacactcccgcgcaatcgagctgatcaagaacggaggtcgcagggttagactcttcctgaaacgcggtgatggatcggttccagagtatgccatgattcccccaaacatagcagcctgtatgaggaacgagaagctcggagaggcctgtttctatctgatgggccacaaccagacaactacaccagccgctaccgctacggccccaccgcctgtgcacaaggtttttagaaagtag

SEQ ID NO: 187148 - DNA, 3552 bp, Artificial Sequence
  derived and/or modified sequence
ggtgggagactgaataaggacctgaggcacttcctgaatcaaagattccagaaaggatcgccggaccacgaattgcagcagacaattcgggacaacctgtacaggcatgccgtgccatgtaccacgagaagccccagggagggcgaagtgcccggtgttgactataacttcctaacagtaaaagagtttctggatctggagcaaagtggtacgttactggaggttggcacttacgaggggaactactacggcacacctaagcccccaagccagcctgtctctggaaaagtgattaccaccgacgctctccacagccttcagtctggaagcaaacagtccacacctaagcgaaccaaatcttataacgatatgcaaaacgccggaatcgtgcatgccgagaatgaggaggaagacgatgtgccagagatgaatagcagtttcactgccgactccggcgagcaggaggagcatacactgcaggagactgccttgcccccagttaacagcagtatcatcgccgcacctatcacagatcctagccagaaattccctcagtaccttcctttaagcgctgaagacaacctggggcctttgcccgagaattgggagatggcatacaccgagaacggtgaagtgtacttcattgaccataacaccaagaccacgagctggctggaccctcgatgccttaataagcagcagaaacccctggaggagtgcgaggacgacgagggagtccacacagaggaactcgacagcgaattggaactccccgctggctgggaaaaaatagaagacccagtctatggcatctactatgtagatcacatcaaccgaaagacacaatatgagaacccagttctggaggcgaaaagaaaaaagcagcttgagcagcagcagcaacagcagcaacaacagcagcaacaacagcagcaacagcagcagcagcaaaccgaagaatggaccgaggaccattctgctctggtgcctccagtgatcccgaatcaccctcccagcaatccggagccagccagggaagtaccactgcagggtaaacctttctttacacgtaatcccagcgaacttaagggcaagttcatacacacaaaactgcgaaagagttctcggggattcgggttcaccgtggtgggaggggacgagccagacgagttcctccagatcaaaagcctggtgctggacggtcctgccgcacttgatgggaaaatggagacaggcgacgtcatagtgagcgtgaatgatacatgcgtgctgggccacacacacgcgcaggtcgtgaagattttccagtccattcccattggtgcatcagtggacctggagctgtgcagaggataccctctcccttttgatcccgatgaccctaatacttctctggttaccagtgtggccatactggacaaggaacctattatagttaatggacaggagacatacgattctcccgcatctcattctagcaaaacgggcaaagtcaatggcatgaaagacgccagacctagctccccagctgatgttgcgagtaatagcagccacggctaccctaacgacacagtcagtctggcctcctcaatcgcaacgcagcctgagctgatcacagtccacatagtgaaggggccaatggggttcggcttcacaattgctgattcccccggaggaggaggccagagggtgaagcagatcgtcgatagcccaagatgtcggggactgaaagagggtgatctaatcgtggaagttaacaaaaagaacgtgcaggcgctcacccacaatcaggttgtggatatgctcgtggagtgtcctaaaggcagcgaagtgaccctgctcgtgcagagggggggtctccccgtacctaagaagagtccaaagagtcaaccgctggaacggaaagactcacagaactcttcacagcactcagtttctagtcaccggagcctgcacactgccagcccatctcattccacccaagtactcccggagtttccgccagccgaggcacaggccccagaccaaactgatagctccggccagaagaaacctgacccatttaaaatatgggcccagagcagatctatgtatgagaataggcctatgtcgccttcacctgcttccggattgagtaaaggcgagagggagcgagagattaactccactaacttcggcgagtgccccatccccgactatcaggagcaggacatcttcctgtggaggaaggaaaccggctttggatttcgaatattaggaggtaacgaacctggcgaaccaatctatattggacacatagttccactaggcgctgcagacacggatggtagactgcgaagcggggatgagttgatttgcgtcgatgggactcctgtgatcggcaagtcccaccagctggtagtacagttaatgcagcaagctgccaagcagggccacgtgaatttgactgtaagacggaaggtggtgtttgctgtgcctaagaccgagaacgaggtaccctctccggcaagctcccatcactccagtaaccagcccgctagccttactgaggagaagcggacccctcaggggagtcagaattctctgaacacagtgagctccggcagcggcagcacttcgggcatcggcagcgggggaggcggagggtccggggtggtctcaaccgtcgtccagccctacgacgtcgagatccgtcgtggcgagaatgagggtttcggctttgtcatcgtttcctccgtgagccgaccggaggctggtactacctttggaaacgcctgtgttgccatgccgcataaaattgggagaatcatcgagggatctcccgctgataggtgtggtaagctcaaggtgggagacaggatcctagccgtcaacggctgcagcatcaccaacaaatcgcactctgacattgtgaatctcataaaagaggcagggaacaccgtgacacttaggattattcccggagacgagagtagcaatgcaacacttctgactaacgccgaaaagatcgcaactatcactacaactcatactccatctcagcagggcactcaagagactcgtaataccaccaagccaaagcaggagagccagttcgaattcaaggcccctcaggcaacacaggagcaggatttctacaccgtggagttagagcgcggtgcaaagggatttggattcagtttgaggggcggaagagagtacaacatggatctgtatgtcctgcgcctggccgaggatgggcctgccgagcggtgcgggaagatgagaattggggatgagatcctggaaatcaacggcgaaaccacaaaaaatatgaaacattctcgcgctatagaactcatcaagaacggcggtaggagggtgaggctgttcctgaagcgcggagatggctcagtgcctgaatatgccatgatcccccctaatattgccgcatgtatgcgcaatgagaagcttggtgaagcctgtttctacctcatgggtcacaaccaaaccaccactccagcggctaccgctacagcgccaccaccagtacacaaggtgtttaggaagtag

SEQ ID NO: 187149 - DNA, 3864 bp, Artificial Sequence
  derived and/or modified sequence
atgagcaaggtgatccagaagaagaaccactggaccagcagagtgcacgagtgcaccgtgaagagaggcccccagggcgagctgggcgtgaccgtgctgggcggcgccgagcacggcgagttcccctacgtgggcgccgtggccgccgtggaggccgccggcctgcccggcggcggcgagggccccagactgggcgagggcgagctgctgctggaggtgcagggcgtgagagtgagcggcctgcccagatacgacgtgctgggcgtgatcgacagctgcaaggaggccgtgaccttcaaggccgtgagacagggcggcagactgaacaaggacctgagacacttcctgaaccagagattccagaagggcagccccgaccacgagctgcagcagaccatcagagacaacctgtacagacacgccgtgccctgcaccaccagaagccccagagagggcgaggtgcccggcgtggactacaacttcctgaccgtgaaggagttcctggacctggagcagagcggcaccctgctggaggtgggcacctacgagggcaactactacggcacccccaagccccccagccagcccgtgagcggcaaggtgatcaccaccgacgccctgcacagcctgcagagcggcagcaagcagagcacccccaagagaaccaagagctacaacgacatgcagaacgccggcatcgtgcacgccgagaacgaggaggaggacgacgtgcccgagatgaacagcagcttcaccgccgacagcggcgagcaggaggagcacaccctgcaggagaccgccctgccccccgtgaacagcagcatcatcgccgcccccatcaccgaccccagccagaagttcccccagtacctgcccctgagcgccgaggacaacctgggccccctgcccgagaactgggagatggcctacaccgagaacggcgaggtgtacttcatcgaccacaacaccaagaccaccagctggctggaccccagatgcctgaacaagcagcagaagcccctggaggagtgcgaggacgacgagggcgtgcacaccgaggagctggacagcgagctggagctgcccgccggctgggagaagatcgaggaccccgtgtacggcatctactacgtggaccacatcaacagaaagacccagtacgagaaccccgtgctggaggccaagagaaagaagcagctggagcagcagcagcagcagcagcagcagcagcagcagcagcagcagcagcagcagcagcagcagaccgaggagtggaccgaggaccacagcgccctggtgccccccgtgatccccaaccacccccccagcaaccccgagcccgccagagaggtgcccctgcagggcaagcccttcttcaccagaaaccccagcgagctgaagggcaagttcatccacaccaagctgagaaagagcagcagaggcttcggcttcaccgtggtgggcggcgacgagcccgacgagttcctgcagatcaagagcctggtgctggacggccccgccgccctggacggcaagatggagaccggcgacgtgatcgtgagcgtgaacgacacctgcgtgctgggccacacccacgcccaggtggtgaagatcttccagagcatccccatcggcgccagcgtggacctggagctgtgcagaggctaccccctgcccttcgaccccgacgaccccaacaccagcctggtgaccagcgtggccatcctggacaaggagcccatcatcgtgaacggccaggagacctacgacagccccgccagccacagcagcaagaccggcaaggtgaacggcatgaaggacgccagacccagcagccccgccgacgtggccagcaacagcagccacggctaccccaacgacaccgtgagcctggccagcagcatcgccacccagcccgagctgatcaccgtgcacatcgtgaagggccccatgggcttcggcttcaccatcgccgacagccccggcggcggcggccagagagtgaagcagatcgtggacagccccagatgcagaggcctgaaggagggcgacctgatcgtggaggtgaacaagaagaacgtgcaggccctgacccacaaccaggtggtggacatgctggtggagtgccccaagggcagcgaggtgaccctgctggtgcagagaggcggcctgcccgtgcccaagaagagccccaagagccagcccctggagagaaaggacagccagaacagcagccagcacagcgtgagcagccacagaagcctgcacaccgccagccccagccacagcacccaggtgctgcccgagttcccccccgccgaggcccaggcccccgaccagaccgacagcagcggccagaagaagcccgaccccttcaagatctgggcccagagcagaagcatgtacgagaacagacccatgagccccagccccgccagcggcctgagcaagggcgagagagagagagagatcaacagcaccaacttcggcgagtgccccatccccgactaccaggagcaggacatcttcctgtggagaaaggagaccggcttcggcttcagaatcctgggcggcaacgagcccggcgagcccatctacatcggccacatcgtgcccctgggcgccgccgacaccgacggcagactgagaagcggcgacgagctgatctgcgtggacggcacccccgtgatcggcaagagccaccagctggtggtgcagctgatgcagcaggccgccaagcagggccacgtgaacctgaccgtgagaagaaaggtggtgttcgccgtgcccaagaccgagaacgaggtgcccagccccgccagcagccaccacagcagcaaccagcccgccagcctgaccgaggagaagagaaccccccagggcagccagaacagcctgaacaccgtgagcagcggcagcggcagcaccagcggcatcggcagcggcggcggcggcggcagcggcgtggtgagcaccgtggtgcagccctacgacgtggagatcagaagaggcgagaacgagggcttcggcttcgtgatcgtgagcagcgtgagcagacccgaggccggcaccaccttcggcaacgcctgcgtggccatgccccacaagatcggcagaatcatcgagggcagccccgccgacagatgcggcaagctgaaggtgggcgacagaatcctggccgtgaacggctgcagcatcaccaacaagagccacagcgacatcgtgaacctgatcaaggaggccggcaacaccgtgaccctgagaatcatccccggcgacgagagcagcaacgccaccctgctgaccaacgccgagaagatcgccaccatcaccaccacccacacccccagccagcagggcacccaggagaccagaaacaccaccaagcccaagcaggagagccagttcgagttcaaggccccccaggccacccaggagcaggacttctacaccgtggagctggagagaggcgccaagggcttcggcttcagcctgagaggcggcagagagtacaacatggacctgtacgtgctgagactggccgaggacggccccgccgagagatgcggcaagatgagaatcggcgacgagatcctggagatcaacggcgagaccaccaagaacatgaagcacagcagagccatcgagctgatcaagaacggcggcagaagagtgagactgttcctgaagagaggcgacggcagcgtgcccgagtacgccatgatcccccccaacatcgccgcctgcatgagaaacgagaagctgggcgaggcctgcttctacctgatgggccacaaccagaccaccacccccgccgccaccgccaccgcccccccccccgtgcacaaggtgttcagaaagtag

SEQ ID NO: 187150 - DNA, 3552 bp, Artificial Sequence
  derived and/or modified sequence
ggcggcagactgaacaaggacctgagacacttcctgaaccagagattccagaagggcagccccgaccacgagctgcagcagaccatcagagacaacctgtacagacacgccgtgccctgcaccaccagaagccccagagagggcgaggtgcccggcgtggactacaacttcctgaccgtgaaggagttcctggacctggagcagagcggcaccctgctggaggtgggcacctacgagggcaactactacggcacccccaagccccccagccagcccgtgagcggcaaggtgatcaccaccgacgccctgcacagcctgcagagcggcagcaagcagagcacccccaagagaaccaagagctacaacgacatgcagaacgccggcatcgtgcacgccgagaacgaggaggaggacgacgtgcccgagatgaacagcagcttcaccgccgacagcggcgagcaggaggagcacaccctgcaggagaccgccctgccccccgtgaacagcagcatcatcgccgcccccatcaccgaccccagccagaagttcccccagtacctgcccctgagcgccgaggacaacctgggccccctgcccgagaactgggagatggcctacaccgagaacggcgaggtgtacttcatcgaccacaacaccaagaccaccagctggctggaccccagatgcctgaacaagcagcagaagcccctggaggagtgcgaggacgacgagggcgtgcacaccgaggagctggacagcgagctggagctgcccgccggctgggagaagatcgaggaccccgtgtacggcatctactacgtggaccacatcaacagaaagacccagtacgagaaccccgtgctggaggccaagagaaagaagcagctggagcagcagcagcagcagcagcagcagcagcagcagcagcagcagcagcagcagcagcagcagaccgaggagtggaccgaggaccacagcgccctggtgccccccgtgatccccaaccacccccccagcaaccccgagcccgccagagaggtgcccctgcagggcaagcccttcttcaccagaaaccccagcgagctgaagggcaagttcatccacaccaagctgagaaagagcagcagaggcttcggcttcaccgtggtgggcggcgacgagcccgacgagttcctgcagatcaagagcctggtgctggacggccccgccgccctggacggcaagatggagaccggcgacgtgatcgtgagcgtgaacgacacctgcgtgctgggccacacccacgcccaggtggtgaagatcttccagagcatccccatcggcgccagcgtggacctggagctgtgcagaggctaccccctgcccttcgaccccgacgaccccaacaccagcctggtgaccagcgtggccatcctggacaaggagcccatcatcgtgaacggccaggagacctacgacagccccgccagccacagcagcaagaccggcaaggtgaacggcatgaaggacgccagacccagcagccccgccgacgtggccagcaacagcagccacggctaccccaacgacaccgtgagcctggccagcagcatcgccacccagcccgagctgatcaccgtgcacatcgtgaagggccccatgggcttcggcttcaccatcgccgacagccccggcggcggcggccagagagtgaagcagatcgtggacagccccagatgcagaggcctgaaggagggcgacctgatcgtggaggtgaacaagaagaacgtgcaggccctgacccacaaccaggtggtggacatgctggtggagtgccccaagggcagcgaggtgaccctgctggtgcagagaggcggcctgcccgtgcccaagaagagccccaagagccagcccctggagagaaaggacagccagaacagcagccagcacagcgtgagcagccacagaagcctgcacaccgccagccccagccacagcacccaggtgctgcccgagttcccccccgccgaggcccaggcccccgaccagaccgacagcagcggccagaagaagcccgaccccttcaagatctgggcccagagcagaagcatgtacgagaacagacccatgagccccagccccgccagcggcctgagcaagggcgagagagagagagagatcaacagcaccaacttcggcgagtgccccatccccgactaccaggagcaggacatcttcctgtggagaaaggagaccggcttcggcttcagaatcctgggcggcaacgagcccggcgagcccatctacatcggccacatcgtgcccctgggcgccgccgacaccgacggcagactgagaagcggcgacgagctgatctgcgtggacggcacccccgtgatcggcaagagccaccagctggtggtgcagctgatgcagcaggccgccaagcagggccacgtgaacctgaccgtgagaagaaaggtggtgttcgccgtgcccaagaccgagaacgaggtgcccagccccgccagcagccaccacagcagcaaccagcccgccagcctgaccgaggagaagagaaccccccagggcagccagaacagcctgaacaccgtgagcagcggcagcggcagcaccagcggcatcggcagcggcggcggcggcggcagcggcgtggtgagcaccgtggtgcagccctacgacgtggagatcagaagaggcgagaacgagggcttcggcttcgtgatcgtgagcagcgtgagcagacccgaggccggcaccaccttcggcaacgcctgcgtggccatgccccacaagatcggcagaatcatcgagggcagccccgccgacagatgcggcaagctgaaggtgggcgacagaatcctggccgtgaacggctgcagcatcaccaacaagagccacagcgacatcgtgaacctgatcaaggaggccggcaacaccgtgaccctgagaatcatccccggcgacgagagcagcaacgccaccctgctgaccaacgccgagaagatcgccaccatcaccaccacccacacccccagccagcagggcacccaggagaccagaaacaccaccaagcccaagcaggagagccagttcgagttcaaggccccccaggccacccaggagcaggacttctacaccgtggagctggagagaggcgccaagggcttcggcttcagcctgagaggcggcagagagtacaacatggacctgtacgtgctgagactggccgaggacggccccgccgagagatgcggcaagatgagaatcggcgacgagatcctggagatcaacggcgagaccaccaagaacatgaagcacagcagagccatcgagctgatcaagaacggcggcagaagagtgagactgttcctgaagagaggcgacggcagcgtgcccgagtacgccatgatcccccccaacatcgccgcctgcatgagaaacgagaagctgggcgaggcctgcttctacctgatgggccacaaccagaccaccacccccgccgccaccgccaccgcccccccccccgtgcacaaggtgttcagaaagtag

SEQ ID NO: 187151 - protein, 237 aa, Artificial Sequence
  derived and/or modified sequence
MLGGSLGSRLLRGVGGSHGRFGARGVREGGAAMAAGESMAQRMVWVDLEMTGLDIEKDQIIEMACLITDSDLNILAEGPNLIIKQPDELLDSMSDWCKEHHGKSGLTKAVKESTITLQQAEYEFLSFVRQQTPPGLCPLAGNSVHEDKKFLDKYMPQFMKHLHYRIIDVSTVKELCRRWYPEEYEFAPKKAASHRALDDISESIKELQFYRNNIFKKKIDEKKRKIIENGENEKTVS

SEQ ID NO: 187152 - DNA, 714 bp, Artificial Sequence
  derived and/or modified sequence
atgttaggaggaagtttagggagccggctgctcaggggggttggcggatcccacggccgcttcggagccagaggagttagagaggggggtgccgcgatggccgccggggaatcgatggcccagaggatggtttgggtggatctggaaatgacagggctggacatcgagaaggaccagattatcgagatggcttgcctaatcaccgacagtgaccttaatatcctggctgaaggaccgaatctcattataaagcaaccggacgaattgcttgattccatgtctgattggtgtaaagagcatcatgggaagagcggcctcacaaaggctgtcaaggaaagcaccataactctgcagcaggctgagtatgaatttctgtcttttgtcaggcagcagacaccacctgggctttgtcctctggctggaaatagcgtgcatgaagacaaaaagttccttgacaaatatatgccccagttcatgaaacatcttcactatcgcatcatcgatgtgagtaccgtcaaagaactgtgtagacgctggtaccctgaggaatacgagttcgcccctaagaaggcagcctctcaccgcgccctggacgatatatccgagagcatcaaagagctccagttctaccggaataatatttttaagaaaaagatcgacgagaagaagcgaaagattattgagaacggcgagaacgaaaagaccgtctcctag

SEQ ID NO: 187153 - DNA, 714 bp, Artificial Sequence
  derived and/or modified sequence
atgctgggcggcagcctgggcagccggctgctgcggggcgtgggcggcagccacggccgctttggagcccggggcgtgcgggagggcggggccgccatggctgctggggagagcatggcccagaggatggtgtgggtggacctggagatgacaggcctggacatcgagaaggaccagatcatcgagatggcctgcctgatcacagacagcgacctgaacatcctggccgagggccccaacctgatcatcaagcagccagatgagctgctggacagcatgtctgactggtgcaaggagcaccacggcaagagcggcctgaccaaggctgtgaaggagagcaccatcaccctgcagcaggccgagtatgagttcctgagctttgtgcggcagcagaccccacctggcctgtgccccctggccggcaacagcgtgcatgaggacaagaagttcctggacaagtacatgccccagttcatgaagcacctgcactaccgcatcattgatgtgtccacagtgaaggagctgtgccgccgctggtacccagaggagtatgaatttgcccccaagaaggccgccagccaccgggccctggatgacatcagcgagagcatcaaggagctgcagttctacagaaacaacatcttcaagaagaagattgatgagaagaagaggaagatcattgaaaatggagaaaatgagaagacagtgtcctag

SEQ ID NO: 187154 - DNA, 714 bp, Artificial Sequence
  derived and/or modified sequence
atgctgggcggcagcctgggcagccggctgctgcggggcgtgggcggctcccatgggcgttttggcgcccgcggagtgagggaaggaggcgccgctatggcggcaggtgagagtatggcccagcgaatggtctgggtagatcttgagatgacggggcttgatattgaaaaggatcagattatagaaatggcctgtctcattacagatagcgacctgaatatactcgcagagggccccaacctgattatcaagcaacctgacgagctcctagattcaatgtcggactggtgtaaggaacatcatggaaaatcaggcctgacgaaggctgtgaaggagtctactatcaccctgcagcaggcagaatatgagtttttgagcttcgtccgacagcagacaccccctggcctgtgtccgctggcaggaaactcggttcacgaagataagaagttcttagacaagtatatgccacagtttatgaagcatcttcactatcgaatcattgatgtgtctaccgtgaaggagctgtgcagaaggtggtatcctgaggaatacgagttcgcgcccaagaaggcagcctcacacagggccctagacgacatatcggaatcaatcaaggaactgcagttttacaggaataacatcttcaagaagaagatcgatgagaagaaacggaagatcatcgaaaacggagagaatgagaagaccgttagttag

SEQ ID NO: 187155 - DNA, 714 bp, Artificial Sequence
  derived and/or modified sequence
atgcttgggggaagtttgggtagcagactgcttcggggtgtcggtggctcccacggcaggttcggagcacggggagtgagagaaggcggtgctgcaatggctgccggagagtcaatggcccaacgcatggtgtgggtggatctggagatgacaggtctggacatcgaaaaggatcagattattgagatggcttgtctgatcaccgattcagatctgaacatcctggctgaaggcccaaatctgatcatcaagcaaccggacgaactgctggatagcatgagcgattggtgcaaagagcatcatggcaaatccggcctgacaaaggcagtcaaggaatccacaatcaccctccagcaagctgaatacgagtttttgtcctttgtgcgtcagcagactccgcctggtttatgcccactcgccggtaatagcgttcacgaggataagaaattcctcgataagtatatgccacagttcatgaagcatttgcattatcggattattgacgtatccactgtgaaagagctgtgccgccgatggtatccggaggagtacgagtttgccccaaagaaagctgcaagccatagagctctcgatgatatttccgagagcataaaggaactgcagttctatagaaataatattttcaaaaaaaaaatcgatgagaagaagaggaagattatcgagaacggggaaaatgagaaaacggtgtcatag

SEQ ID NO: 187156 - DNA, 1161 bp, Artificial Sequence
  derived and/or modified sequence
gttgagggcgagccggcgcaccgtacgctgggacgtgtggtttcagctcgtgcgcctccccgtgggtttgcgacgtttagcgactattgcgcctgcgccagcgccggctgcgagactggggccgtggctgctggtcccgggtgatgctaggcggctccctgggctccaggctgttgcggggtgtaggtgggagtcacggacggttcggggcccgaggtgtccgcgaaggtggcgcagccatggcggcaggggagagcatggctcagcggatggtctgggtggacctggagatgacaggattggacattgagaaggaccagattattgagatggcctgtctgataactgactctgatctcaacattttggctgaaggtcctaacctgattataaaacaaccagatgagttgctggacagcatgtcagattggtgtaaggagcatcacgggaagtctggccttaccaaggcagtgaaggagagtacaattacattgcagcaggcagagtatgaatttctgtcctttgtacgacagcagactcctccagggctctgtccacttgcaggaaattcagttcatgaagataagaagtttcttgacaaatacatgccccagttcatgaaacatcttcattatagaataattgatgtgagcactgttaaagaactgtgcagacgctggtatccagaagaatatgaatttgcaccaaagaaggctgcttctcatagggcacttgatgacattagtgaaagcatcaaagagcttcagttttaccgaaataacatcttcaagaaaaaaatagatgaaaagaagaggaaaattatagaaaatggggaaaatgagaagaccgtgagttgatgccagttatcatgctgccactacatcgttatctggaggcaacttctggtggtttttttttctcacgctgatggcttggcagagcaccttcggttaacttgcatctccagattgattactcaagcagacagcacacgaaatactatttttctcctaatatgctgtttccattatgacacagcagctcctttgtaagtaccaggtcatgtccatcccttggtacatatatgcatttgcttttaaaccatttcttttgtttaaataaataaataagtaaataaagctagttctattgaaatgcaaa

SEQ ID NO: 187157 - DNA, 714 bp, Artificial Sequence
  derived and/or modified sequence
atgctgggcggcagcctgggcagcagactgctgagaggcgtgggcggcagccacggcagattcggcgccagaggcgtgagagagggcggcgccgccatggccgccggcgagagcatggcccagagaatggtgtgggtggacctggagatgaccggcctggacatcgagaaggaccagatcatcgagatggcctgcctgatcaccgacagcgacctgaacatcctggccgagggccccaacctgatcatcaagcagcccgacgagctgctggacagcatgagcgactggtgcaaggagcaccacggcaagagcggcctgaccaaggccgtgaaggagagcaccatcaccctgcagcaggccgagtacgagttcctgagcttcgtgagacagcagaccccccccggcctgtgccccctggccggcaacagcgtgcacgaggacaagaagttcctggacaagtacatgccccagttcatgaagcacctgcactacagaatcatcgacgtgagcaccgtgaaggagctgtgcagaagatggtaccccgaggagtacgagttcgcccccaagaaggccgccagccacagagccctggacgacatcagcgagagcatcaaggagctgcagttctacagaaacaacatcttcaagaagaagatcgacgagaagaagagaaagatcatcgagaacggcgagaacgagaagaccgtgagctag

SEQ ID NO: 187158 - protein, 1353 aa, Artificial Sequence
  derived and/or modified sequence
MSSPMPDCTSKCRSLKHALDVLSVVTKGSENQIKAFLSSHCYNAATIKDVFGRNALHLVSSCGKKGVLDWLIQKGVDLLVKDKESGWTALHRSIFYGHIDCVWSLLKHGVSLYIQDKEGLSALDLVMKDRPTHVVFKNTDPTDVYTWGDNTNFTLGHGSQNSKHHPELVDLFSRSGIYIKQVVLCKFHSVFLSQKGQVYTCGHGPGGRLGHGDEQTCLVPRLVEGLNGHNCSQVAAAKDHTVVLTEDGCVYTFGLNIFHQLGIIPPPSSCNVPRQIQAKYLKGRTIIGVAAGRFHTVLWTREAVYTMGLNGGQLGCLLDPNGEKCVTAPRQVSALHHKDIALSLVAASDGATVCVTTRGDIYLLADYQCKKMASKQLNLKKVLVSGGHMEYKVDPEHLKENGGQKICILAMDGAGRVFCWRSVNSSLKQCRWAYPRQVFISDIALNRNEILFVTQDGEGFRGRWFEEKRKSSEKKEILSNLHNSSSDVSYVSDINSVYERIRLEKLTFAHRAVSVSTDPSGCNFAILQSDPKTSLYEIPAVSSSSFFEEFGKLLREADEMDSIHDVTFQVGNRLFPAHKYILAVHSDFFQKLFLSDGNTSEFTDIYQKDEDSAGCHLFVVEKVHPDMFEYLLQFIYTDTCDFLTHGFKPRIHLNKNPEEYQGTLNSHLNKVNFHEDDNQKSAFEVYKSNQAQTVSERQKSKPKSCKKGKNIREDDPVRMLQTVAKKFDFSNLSSRLDGVRFENEKINVIAKNTGNKLKLSQKKCSFLCDVTMKSVDGKEFPCHKCVLCARLEYFHSMLSSSWIEASSCAALEMPIHSDILKVILDYLYTDEAVVIKESQNVDFICSVLVVADQLLITRLKEICEVALTEKLTLKNAAMLLEFAAMYSAKQLKLSCLQFIGLNMAALLEARSLDVLSDGVLKDLSEFYRKMIPAMDRRVITPYQDGPDISYLEVEDGDIFLKEEINMEQNHSETMFKKAKTKAKKKPRKRSDSSGGYNLSDIIQSPSSTGLLKSGKTNSVESLPELLTSDSEGSYAGVGSPRDLQSPDFTTGFHSDKIEAKVKPYVNGTSPVYSREDLKPWEKSPILKISAPQPIPSNRIDTTSSASWVAGSFSPVSPPVVDLRTIMEIEESRQKCGATPKSHLGKTVSHGVKLSQKQRKMIALTTKENNSGMNSMETVLFTPSKAPKPVNAWASSLHSVSSKSFRDFLLEEKKSVTSHSSGDHVKKVSFKGIENSQAPKIVRCSTHGTPGPEGNHISDLPLLDSPNPWLSSSVTAPSMVAPVTFASIVEEELQQEAALIRSREKPLALIQIEEHAIQDLLVFYEAFGNPEEFVIVERTPQGPLAVPMWNKHGC

SEQ ID NO: 187159 - DNA, 4062 bp, Artificial Sequence
  derived and/or modified sequence
atgagttcccccatgcccgattgtacttcaaaatgccgatccttaaagcacgccctggatgttctttccgtggtaacaaaggggtctgagaaccagatcaaggccttcctatcgtcccactgctacaacgcagctaccataaaggatgtgttcgggagaaatgcccttcatctggtcagtagctgcggcaaaaaaggcgtacttgactggctgatacaaaagggcgtggacctcctggtcaaagacaaggaaagtgggtggacggccctccaccggagcattttttacggtcacattgactgtgtgtggagcttgcttaaacatggggtctccttatatatacaagataaggagggactgtcagccctggatctagtaatgaaggataggcccacccacgtggttttcaagaacaccgatcctaccgacgtatatacttggggggacaataccaatttcaccctcggccatgggtcacaaaattctaaacatcacccagagctcgtcgatctgttcagcaggagcggcatatatatcaagcaggtcgttttgtgtaaatttcattctgtttttcttagccagaaaggccaggtgtacacctgcggtcacggaccgggcggcagacttggccacggggacgaacagacctgtcttgttccacggctcgtggagggtcttaatggtcacaattgttctcaggtggctgcagccaaagaccacacagtagtcctcacagaggacggatgtgtgtatacattcgggctgaacattttccatcagctgggtataattccccctcccagtagctgcaatgtgcctaggcagattcaggccaaatacctcaaaggtcggacaattataggcgtcgcagcgggacggtttcatactgtgctgtggacacgcgaggccgtatatacgatgggcctaaacggagggcagctcggatgcttattggaccctaatggagaaaagtgcgtaacagctccaaggcaggtcagcgcactccatcataaggatatagccttgagcctggtggctgccagtgatggggccacagtctgtgtcacaacgcggggtgatatatacctgctcgccgactaccagtgcaagaaaatggcttccaaacaactgaacctgaagaaggttctggtctctggcggtcacatggaatacaaggtggatcccgagcatctgaaagaaaatggaggccaaaagatctgcattctggcaatggatggtgcgggcagggttttctgctggcggagcgtcaacagttccctgaagcaatgcagatgggcctatccccggcaggtctttatctcggacattgcgttgaataggaacgagatcttattcgtcacgcaggacggggagggtttccgcgggcgttggttcgaagaaaaaaggaaaagcagtgaaaaaaaagagatactgtccaatctgcataatagtagctcggacgtttcatacgtgagtgatatcaattctgtctatgagagaattcgcctagaaaagctgacatttgcacaccgtgctgtctccgtgagcacagatccctctggttgtaatttcgcaatcctgcaaagtgacccaaagacttccttgtatgagattcccgcggtttcctcgtcctcattctttgaagaattcggcaagctgctcagagaagccgacgagatggacagcatccatgacgtaacattccaggtgggcaatcggctctttcccgcacataaatatatactagcggtgcacagtgatttcttccaaaaactgttcctgagcgacggaaacacgtccgagttcacagacatttatcagaaagatgaggactccgctggttgccatctgtttgttgtcgagaaagtccaccctgacatgtttgagtatcttctgcagtttatctatactgacacatgcgatttcttgacccatggctttaaaccacgaatacacttgaataagaatccggaagagtatcaaggaactctcaattcacacctgaacaaggtgaatttccatgaggacgataaccagaagtctgcgttcgaagtctataaatccaaccaggctcagacggtcagtgaacgacagaagtcaaagcctaaatcctgtaaaaagggcaagaatattcgggaggatgatcccgtgcggatgctccagaccgtggccaagaagttcgacttttcgaatcttagttcaaggctcgatggcgtgcgttttgaaaatgaaaagatcaacgtgattgccaaaaatactggcaacaagctgaaactttcccagaagaagtgctcttttctgtgcgacgtcactatgaaaagtgtggatggcaaagagttcccctgtcacaaatgtgtcctgtgcgcaagactggagtattttcattccatgctgagttcttcctggatcgaagccagttcatgcgccgcattagaaatgcccattcactcggatattctgaaggtgattctggactatttatacacggacgaagccgtggtaatcaaggagagccagaatgtggatttcatatgtagtgtgttagttgtggccgatcaattgctaatcaccagattaaaagagatatgtgaagttgccctgacggaaaaactgacactgaaaaatgccgcgatgcttctggagttcgccgctatgtattcagcaaagcagctaaagctatcttgcctacagtttataggcctcaacatggccgctctgctggaggcaaggtcattggatgtgttgtctgatggggttctgaaggaccttagtgaattctatcgcaaaatgatccctgccatggatcgccgggtcattactccttatcaagatgggccggacatctcgtacttggaggtcgaagacggagatatttttctcaaagaagaaataaatatggagcagaatcacagtgaaacaatgtttaaaaaggccaaaactaaagcaaagaagaagcctcgaaaaaggagcgactccagtggaggatataatctcagtgatattatccagtccccctcatcgacagggcttctgaagagtggaaagacaaatagcgttgaaagtctgccagagctgttaactagcgactccgaaggctcatatgccggggtgggaagccctcgtgaccttcagtcccctgatttcacgactggcttccatagtgacaaaatagaagccaaagtaaagccctacgttaacggcacgtcccctgtgtattctcgcgaggatttgaagccgtgggaaaagtcaccaatactgaaaatctccgcaccacaaccgataccttccaacagaatagataccaccagctctgcctcttgggtggcaggaagcttttcacctgtgagtcctccagtagtcgacctccgcacaattatggaaattgaggagtctcggcaaaaatgcggcgcaactcccaagtctcacctggggaagaccgtctcccacggggtgaagttgtcgcaaaagcagcgtaagatgattgcgctgactaccaaagaaaataattcgggaatgaatagcatggaaacggttctgtttacgccatcaaaggcacctaaacccgttaatgcatgggcctcctctcttcattccgtgtccagcaagtcattccgtgacttcttactcgaggagaagaagagtgttacaagccatagcagcggagatcatgtcaaaaaagtgtcattcaaggggatcgagaattcccaggccccaaaaatagtccggtgtagcacacacggcactccaggacctgaagggaatcacattagcgacctgccgttgctggacagccctaatccatggctaagtagcagtgtgacagccccttccatggtggcgcctgttacctttgcatccattgtcgaggaggagctccaacaggaggctgctctgattaggtctcgagagaagccgcttgctttgattcagattgaagaacatgccatacaagacctgctggtgttctacgaggcttttggcaacccagaggagtttgtgattgtggagaggacaccccaagggcccctcgccgttccaatgtggaataagcatggctgttag

SEQ ID NO: 187160 - DNA, 6054 bp, Artificial Sequence
  derived and/or modified sequence
cttcctctacatccccgttcccgattcctgtagtagcggctgtattgcagccgcctgccgaactgacccgggtctggggactggcccctctggcgccgttcggtttctcttattgccttcactgaggatgagtccctttgtggctctatgtggaccctgcggaatccaccggcgcagtttcatctagcgactggtcacccttgcaattatggatatttaaaagggtcagacagtgtggagggggagttcccctcctcactcccccttggtgcttgactccaggaataatttataaactgtggaatttttttaaatgaagaacttgtatttgatatgaactttatagagctatttataatttttttgatttaagtgccaaaaaattgtataaagatatatagttttatactattgtcaggaggatttaaattatcctaaaaaggtaatttattctctgtaacttcctcaatagcacctttgtgtcctggctttttcattttttaaaattagttttcacgattctgaagtaagtggtataaaaacagttaggatgagttcacccatgcctgactgcacatcaaagtgtcgatccctgaagcatgctttggatgtcctttctgtggtaacaaaggggagcgaaaaccagattaaggcctttctctccagtcattgttacaatgctgcaactatcaaggatgtttttggcaggaatgccctccaccttgtttcctcctgtggaaagaaaggagtgttagattggcttattcagaaaggagtggatctgttggtgaaagacaaagagtctggatggacagcattgcacagaagcattttttatggacatattgattgtgtttggtctctattgaagcatggtgttagtctgtatattcaagataaagaaggcttgtcagctttggatcttgtaatgaaggatagaccaactcatgtagtattcaagaatactgatcctacagatgtttatacttggggcgataatacaaattttaccctgggtcatggaagccagaatagcaaacatcatccagagttggtggatctgttctccaggagtgggatttatatcaagcaggtggtgctttgtaaatttcactccgtgtttctgtctcagaaagggcaggtttatacctgtggtcatggtcctggagggcgattaggacatggagatgaacagacatgcttggtccctcggcttgtggaaggactgaatggtcataattgttcccaagtggcagctgctaaggatcatactgttgtattaactgaagatggatgtgtttatacatttggtctaaacatttttcatcaattaggaattattccaccgccttccagttgtaatgtacccagacagatacaggcaaaatatctgaaaggaaggacaatcattggcgttgcagcaggcaggtttcatacagtcctatggactagagaagctgtttacactatgggactaaatggtggacaactgggttgtttgctagatcccaatggagaaaagtgtgtaactgctcctcgtcaggtctctgcccttcaccataaagacattgctctgtctttggttgctgcaagtgatggagctacagtctgtgttaccacaaggggagatatttacttacttgcagactatcagtgcaagaagatggcttctaaacagttgaacttgaaaaaagttcttgtgtctgggggtcatatggaatacaaggttgatcctgaacatttgaaagaaaatgggggtcaaaaaatttgcattcttgcaatggatggagctggaagggtgttttgctggagatcagtcaacagttctctgaagcagtgtcgatgggcctatccacgtcaggtcttcatttctgatattgctttaaatagaaatgaaattctatttgttacgcaagatggagaaggatttagagggagatggtttgaagagaaaagaaagagttctgaaaagaaagagattttatcaaaccttcacaattcctcatcagatgtgtcttatgtctctgatataaatagtgtgtatgaaagaattcgacttgagaaacttacctttgcacatagagctgttagtgtcagcacagatccaagtggatgcaactttgcaatcctgcagtcagatcctaaaacaagcctttatgaaattccagctgtgtcctcatcatccttttttgaagagtttggcaaactgttgagggaagcagatgaaatggacagcattcatgatgtgacatttcaagttggcaatagactcttccctgcacataaatatattttggcagtgcattctgatttttttcagaaattgtttctttcagatggtaatacttcagaatttacagatatttaccagaaagatgaagattctgcagggtgccatctctttgtggtagagaaggttcatcctgacatgtttgaataccttttacaatttatatacacagatacttgtgactttttaactcatggcttcaaaccaagaatacacttaaacaaaaacccagaagaatatcagggaactctgaattctcatttgaataaagtgaatttccatgaagatgataaccagaagtctgcatttgaagtttacaaaagtaatcaagctcaaacagttagtgagaggcagaagagcaaacctaaatcttgtaaaaaaggaaaaaatattagggaagatgatcctgtaagaatgttgcaaactgttgcaaagaaattcgacttcagtaatttgagtagtaggttagatggagtcagatttgaaaatgaaaaaattaatgttattgccaagaacactggtaataaactgaagctaagtcagaaaaaatgttcatttctgtgtgacgtgaccatgaaatcagtggatggaaaggaatttccttgtcataaatgtgttctttgtgctagacttgaatattttcatagtatgctgagtagctcatggattgaggcttccagttgtgcagctctggaaatgccaatacattctgatatattaaaagttattttggactacctctatactgatgaagctgtggtgataaaagaatctcaaaatgtagattttatttgtagtgttcttgtggtggctgatcaacttctcataacccggttgaaagagatttgtgaagtagcattaactgaaaaacttaccctgaagaatgctgctatgctactggaatttgcagcaatgtatagtgcaaaacagttgaaactgtcttgtttacagtttataggattgaatatggcagctttacttgaagcaaggtctcttgatgttttaagcgatggtgttttgaaggatctttctgagttttaccggaaaatgattccagcaatggatagaagagtcattacaccatatcaagatggaccagatattagctatttggaagtagaagatggagatatcttcttgaaagaagaaataaatatggaacaaaatcattcggaaactatgttcaagaaagcaaaaacaaaagctaaaaagaagccacgtaaacgttcagatagttctggaggttataacctttcagatattattcagagtccatcatctacaggattattaaagtctggtaagaccaattctgtggaatctcttccagaactgttgacatcagactctgaaggaagctatgcaggagtgggtagtcctagagatttacagtcccctgatttcacaacaggatttcattcagataagattgaggcgaaagtcaaaccgtatgttaatggtacatctcctgtgtattctagggaagatttaaaaccatgggaaaagtcaccaatacttaaaatatctgctccacagcctattcccagtaacagaattgatactaccagctctgccagttgggttgctggttctttcagtcctgtcagccctcctgttgtggatctcagaactatcatggaaatagaagaaagtagacaaaaatgtggagctacaccaaagtcacatttaggcaaaacagtttctcatggagttaaactttctcagaagcaacgaaaaatgattgcattgactaccaaggaaaacaattcaggaatgaatagcatggaaacagttttattcactccttcaaaagcccccaaaccagtgaatgcatgggcatcttctctgcattcagtttcatccaagtcattccgggatttcttactagaagaaaaaaagtctgttactagccatagttcaggcgatcatgtcaaaaaagtttcttttaaaggaattgaaaattctcaggcaccaaaaattgtcagatgctctacccatggtaccccaggaccagaaggcaaccatatttcagatttaccacttctagacagtcccaatccctggctatcttcttcagtgactgctccatccatggtagccccagtcacttttgcatctattgtagaagaagaactacaacaagaagcagctcttattagaagtcgagaaaaaccgttggctctgattcagattgaggagcatgccatacaagatttattggttttctatgaggcatttggcaaccctgaagagtttgtcattgttgaaaggacaccgcagggaccactggcagtacctatgtggaataagcatggatgctagttcactgtggagttgagatgcattttacataattatgagtttgttcatataaagaaaagctgtggaaaagagtcttagagattttgtaatatcattctaaatagattaagaaaagatataatttctttactgcagttaaatcatataatgtttgtatgattaaaaataaatttctcagaattgtgattttagtaactttatataaaatgtgtgagacaaaaacttattaaggttaaatagaattgtttcttctgaataatctaacaaaggaaaatataagtgattgaatcataagatataaggggggtaaagtattaaaaataacttttttgtttgataacttgagaatttagaagattttgccaagtatgtgttgttgcttgacttcttaaatatggcattgatgaatttaaagtaggagcatcagttattacttctgattcattaatggccagaattttgtgtttggtgtaatagttgtgtcaccattcttgttgctttttaaaaatcaggctaatcatgtggtccatgtctcttcaaagcttgacctgcacaaatgccatatttctatttggaccacatattctccattttgcattgagcagtagagtacagtggaaagggaataagaatactgattattctgaacagtttagtcccaagagaatagcgttttaaaaaagaaaaacaagatttggagtcattgtgggttatttttggtgggatggaggatcttaaaaatgcctaattgtgagagaatcaattgctgaaagtgttaaaatttctgaaaataaatgcttaattacatatacaggaattaaatagtttggaagagggttggattatcattacctttacaatactgtataatcagaagttctctgaacctcaattgtatatctagacataaaaattgttttctgtataggatgttgtttggtttgtttctgagtgtttaaattttgcaaaaacaaatgttaaatttgtgcttcagtacctagataaattggaaaggttaatgttctagtttctggaaggtaagcctgggagacacataagcaattcactgctataatttagttgatgtaaaatgacggaaactgactcaatatgtcaggtttaactctgcccaaaagcagcagacatgtaagcagatgtgcaataaaaaatgatcttgatccatttcactaatgtgtgcttgacattttttactatattgacatttattatggaaagagttaataattattttttctgatgtgctacactagtggccagtatatggttaagttgatgctgtatttattctaagacggatttaaaaaggcagttttctaaatatgaacttgtgaatttttgtatgtgtgtttgagtaaattgagaaatgaattttataaatgttctattgatgttgcagtaaagaagccttttgaagtaattga

SEQ ID NO: 187161 - DNA, 4062 bp, Artificial Sequence
  derived and/or modified sequence
atgagcagccccatgccagactgcaccagcaaatgtcgcagcctgaagcacgccctggatgtgctgtctgtggtgaccaagggcagcgagaaccagatcaaggccttcctgagcagccactgctacaatgctgccaccatcaaggatgtgtttggaagaaatgccctgcacctggtgagcagctgtgggaagaagggcgtgctggactggctgatccagaagggcgtggacctgctggtgaaggacaaggagagcggctggacagccctgcacaggagcatcttctacggccacatcgactgtgtgtggagcctgctgaagcacggcgtgtccctgtacatccaggacaaggagggcctgagcgccctggacctggtgatgaaggaccggcccacccacgtggtgttcaagaacacagaccccacagatgtgtacacctggggagacaacaccaacttcaccctgggccacggcagccagaacagcaagcaccaccctgagctggtggacctcttcagccgcagcggcatctacatcaagcaggtggtgctgtgcaagttccacagcgtcttcctgagccagaagggccaggtgtacacctgtggccacggccctgggggccgcctgggccatggagatgagcagacctgcctggtgccccggctggtggagggcctgaatggccacaactgcagccaggtggccgccgccaaggaccacacagtggtgctgacagaagatggctgtgtgtacaccttcggcctgaacatcttccaccagctgggcatcatccccccacccagcagctgcaatgtgccccggcagatccaggccaagtacctgaagggccgcaccatcattggagtggccgccggccgcttccacacagtgctgtggacccgggaggccgtgtacaccatgggcctgaatggaggccagctgggctgcctgctggaccccaatggagagaagtgtgtgacagccccccggcaggtgtctgccctgcaccacaaggacatcgccctgagcctggtggccgccagtgatggagccaccgtgtgtgtgaccaccaggggggacatctacctgctggccgactaccagtgcaagaagatggccagcaagcagctgaacctgaagaaggtgctggtgtctgggggccacatggagtacaaggtggaccctgagcacctgaaggaaaatggaggccagaagatctgcatcctggccatggatggagctggccgggtcttctgctggaggtctgtgaacagcagcctgaagcagtgccgctgggcctacccccggcaggtgttcatcagtgacatcgccctgaacagaaatgagatcctgtttgtgacccaggatggagagggcttccggggccgctggtttgaggagaagaggaagagcagcgagaagaaggagatcctgagcaacctgcacaacagcagcagtgatgtgtcctatgtgtctgacatcaacagcgtgtatgaaagaatccggctggagaagctgacctttgcccacagagctgtgtctgtgtccacagaccccagcggctgcaactttgccatcctgcagagcgaccccaagaccagcctgtatgagatcccagctgtgagcagcagcagcttctttgaggagtttgggaagctgctgcgggaggctgatgagatggacagcatccatgatgtgaccttccaggtgggcaacagactcttccctgcccacaagtacatcctggccgtgcacagcgacttcttccagaagctgttcctgagtgatggcaacaccagcgagttcacagacatctaccagaaggatgaggacagcgctggctgccacctgtttgtggtggagaaggtgcacccagacatgtttgagtacctgctgcagttcatctacacagacacctgtgacttcctgacccacggcttcaagccccgcatccacctgaacaagaaccctgaggagtaccagggcaccctgaacagccacctgaacaaggtgaacttccatgaagatgacaaccagaagagcgcctttgaggtgtacaagagcaaccaggcccagacagtgtctgagcggcagaagagcaagcccaagagctgcaagaagggcaagaacatcagagaagatgatcctgtgaggatgctgcagacagtggccaagaagtttgacttcagcaacctgagcagccggctggatggagtgcgctttgaaaatgagaagatcaacgtgattgccaagaacacaggcaacaagctgaagctgagccagaagaagtgcagcttcctgtgtgatgtgaccatgaagtctgtggatggcaaggagttcccctgccacaagtgtgtgctgtgtgcccggctggagtacttccacagcatgctgagcagctcctggattgaggccagcagctgtgccgccctggagatgcccatccacagcgacatcctgaaggtgatcctggactacctgtacacagatgaggccgtggtgatcaaggagagccagaatgtggacttcatctgcagcgtgctggtggtggccgaccagctgctgatcacccggctgaaggagatctgtgaggtggccctgacagagaagctgaccctgaagaatgctgccatgctgctggagtttgctgccatgtacagcgccaagcagctgaagctgagctgcctgcagttcatcggcctgaacatggccgccctgctggaggcccggagcctggatgtgctgagtgatggagtgctgaaggacctgtctgagttctacaggaagatgatcccagccatggaccggcgggtcatcaccccctaccaggacggccctgacatctcctacctggaggtggaggatggagacatcttcctgaaggaggagatcaacatggagcagaaccacagcgagaccatgttcaagaaggccaagaccaaggccaagaagaagcccaggaagagaagtgacagcagcggcggctacaacctgagtgacatcatccagagccccagcagcacaggcctgctgaagagcggcaagaccaacagcgtggagagcctgcctgagctgctgaccagtgacagcgagggcagctatgccggcgtgggcagcccccgggacctgcagagcccagacttcaccaccggcttccacagcgacaagattgaggccaaggtgaagccctacgtgaatggcaccagccctgtgtacagccgggaggacctgaagccctgggagaagagccccatcctgaagatcagcgccccccagcccatccccagcaacagaattgacaccaccagcagcgcctcctgggtggccggcagcttcagccctgtgtccccacctgtggtggacctgcggaccatcatggagattgaggagagccggcagaagtgtggggccacccccaagagccacctgggcaagacagtgtcccatggagtgaagctgagccagaagcagaggaagatgattgccctgaccaccaaggagaacaacagcggcatgaacagcatggagaccgtgctcttcacccccagcaaggcccccaagcctgtgaatgcctgggccagcagcctgcacagcgtgagcagcaagagcttccgggacttcctgctggaggagaagaagtctgtgaccagccacagcagcggggaccacgtgaagaaggtgtccttcaagggcatcgagaacagccaggcccccaagatcgtgcgctgcagcacccacggcaccccaggccctgagggcaaccacatcagtgacctgcccctgctggacagccccaacccctggctgagcagctctgtgacagcccccagcatggtggcccctgtgacctttgccagcatcgtggaggaggagctgcagcaggaggccgccctgatccgcagccgggagaagcccctggccctgatccagatcgaggagcacgccatccaggacctgctggtgttctatgaggccttcggcaaccctgaggagtttgtgattgtggagaggaccccccagggccccctggccgtgcccatgtggaacaagcacggctgctag

SEQ ID NO: 187162 - DNA, 4062 bp, Artificial Sequence
  derived and/or modified sequence
atgagcagccccatgcccgactgcaccagcaagtgccggagcctgaaacatgcactggatgtgctgtctgtggttacgaaagggtctgaaaaccaaatcaaggcttttctgagctctcattgttacaatgcagcaacaattaaggacgtgttcggccgcaatgccctgcatctcgtttccagttgcggcaaaaaaggcgtgctcgactggttaattcagaaaggggtggaccttctggtcaaggacaaagaatccgggtggacggccctgcaccgctcaatcttctacggccacattgactgtgtctggtccctgctgaaacacggagtgagcctatacatccaagacaaagagggtttgtctgccctggacttggtgatgaaggatcgccctacccatgtggtgtttaagaacactgatccaacagatgtttacacctggggggacaataccaacttcactctgggtcatggatcgcagaactctaagcaccacccagaactggtcgatttgttcagtcggtcagggatctatattaagcaagtggtgctctgtaagtttcacagcgtgtttctcagtcagaaaggacaagtttatacttgtgggcacgggcctggtgggcgcctcggacatggagacgagcaaacgtgcctcgtgcccagactggtggaggggttaaatggccacaattgttctcaggtcgctgctgccaaagatcatacagtcgtactcacggaggacggatgcgtatacaccttcggcctgaacatcttccaccagctgggcatcatacctcccccttcatcctgcaatgtcccacgacagattcaagcaaaatacttaaagggccgcaccattatcggggttgcagccgggagatttcatacagtgctctggactagggaagctgtgtacaccatgggactcaatggcggacagttaggctgcctgctggacccaaacggagaaaaatgtgttaccgcacctcgccaggtgagtgcgctgcaccacaaagatattgccctctctctggttgccgcctccgatggagctactgtgtgtgtgaccacccggggcgacatttacctacttgcggattatcagtgtaagaaaatggcatcaaaacagctgaatctcaagaaagtgctagtgtctggaggacacatggagtacaaggtggacccagagcacttgaaggaaaatggagggcagaagatctgcatcttggcgatggacggcgctggccgcgtattctgttggcggtctgtgaactcatctctcaaacaatgccggtgggcttaccctcgacaggtctttattagcgacattgcgcttaaccgcaacgaaatcctgtttgtcacacaggatggcgaaggctttcggggcagatggttcgaagaaaaaagaaagagcagtgagaagaaagagatactgtcaaacttacacaattcctcatcagacgtctcatatgtgagtgatataaacagcgtgtacgagcgcatcaggttggaaaagctcacattcgctcatcgggctgtatcagtgtctacagatccctccggatgcaattttgccatcctgcagtcagatcccaaaaccagcctgtacgaaatcccagccgtctcttcatcctctttttttgaagaattcggaaaacttctgcgggaggcagacgagatggactccatccatgacgttacattccaggtcggcaatcggctcttccccgctcataaatacatcctggccgtccattccgatttttttcaaaagctctttctttctgatggcaacacatccgagtttacagatatttaccagaaagatgaagactccgcaggttgccatttattcgtggttgagaaagtgcacccagatatgttcgagtacctgttgcagtttatatacaccgatacttgcgatttcctgacccacggattcaaacctcgcatccatctcaacaaaaatcccgaagaatatcagggaacacttaatagtcacctgaataaggttaacttccacgaggacgataaccagaagagcgctttcgaagtctacaagtcaaatcaggcccagacagtgtctgaacgccagaaaagcaaacccaagagctgtaaaaaggggaagaatatcagggaagacgacccagttcgtatgctgcaaacagtcgcaaaaaagttcgatttttctaatctcagcagcaggttggacggcgtgaggtttgaaaacgaaaagatcaacgtgatcgcaaagaataccggtaataagctgaagctgtctcagaaaaagtgctcctttctgtgcgatgtcactatgaagtccgtggatggcaaagagtttccctgccataaatgtgtgttatgcgcacggcttgagtatttccattctatgttgtcaagctcctggattgaagcctcaagctgcgccgctctcgagatgcccatccactccgacatccttaaggtgattctggactatctgtacactgacgaagctgtggttataaaggaatcccagaacgtggatttcatatgctctgtgcttgtggttgcagaccaactattgattacaaggcttaaggagatatgcgaggttgctcttactgagaaacttacccttaaaaatgcagcaatgctgctggaattcgcagccatgtattcagcaaagcagttgaaactgtcctgccttcagttcatcggcttgaacatggccgctctgttggaagcccgttccctggacgtcctctccgacggagtgttaaaggatctgagcgagttttatcgaaaaatgattcccgccatggatcggagggtcatcaccccgtaccaagacgggccagacatctcgtacttggaagtcgaggacggtgatatattcctgaaagaagaaataaatatggaacagaaccactcggagaccatgtttaagaaggctaaaaccaaggccaaaaaaaaacccagaaagagatctgactccagtgggggctataacctctccgatatcatccagagtcctagttccacagggctgctgaaatcgggtaaaactaacagcgtggaaagtctcccagagctgctcacaagcgactcagaggggtcatatgccggtgtggggtcccctcgagacctccaatctcctgatttcacaacaggattccatagcgataaaatagaggcgaaagttaaaccctatgtgaatggtacctccccggtctattctagagaggatctgaagccctgggagaaatcacctatcctgaagatttccgcaccacagcccataccttctaatagaattgacaccacatcatctgcctcttgggtggcaggatctttctccccagtgtcgccccctgtcgtcgatttgcgcaccattatggagattgaggaaagccgtcagaaatgtggagcaacccctaaatctcatttgggcaagaccgtctctcacggagtgaaactgtcccagaagcagcgaaagatgatcgcccttaccacaaaggagaacaactctggtatgaatagtatggagaccgtactgttcacccctagcaaagcacccaaaccggtgaacgcttgggcaagcagcctccacagtgtaagttctaaatctttcagagacttcctgctcgaggaaaagaagagcgttaccagccacagctccggagatcatgtgaaaaaggtgagtttcaagggcatagaaaattcccaggccccaaagatcgtaaggtgtagtacccacggaacacccggccccgaggggaaccatatatctgacctgccattgctggattcccctaatccttggttaagctcatcggttaccgccccaagcatggtggccccagttactttcgcctccattgttgaagaggagctgcagcaggaagccgccttgatcagaagtcgtgagaaacccttggcattaatccagatcgaagagcatgccattcaggaccttttagttttctacgaggccttcggaaatcctgaagagtttgttatcgtggagagaacaccccagggtcccctcgccgtgccgatgtggaataaacacggctgttag

SEQ ID NO: 187163 - DNA, 4062 bp, Artificial Sequence
  derived and/or modified sequence
atgtcctcacccatgcccgattgtactagcaagtgccggtccctgaagcacgctctagacgtgctgtctgttgtgacaaaaggctctgaaaatcagattaaagcgttcttgtcctcgcactgttataacgccgcaactatcaaggatgtgttcggcaggaatgctctgcatctagtgagtagctgcggaaagaagggggtgcttgactggctcattcaaaagggcgtggacctgctcgtaaaggacaaggaatccggctggaccgcccttcataggagcatcttttatgggcacattgactgcgtttggagtctgctgaaacatggagtgagtctctacatacaagataaagaggggctgtctgccctggatttagtgatgaaggaccggccaacacatgtggtctttaagaacacggacccaacggacgtttacacgtggggggacaacaccaatttcaccttagggcatgggtcacagaatagcaagcaccaccctgaacttgtggacctgttttctcgaagcggaatttatatcaaacaagttgttctgtgcaaatttcactctgtcttcctctcccagaagggccaggtgtacacatgcggtcatggaccgggaggtaggctgggacatggcgacgagcagacctgcctggtgcccagactagtggagggcctgaacgggcataattgttcccaggtcgccgcagccaaggaccacactgtggtgcttaccgaggatggttgtgtctacacgttcggactcaatatcttccaccaacttggcataatccccccaccttccagctgcaatgtccctagacaaattcaggctaagtacctgaagggcagaactatcataggtgtcgccgctggacggtttcacaccgtgctgtggactcgcgaagctgtgtacaccatgggtctaaatgggggacaactgggatgcctactcgatcctaatggggaaaagtgtgttacggcgcctagacaggtgtctgcacttcaccataaagatatcgccttaagtctggtcgctgcctccgatggcgcaaccgtgtgcgtcaccaccagaggcgacatctacctgctggccgattatcagtgcaagaaaatggcctctaagcagctcaatttaaaaaaggtcctggtgagtggagggcacatggagtataaggtcgaccctgagcacctcaaggagaacggaggccaaaaaatctgcattctcgcaatggacggggctggccgagtcttctgctggcgcagcgttaatagtagcctgaagcaatgcaggtgggcctatcccagacaggtcttcatttcagacattgccctgaatagaaacgagatactttttgtgactcaagacggggaggggttcaggggtaggtggttcgaagaaaagcgaaaatccagcgagaagaaagaaatcttgtctaacctgcataattcgtcatccgacgtctcctacgtgtcagatatcaactccgtgtacgagcgtatccgactcgagaaactgactttcgcacatagagcagtgtcagtgtctactgacccaagcgggtgtaattttgcaatcttacaatctgatccaaaaacatccttgtacgagattcccgcagtgtcctcctcctcctttttcgaagagtttggaaaactcctccgcgaggccgacgaaatggattcaattcacgacgtcacatttcaggtaggaaaccgactctttcctgcccacaagtatatcctggccgttcactccgatttctttcagaaattgttccttagcgacggtaatacgtccgaatttaccgatatataccaaaaggacgaagatagtgctggctgccaccttttcgttgttgagaaggtgcatccagatatgtttgagtatctcctgcaattcatctacacagatacctgtgactttttgacccacggcttcaagccgaggatccacttaaataagaatcctgaagaatatcagggcactttgaattcccatctgaataaggtgaactttcacgaggatgacaatcagaaatccgccttcgaggtgtataaatccaaccaggcacagacagtcagcgaacggcagaaaagcaaaccaaagtcatgtaagaagggcaaaaatatacgcgaagacgacccagttcggatgttgcagaccgtggctaaaaagtttgacttttccaacctgagcagtagactggacggcgtcagatttgaaaacgaaaaaatcaatgtgatagcgaaaaatactggtaacaagttgaagctttctcagaagaaatgcagtttcctgtgtgatgttaccatgaagtcagttgatggaaaggaattcccctgccataagtgtgtgctctgtgcacggctggaatactttcactcaatgctgagcagctcctggatagaggcctcttcatgcgcagctctggagatgcccatacacagcgacatcttaaaagttatcttagactatctgtacacggatgaagcagtcgtgatcaaggaaagccagaacgttgactttatttgcagcgtgttagtggtagcagatcaattactcatcacaagattaaaagagatctgcgaggtggcccttaccgagaaactgactctgaagaacgccgctatgctgctggagtttgcggctatgtattcggccaagcagctgaaactgagctgcttacaattcatcggtctcaacatggcagctctattggaagccagatctctggatgtattatctgacggagtgctcaaggacctctccgagttctaccggaagatgattccggcaatggaccggagagttattaccccataccaggacgggcctgatattagctacctcgaagtagaagacggggatatttttctgaaggaagaaatcaacatggaacagaaccactccgagactatgttcaagaaagcgaaaaccaaggccaaaaaaaaacccagaaaacgatctgactcatcgggaggctataacctcagtgatatcatacagtcgccgtccagtacagggctgctcaaatcaggaaaaaccaattccgtggagagcctgccagaacttctgacatccgattcagagggctcctacgccggtgtgggcagcccccgagacttacagtcccccgattttacgactggattccattccgataagatcgaagcgaaggtgaagccatatgtcaacggcacgagcccagtctacagccgcgaggatctgaagccctgggaaaagagtcccatcctcaaaatcagtgcaccccagcctatccctagcaaccgcatcgacaccacatccagtgcttcctgggtcgcgggttctttctcacccgtgtccccccctgtagtcgatctgagaaccatcatggagatcgaggagtctcggcagaaatgcggagcaacccccaaaagccatctcgggaagacagttagtcacggagtgaaactttcccaaaagcagagaaaaatgattgctcttactactaaggaaaataattccggcatgaactccatggagacagtgctgttcactccatctaaggctcctaaacccgttaatgcatgggcgtcatccctacactctgtttcctccaagtccttccgcgacttcctcttggaagagaaaaaatccgttacttcccacagtagcggtgaccatgtgaagaaggtgagtttcaaaggtatcgagaattctcaggcaccaaagattgtccggtgcagtactcacggaactcctggacccgagggcaaccacattagcgatctgccactgctcgacagtccaaatccctggctttctagtagcgtgacggcccctagcatggtagcaccagtgacgttcgcatcgatcgtagaggaagagttgcagcaagaggcggcactcataagatcaagggagaagccactggcattaatccagatcgaggagcatgctatccaggacttattagtgttttatgaagcgtttggcaatccagaggagttcgttatcgtcgagcgcacgccccagggaccactcgctgtgccgatgtggaacaaacatggctgctag

SEQ ID NO: 187164 - DNA, 4062 bp, Artificial Sequence
  derived and/or modified sequence
atgagcagccccatgcccgactgcaccagcaagtgcagaagcctgaagcacgccctggacgtgctgagcgtggtgaccaagggcagcgagaaccagatcaaggccttcctgagcagccactgctacaacgccgccaccatcaaggacgtgttcggcagaaacgccctgcacctggtgagcagctgcggcaagaagggcgtgctggactggctgatccagaagggcgtggacctgctggtgaaggacaaggagagcggctggaccgccctgcacagaagcatcttctacggccacatcgactgcgtgtggagcctgctgaagcacggcgtgagcctgtacatccaggacaaggagggcctgagcgccctggacctggtgatgaaggacagacccacccacgtggtgttcaagaacaccgaccccaccgacgtgtacacctggggcgacaacaccaacttcaccctgggccacggcagccagaacagcaagcaccaccccgagctggtggacctgttcagcagaagcggcatctacatcaagcaggtggtgctgtgcaagttccacagcgtgttcctgagccagaagggccaggtgtacacctgcggccacggccccggcggcagactgggccacggcgacgagcagacctgcctggtgcccagactggtggagggcctgaacggccacaactgcagccaggtggccgccgccaaggaccacaccgtggtgctgaccgaggacggctgcgtgtacaccttcggcctgaacatcttccaccagctgggcatcatccccccccccagcagctgcaacgtgcccagacagatccaggccaagtacctgaagggcagaaccatcatcggcgtggccgccggcagattccacaccgtgctgtggaccagagaggccgtgtacaccatgggcctgaacggcggccagctgggctgcctgctggaccccaacggcgagaagtgcgtgaccgcccccagacaggtgagcgccctgcaccacaaggacatcgccctgagcctggtggccgccagcgacggcgccaccgtgtgcgtgaccaccagaggcgacatctacctgctggccgactaccagtgcaagaagatggccagcaagcagctgaacctgaagaaggtgctggtgagcggcggccacatggagtacaaggtggaccccgagcacctgaaggagaacggcggccagaagatctgcatcctggccatggacggcgccggcagagtgttctgctggagaagcgtgaacagcagcctgaagcagtgcagatgggcctaccccagacaggtgttcatcagcgacatcgccctgaacagaaacgagatcctgttcgtgacccaggacggcgagggcttcagaggcagatggttcgaggagaagagaaagagcagcgagaagaaggagatcctgagcaacctgcacaacagcagcagcgacgtgagctacgtgagcgacatcaacagcgtgtacgagagaatcagactggagaagctgaccttcgcccacagagccgtgagcgtgagcaccgaccccagcggctgcaacttcgccatcctgcagagcgaccccaagaccagcctgtacgagatccccgccgtgagcagcagcagcttcttcgaggagttcggcaagctgctgagagaggccgacgagatggacagcatccacgacgtgaccttccaggtgggcaacagactgttccccgcccacaagtacatcctggccgtgcacagcgacttcttccagaagctgttcctgagcgacggcaacaccagcgagttcaccgacatctaccagaaggacgaggacagcgccggctgccacctgttcgtggtggagaaggtgcaccccgacatgttcgagtacctgctgcagttcatctacaccgacacctgcgacttcctgacccacggcttcaagcccagaatccacctgaacaagaaccccgaggagtaccagggcaccctgaacagccacctgaacaaggtgaacttccacgaggacgacaaccagaagagcgccttcgaggtgtacaagagcaaccaggcccagaccgtgagcgagagacagaagagcaagcccaagagctgcaagaagggcaagaacatcagagaggacgaccccgtgagaatgctgcagaccgtggccaagaagttcgacttcagcaacctgagcagcagactggacggcgtgagattcgagaacgagaagatcaacgtgatcgccaagaacaccggcaacaagctgaagctgagccagaagaagtgcagcttcctgtgcgacgtgaccatgaagagcgtggacggcaaggagttcccctgccacaagtgcgtgctgtgcgccagactggagtacttccacagcatgctgagcagcagctggatcgaggccagcagctgcgccgccctggagatgcccatccacagcgacatcctgaaggtgatcctggactacctgtacaccgacgaggccgtggtgatcaaggagagccagaacgtggacttcatctgcagcgtgctggtggtggccgaccagctgctgatcaccagactgaaggagatctgcgaggtggccctgaccgagaagctgaccctgaagaacgccgccatgctgctggagttcgccgccatgtacagcgccaagcagctgaagctgagctgcctgcagttcatcggcctgaacatggccgccctgctggaggccagaagcctggacgtgctgagcgacggcgtgctgaaggacctgagcgagttctacagaaagatgatccccgccatggacagaagagtgatcaccccctaccaggacggccccgacatcagctacctggaggtggaggacggcgacatcttcctgaaggaggagatcaacatggagcagaaccacagcgagaccatgttcaagaaggccaagaccaaggccaagaagaagcccagaaagagaagcgacagcagcggcggctacaacctgagcgacatcatccagagccccagcagcaccggcctgctgaagagcggcaagaccaacagcgtggagagcctgcccgagctgctgaccagcgacagcgagggcagctacgccggcgtgggcagccccagagacctgcagagccccgacttcaccaccggcttccacagcgacaagatcgaggccaaggtgaagccctacgtgaacggcaccagccccgtgtacagcagagaggacctgaagccctgggagaagagccccatcctgaagatcagcgccccccagcccatccccagcaacagaatcgacaccaccagcagcgccagctgggtggccggcagcttcagccccgtgagcccccccgtggtggacctgagaaccatcatggagatcgaggagagcagacagaagtgcggcgccacccccaagagccacctgggcaagaccgtgagccacggcgtgaagctgagccagaagcagagaaagatgatcgccctgaccaccaaggagaacaacagcggcatgaacagcatggagaccgtgctgttcacccccagcaaggcccccaagcccgtgaacgcctgggccagcagcctgcacagcgtgagcagcaagagcttcagagacttcctgctggaggagaagaagagcgtgaccagccacagcagcggcgaccacgtgaagaaggtgagcttcaagggcatcgagaacagccaggcccccaagatcgtgagatgcagcacccacggcacccccggccccgagggcaaccacatcagcgacctgcccctgctggacagccccaacccctggctgagcagcagcgtgaccgcccccagcatggtggcccccgtgaccttcgccagcatcgtggaggaggagctgcagcaggaggccgccctgatcagaagcagagagaagcccctggccctgatccagatcgaggagcacgccatccaggacctgctggtgttctacgaggccttcggcaaccccgaggagttcgtgatcgtggagagaaccccccagggccccctggccgtgcccatgtggaacaagcacggctgctag

SEQ ID NO: 187165 - protein, 350 aa, Artificial Sequence [sequence omitted]

SEQ ID NO: 187166 - DNA, 1053 bp, Artificial Sequence
  derived and/or modified sequence
atgcaccccgccgccttccccctgcccgtggtggtggccgccgtgctgtggggcgccgcccccaccagaggcctgatcagagccaccagcgaccacaacgccagcatggacttcgccgacctgcccgccctgttcggcgccaccctgagccaggagggcctgcagggcttcctggtggaggcccaccccgacaacgcctgcagccccatcgccccccccccccccgcccccgtgaacggcagcgtgttcatcgccctgctgagaagattcgactgcaacttcgacctgaaggtgctgaacgcccagaaggccggctacggcgccgccgtggtgcacaacgtgaacagcaacgagctgctgaacatggtgtggaacagcgaggagatccagcagcagatctggatccccagcgtgttcatcggcgagagaagcagcgagtacctgagagccctgttcgtgtacgagaagggcgccagagtgctgctggtgcccgacaacaccttccccctgggctactacctgatccccttcaccggcatcgtgggcctgctggtgctggccatgggcgccgtgatgatcgccagatgcatccagcacagaaagagactgcagagaaacagactgaccaaggagcagctgaagcagatccccacccacgactaccagaagggcgaccagtacgacgtgtgcgccatctgcctggacgagtacgaggacggcgacaagctgagagtgctgccctgcgcccacgcctaccacagcagatgcgtggacccctggctgacccagaccagaaagacctgccccatctgcaagcagcccgtgcacagaggccccggcgacgaggaccaggaggaggagacccagggccaggaggagggcgacgagggcgagcccagagaccaccccgccagcgagagaacccccctgctgggcagcagccccaccctgcccaccagcttcggcagcctggcccccgcccccctggtgttccccggccccagcaccgacccccccctgagcccccccagcagccccgtgatcctggtgtag

SEQ ID NO: 187167 - DNA, 1053 bp, Artificial Sequence
  derived and/or modified sequence
atgcacccagccgcttttcctttgccagtggttgtggcagcagttttgtggggagccgcccccacaaggggacttatccgagcgacgtcggaccacaatgcctcaatggacttcgctgatctcccagctctgtttggcgccactcttagccaggaggggctgcagggattcctggtggaagcccacccagacaacgcctgttctccaatcgccccaccgcctcccgcccccgtcaatggctccgtatttatagcccttctgcgaagattcgactgtaatttcgatctaaaggttttgaacgcgcagaaggctgggtacggtgctgccgtcgtgcataatgtgaactccaatgaactgcttaacatggtctggaacagcgaggaaattcagcagcagatatggatcccctccgttttcataggcgaaagatcctctgagtaccttagagccttgtttgtctatgaaaagggagctcgcgtgctacttgtccccgacaatactttccccctgggctactatttaattcctttcacggggatcgtggggctcctcgtgctggccatgggcgccgtcatgatcgctcggtgcatacaacacagaaagcgtctgcaacgcaatcgcttgaccaaagaacagctgaagcagattcctactcatgactaccagaaaggggatcaatacgatgtttgcgccatctgccttgacgagtacgaagacggggataagctaagggtgctgccatgtgcgcacgcatatcactcccggtgcgtcgatccatggctgacacagactcgcaaaacctgccctatttgtaagcaacccgtgcaccgcgggcctggggacgaggaccaggaagaggagactcagggccaggaggaaggcgatgaaggagagccgcgggaccatccagccagtgaacgcacacccctgctgggttcatcgcctaccctcccaacaagttttgggtcactggcccccgcacccctggtcttccccggcccatccaccgatccacccttaagtcctccaagctccccagtaattttggtctag

SEQ ID NO: 187168 - DNA, 1053 bp, Artificial Sequence
  derived and/or modified sequence
atgcaccctgctgccttccccctgcctgtggtggtggccgctgtgctgtggggcgccgcccccacccggggcctcatccgggccaccagtgaccacaatgcctccatggactttgctgacctgcctgccctgtttggagccaccctgagccaggagggcctgcagggcttcctggtggaggcccacccagacaatgcctgcagccccatcgcccctcctcctccagcccctgtgaatggatctgtgttcatcgccctgctgcggagatttgactgcaactttgacctgaaggtgctgaatgcccagaaggccggctacggggctgctgtggtgcacaacgtgaacagcaatgagctgctgaacatggtgtggaacagcgaggagatccagcagcagatctggatccccagcgtcttcatcggggagaggagcagcgagtacctgcgggccctgtttgtgtatgagaagggggcccgggtgctgctggtgcctgacaacaccttccccctgggctactacctgatccccttcaccggcatcgtgggcctgctggtgctggccatgggcgctgtgatgattgcccgctgcatccagcacaggaagaggctgcagaggaaccggctgaccaaggagcagctgaagcagatccccacccatgactaccagaagggggaccagtatgatgtgtgtgccatctgcctggatgaatatgaagatggagacaagctgcgggtgctgccctgtgcccacgcctaccacagccgctgtgtggacccctggctgacccagaccaggaagacctgccccatctgcaagcagcctgtgcaccggggccctggagatgaggaccaggaggaggagacccagggccaggaggagggagatgaaggagagccccgggaccacccagccagcgagaggacccccctgctgggcagcagccccaccctgcccaccagctttggcagcctggccccagcccccctggtgtttcctggccccagcacagacccccccctgagcccccccagcagccctgtgatcctggtgtag

SEQ ID NO: 187169 - DNA, 1053 bp, Artificial Sequence
  derived and/or modified sequence
atgcaccccgccgccttccccctgcccgtggtggtggccgccgtgctgtggggtgccgcccccacacggggattgataagagcaacgtctgatcacaatgcatctatggatttcgccgacctgcccgctctctttggggcaactctgtcccaagagggattacaggggttcctagtcgaagcccacccagacaacgcctgttcacctatcgctccgccccctccagctccagtcaacggcagtgtgttcattgctctgctgagacgattcgactgtaatttcgatctcaaggtattgaacgcacagaaagccggctacggggccgcggtcgtgcataatgtgaatagtaacgagctgctgaatatggtgtggaacagtgaggaaattcagcaacaaatctggatccctagcgtgttcatcggtgagcggtcaagcgagtatctgagagccctcttcgtctacgaaaaaggagctcgtgtcctattagttcccgataataccttccctctgggatactatctgatcccgtttactggaatcgtgggcctgctggtgctggccatgggtgccgtgatgatagcaaggtgtatacagcaccgtaagcggctccagagaaatcgcctcacaaaagaacagctgaaacagatcccaacgcatgactatcagaaaggtgatcaatatgatgtctgcgctatctgcctggacgagtacgaagacggcgataagctacgagtcctcccttgcgcccatgcttatcatagtcggtgtgtggatccatggcttacacagacgaggaagacgtgtcccatatgcaaacagcccgttcaccggggtcccggggatgaagatcaggaggaagagacccagggtcaggaggagggcgacgagggagagccaagggaccaccctgcgtcagaacggacccctctgctcgggtcaagtcctaccctgccgacttctttcggatcactcgcccctgcgcccttagtgtttccagggccttctacagacccccccctcagccccccgagcagtcctgtaatcctggtgtag

SEQ ID NO: 187170 - DNA, 1053 bp, Artificial Sequence
  derived and/or modified sequence
atgcaccccgctgctttcccgttgcctgtggtggtagccgcagtcctctggggggcagctcctaccagaggcctgatccgggcaacttctgaccacaacgcgtcaatggactttgccgacctgccggcattgtttggtgccacactatctcaagaagggttacagggtttcttggtcgaggcacatcccgacaatgcttgtagtccaattgccccaccaccgccagctcctgtcaacggatccgtcttcatcgcgttgctacggaggttcgactgtaatttcgacctgaaggtcttgaatgctcagaaggcaggctacggagctgctgtggtgcacaacgtgaacagcaacgagttgctcaacatggtgtggaactctgaagagatccagcagcagatttggattccttccgtctttatcggtgagcgatcttccgaatacctgcgcgcattattcgtgtatgagaagggagccagggttctgctggtccccgacaatacattccctctcggttattatctgatcccttttaccgggatcgtcggcctgctcgttcttgccatgggcgctgtcatgatagccagatgtatccagcatcgcaagcgccttcagcgcaacagactcacaaaggagcagctgaaacagattcctacacacgattaccagaagggcgaccagtatgacgtatgtgctatttgcctggacgagtatgaggatggcgataaattacgagtgctgccatgtgcccatgcataccacagccggtgcgttgacccatggctaacacagacacgaaaaacatgcccgatctgcaagcagcctgtgcataggggcccaggggacgaagaccaggaggaggaaacgcagggacaggaggaaggtgacgaaggcgagccaagggatcatcccgcatcagaacgcacaccgttgttaggcagctccccgactctgcccacctcctttggttccctcgcaccggctcctctcgtgttccccggaccttccaccgatccacccctgagtccgccttccagccctgtgatcctcgtatag

SEQ ID NO: 187171 - DNA, 1916 bp, Artificial Sequence
  derived and/or modified sequence
aggggcgtaactgatttggaaaccagaggaaaggcgctgttttcaccgaattagaatcgcgggaaaatagagaagagtttgtttgaaggtctcgcgagatcgagtgagtacggctcgccaagttggagcgctctcgcgatagacacagcaactattcagctgcgaggggacgggagaggtggtgagcactctcgcgagatttgaaggagcggcggaggccagagggaggagaggaccggaagtccttcatctcaagcatccaatgctgaaagcggcctgattttctctaccggaagcccttttccagaggctgggaacacggcccacctagcaggaagtcccacctccttgagctccgccacccttcccgaagtttttctgtcacctgtgttaggctccgtcccctttccgcgttttatccccgtaccagaaaaggatacatttagtgcctcccacccagctccactaaacgggttggatatctcattctttgagttggtgttccttccccggcgcccccatgtagctgggaagtgggacctgggggtggttggacccctgggatcctaaaggaggggcagggagggcgcagaactccgcttctgctccttgctaccaggacgcgcggcctcctcagcctctttcctcccgctgccatgcaccctgcagccttcccgcttcctgtggttgtggccgctgtgctgtggggagcggccccgacccgggggctcattcgagcgacctcggaccacaatgccagcatggactttgcagaccttccagctctgtttggggctaccttgagccaggagggcctccaggggttccttgtggaggctcacccagacaatgcctgcagccccattgccccaccacccccagccccggtcaatgggtcagtctttattgcgctgcttcgaagattcgactgcaactttgacctcaaggtcctaaatgcccagaaggctggatatggtgccgctgtagtacacaatgtgaattccaatgaacttctgaacatggtgtggaatagtgaggaaatccagcagcagatctggatcccgtctgtatttattggggagagaagctccgagtacctgcgtgccctctttgtctacgagaagggggctcgggtgcttctggttccagacaataccttccccttgggctattacctcatccctttcacagggattgtgggactgctggttttggccatgggagcagtaatgatagctcgttgtatccagcaccggaaacggctccagcggaatcgacttaccaaagagcaactgaaacagattcctacacatgactatcagaagggagaccagtatgatgtctgtgccatttgcctggatgaatatgaggatggggacaagctgcgggtactcccctgtgctcatgcctaccacagccgctgcgtggacccctggctcactcagacccggaagacctgccccatttgcaagcagcctgttcatcggggtcctggggacgaagaccaagaggaagaaactcaagggcaagaggagggtgatgaaggggagccaagggaccaccctgcctcagaaaggaccccacttttgggttctagccccactcttcccacctcctttggttccttagccccagctccccttgtttttcctgggccttcaacagatcccccactgtcccctccctcttcccctgttatcctggtctaataaccccccacacatacacctctggtgacctatttgcacagaccgtcgtcttccctccagtcttctgagggataggggacattccatcccaagcttctcccttacccacacctatccttttgaggggctttggggtggagctggggcaagcagagggactgggtcttcacttcttgggctaataaaattgtttctttgtggactaag

SEQ ID NO: 187172 - protein, 452 aa, Artificial Sequence
  derived and/or modified sequence
MGSSQSVEIPGGGTEGYHVLRVQENSPGHRAGLEPFFDFIVSINGSRLNKDNDTLKDLLKANVEKPVKMLIYSSKTLELRETSVTPSNLWGGQGLLGVSIRFCSFDGANENVWHVLEVESNSPAALAGLRPHSDYIIGADTVMNESEDLFSLIETHEAKPLKLYVYNTDTDNCREVIITPNSAWGGEGSLGCGIGYGYLHRIPTRPFEEGKKISLPGQMAGTPITPLKDGFTEVQLSSVNPPSLSPPGTTGIEQSLTGLSISSTPPAVSSVLSTGVPTVPLLPPQVNQSLTSVPPMNPATTLPGLMPLPAGLPNLPNLNLNLPAPHIMPGVGLPELVNPGLPPLPSMPPRNLPGIAPLPLPSEFLPSFPLVPESSSAASSGELLSSLPPTSNAPSDPATTTAKADAASSLTVDVTPPTAKAPTTVEDRVGDSTPVSEKPVSAAVDANASESP

SEQ ID NO: 187173 - protein, 464 aa, Artificial Sequence
  derived and/or modified sequence
MREGSSTLSEIRKLKPGIMVCTCNPSYSNQETEVQENSPGHRAGLEPFFDFIVSINGSRLNKDNDTLKDLLKANVEKPVKMLIYSSKTLELRETSVTPSNLWGGQGLLGVSIRFCSFDGANENVWHVLEVESNSPAALAGLRPHSDYIIGADTVMNESEDLFSLIETHEAKPLKLYVYNTDTDNCREVIITPNSAWGGEGSLGCGIGYGYLHRIPTRPFEEGKKISLPGQMAGTPITPLKDGFTEVQLSSVNPPSLSPPGTTGIEQSLTGLSISSTPPAVSSVLSTGVPTVPLLPPQVNQSLTSVPPMNPATTLPGLMPLPAGLPNLPNLNLNLPAPHIMPGVGLPELVNPGLPPLPSMPPRNLPGIAPLPLPSEFLPSFPLVPESSSAASSGELLSSLPPTSNAPSDPATTTAKADAASSLTVDVTPPTAKAPTTVEDRVGDSTPVSEKPVSAAVDANASESP

SEQ ID NO: 187174 - DNA, 1395 bp, Artificial Sequence
  derived and/or modified sequence
atgagagagggcagcagcaccctgagcgagatcagaaagctgaagcccggcatcatggtgtgcacctgcaaccccagctacagcaaccaggagaccgaggtgcaggagaacagccccggccacagagccggcctggagcccttcttcgacttcatcgtgagcatcaacggcagcagactgaacaaggacaacgacaccctgaaggacctgctgaaggccaacgtggagaagcccgtgaagatgctgatctacagcagcaagaccctggagctgagagagaccagcgtgacccccagcaacctgtggggcggccagggcctgctgggcgtgagcatcagattctgcagcttcgacggcgccaacgagaacgtgtggcacgtgctggaggtggagagcaacagccccgccgccctggccggcctgagaccccacagcgactacatcatcggcgccgacaccgtgatgaacgagagcgaggacctgttcagcctgatcgagacccacgaggccaagcccctgaagctgtacgtgtacaacaccgacaccgacaactgcagagaggtgatcatcacccccaacagcgcctggggcggcgagggcagcctgggctgcggcatcggctacggctacctgcacagaatccccaccagacccttcgaggagggcaagaagatcagcctgcccggccagatggccggcacccccatcacccccctgaaggacggcttcaccgaggtgcagctgagcagcgtgaacccccccagcctgagcccccccggcaccaccggcatcgagcagagcctgaccggcctgagcatcagcagcaccccccccgccgtgagcagcgtgctgagcaccggcgtgcccaccgtgcccctgctgcccccccaggtgaaccagagcctgaccagcgtgccccccatgaaccccgccaccaccctgcccggcctgatgcccctgcccgccggcctgcccaacctgcccaacctgaacctgaacctgcccgccccccacatcatgcccggcgtgggcctgcccgagctggtgaaccccggcctgccccccctgcccagcatgccccccagaaacctgcccggcatcgcccccctgcccctgcccagcgagttcctgcccagcttccccctggtgcccgagagcagcagcgccgccagcagcggcgagctgctgagcagcctgccccccaccagcaacgcccccagcgaccccgccaccaccaccgccaaggccgacgccgccagcagcctgaccgtggacgtgaccccccccaccgccaaggcccccaccaccgtggaggacagagtgggcgacagcacccccgtgagcgagaagcccgtgagcgccgccgtggacgccaacgccagcgagagcccctag

SEQ ID NO: 187175 - DNA, 1395 bp, Artificial Sequence
  derived and/or modified sequence
atgagagagggcagctcgacattatcggaaatacggaagctgaaacctgggatcatggtttgcacatgtaacccttcctattccaaccaggaaaccgaggtccaggaaaattctcctggtcaccgcgcagggcttgagcccttctttgatttcatagtctctatcaatgggagtaggttgaacaaggacaatgataccttgaaggatttgctgaaagcaaacgtagagaagcctgtgaaaatgctgatctattcttccaagacccttgaactccgggagacctcagtaacaccttcaaacttgtggggcggccaaggcctcttaggcgtatctattcgattttgttccttcgatggcgcaaacgaaaatgtgtggcacgtcctggaggttgaaagcaacagcccagcagccctggcaggacttcgtccacactcagattatataataggggccgacaccgtcatgaacgagagcgaagaccttttctcccttatcgaaacgcacgaggccaaacccctgaaattatacgtatataacaccgatactgacaactgccgggaagtcattatcactccgaactcagcctggggaggggaagggagtctgggctgcggaattggctacggctatctgcaccgcatccctacacggccattcgaagagggaaaaaagatcagcttgcccggccagatggccgggaccccgattacgccactgaaggacgggttcactgaagttcagctgtcttctgtgaatccgcccagtctctcccccccgggaacaacagggatcgaacaaagtctgaccgggttaagcatttcatctactcctccagccgtaagttctgtcttatctacaggcgtgccgactgttcccctcttgcctccccaggttaaccaatccttgaccagcgtgccacccatgaatcccgccaccacgttaccaggccttatgcctttacccgctggtcttcctaacctccccaatctaaatttgaatttgccagctccccatatcatgcccggtgtgggcctcccagaactggttaacccaggtttgccacccctgcccagtatgccacccagaaacctgcccggaatcgcacccctgcccctgccatccgagttcctccctagtttcccattagttcccgagtcttcctccgcagcctcctcgggcgagcttttgagtagcctgccacctacgtccaacgccccaagcgacccagcaaccactactgccaaggcagatgcggcatcatccttgactgtggacgtaacgccacctactgctaaggccccaacgacagtagaggaccgcgtgggagattccacccccgtctctgaaaagcccgtatctgctgcggtcgacgccaacgcttcagagtctccctag

SEQ ID NO: 187176 - DNA, 3173 bp, Artificial Sequence
  derived and/or modified sequence
aataagcatgaatacgacctggctacctgaaggaggtaggacggggaaccgagcagcagcaggtggtggaatgccagggaaatccaaccgtgcttcccacgctggcatcgctctgattatgaccaatcctctaatcttattctcacaattagggaggaagaaaaaaaaacaaacccaaaccaaaaaagaagttggtaggtgactctgtgagactactgttttataaagggagcgtttccttttataaaatttagctgagcagatgctaggcagcccacaggaggccactattcccctcagctgtacagtttgggaaaatacctacacacccggagaacagagagcttggtgtgtgttgagttcgctcctgttcatcagcagccctttccccgcctctggccaccagggggacctgcaaccaagtatgtgttctttcaggcgagcgggaacgcgtctgcataaatctagtccaatccagggccccgtagcaaggcgccaaagctgggggaagcgcatttctgttctctcgcgagcacgacgcggtgcctcccagtcctcctccggccctccctctccgccctcccggcccgcgagcgctcgggccccttccagtggctcgcggcaggtggcgctgtctgcggcgtcgcagcggcccgggctgcagcagagacgatctcccggcgggctgtgcggcccggctctccggcggcagcgagtgccacgtcccaagtgctacgcggaggattagagcaggcggtgcgctgggggcgggagcagcgcggagcccggctcggccacaccgatcgcccgccgccatgggctcctcgcaaagcgtcgagatcccgggcgggggcaccgagggctaccacgttctgcgggtacaagaaaattccccaggacacagagctggtttggagcctttctttgattttattgtttctattaatggttcaagattaaataaagacaatgacactcttaaggatctgctgaaagcaaacgttgaaaagcctgtaaagatgcttatctatagcagcaaaacattggaactgcgagagacctcagtcacaccaagtaacctgtggggcggccagggcttattgggagtgagcattcgtttctgcagctttgatggggcaaatgaaaatgtttggcatgtgctggaggtggaatcaaattctcctgcagcactggcaggtcttagaccacacagtgattatataattggagcagatacagtcatgaatgagtctgaagatctattcagccttatcgaaacacatgaagcaaaaccattgaaactgtatgtgtacaacacagacactgataactgtcgagaagtgattattacaccaaattctgcatggggtggagaaggcagcctaggatgtggcattggatatggttatttgcatcgaatacctacacgcccatttgaggaaggaaagaaaatttctcttccaggacaaatggctggtacacctattacacctcttaaagatgggtttacagaggtccagctgtcctcagttaatcccccgtctttgtcaccaccaggaactacaggaattgaacagagtctgactggactttctattagctcaactccaccagctgtcagtagtgttctcagtacaggtgtaccaacagtaccgttattgccaccacaagtaaaccagtccctcacttctgtgccaccaatgaatccagctactacattaccaggtctgatgcctttaccagcaggactgcccaacctccccaacctcaacctcaacctcccagcaccacacatcatgccaggggttggcttaccagaacttgtaaacccaggtctgccacctcttccttccatgcctccccgaaacttacctggcattgcacctctccccctgccatccgagttcctcccgtcattccccttggttccagagagctcttctgcagcaagctcaggagagctgctgtcttccctcccgcccaccagcaacgcaccctccgaccctgccacaactactgcaaaggcagacgctgcctcctcactcactgtggatgtgacgccccccactgccaaggcccccaccaccgttgaggacagagtcggcgactccaccccagtcagcgagaagcctgtttctgcggctgtggatgccaatgcttctgagtcaccttaactttgaaccattctttggaattggcgtggtatatttaaccacgggagcgtgtctggaaacgcaaactatcattaatttcatactagtttgtaccgtatctgtaggcatcctgtaaataattccaaggggaaaactaaacgaggacgtgggttgtatcctgccaggttgagtggggctcacacgctagggtgagatgtcagaaagcgcttgtattttaaacaaccaaaaagaattgtaagggtggcttgctgccaggcttgcactgccgttcctgggggtgtgcatcttcgggaaaggtggtggcggggcgtccactaggtttcctgtcccctgctgctccttccgtaagaaaatgaaatattctatgcctaatactcacacgcaacatttcttgtactttgtaagtcgtttgcgagaatgcagaccacctcactaaactgtaaacggtaaagagatttttacttttggtctccgtgagtcgcatctctactaaggtttacacaggaattccacctgaagacttgtgttaaagttctacagcgcgcactgttaactgaacgtctttttcttcagcctatacgcggatccttgttttgagctctcagaatcactcagacaacattttgtaactgctgctgttgctttctacatacaccttataaagtgacatttcaaaagaaataaggtgccacagttttaaaccagaaggtggcactctgtggctccttgtagtattatagctatactgggaaagcatagatacagcaataaagtacagtaattttactttttttcttgtgttacatctaaattacaacccttaattgccacgtgtgcacttactactctccagtatgtcttattactctccagtatgtcacgcatctttaacttttcacgtcctatgtttgctttctcccatttttaagagatggtaagttaactggaattgatttactgaatgaaattaaatgcagatatccctgtttttgaaataag

SEQ ID NO: 187177 - DNA, 1976 bp, Artificial Sequence
  derived and/or modified sequence
cacaccgatcgcccgccgccatgggctcctcgcaaagcgtcgagatcccgggcgggggcaccgagggctaccacgttctgcggcatcaatgagagaaggctcaagcacattgtcagaaataaggaagcttaagccgggcataatggtgtgcacctgtaatcccagctactccaatcaggagactgaggtacaagaaaattccccaggacacagagctggtttggagcctttctttgattttattgtttctattaatggttcaagattaaataaagacaatgacactcttaaggatctgctgaaagcaaacgttgaaaagcctgtaaagatgcttatctatagcagcaaaacattggaactgcgagagacctcagtcacaccaagtaacctgtggggcggccagggcttattgggagtgagcattcgtttctgcagctttgatggggcaaatgaaaatgtttggcatgtgctggaggtggaatcaaattctcctgcagcactggcaggtcttagaccacacagtgattatataattggagcagatacagtcatgaatgagtctgaagatctattcagccttatcgaaacacatgaagcaaaaccattgaaactgtatgtgtacaacacagacactgataactgtcgagaagtgattattacaccaaattctgcatggggtggagaaggcagcctaggatgtggcattggatatggttatttgcatcgaatacctacacgcccatttgaggaaggaaagaaaatttctcttccaggacaaatggctggtacacctattacacctcttaaagatgggtttacagaggtccagctgtcctcagttaatcccccgtctttgtcaccaccaggaactacaggaattgaacagagtctgactggactttctattagctcaactccaccagctgtcagtagtgttctcagtacaggtgtaccaacagtaccgttattgccaccacaagtaaaccagtccctcacttctgtgccaccaatgaatccagctactacattaccaggtctgatgcctttaccagcaggactgcccaacctccccaacctcaacctcaacctcccagcaccacacatcatgccaggggttggcttaccagaacttgtaaacccaggtctgccacctcttccttccatgcctccccgaaacttacctggcattgcacctctccccctgccatccgagttcctcccgtcattccccttggttccagagagctcttctgcagcaagctcaggagagctgctgtcttccctcccgcccaccagcaacgcaccctccgaccctgccacaactactgcaaaggcagacgctgcctcctcactcactgtggatgtgacgccccccactgccaaggcccccaccaccgttgaggacagagtcggcgactccaccccagtcagcgagaagcctgtttctgcggctgtggatgccaatgcttctgagtcaccttaactttgaaccattctttggaattggcgtggtatatttaaccacgggagcgtgtctggaaacgcaaactatcattaatttcatactagtttgtaccgtatctgtaggcatcctgtaaataattccaaggggaaaactaaacgaggacgtgggttgtatcctgccaggttgagtggggctcacacgctagggtgagatgtcagaaagcgcttgtattttaaacaaccaaaaagaattgtaagggtggcttgctgccaggcttgcactgccgttcctgggggtgtgcatcttcgggaaaggtggtggcggggcgtccactaggtttcctgtcccctgctgctccttccgtaagaaaatgaaatattctatgcctaatactcacacgcaacatttcttgtactttgtaagtcgtttgcgagaatgcagaccacctcactaaactgtaaacggtaaagagatttttacttttggtctccgtgagtcgcatctctactaa

SEQ ID NO: 187178 - DNA, 1395 bp, Artificial Sequence
  derived and/or modified sequence
atgagggagggcagcagcaccctgtctgagatcaggaagctgaagccaggcatcatggtgtgcacctgcaaccccagctacagcaaccaggagacagaggtgcaggagaacagccctggccacagagctggcctggagcccttctttgacttcatcgtgtccatcaatggcagccggctgaacaaggacaatgacaccctgaaggacctgctgaaggccaacgtggagaagcctgtgaagatgctgatctacagcagcaagaccctggagctgcgggagacctctgtgacccccagcaacctgtggggcggccagggcctgctgggcgtgtccatccgcttctgcagctttgatggagccaatgaaaatgtgtggcacgtgctggaggtggagagcaacagccctgctgccctggccggcctgcggccccacagcgactacatcattggagctgacacagtgatgaatgaaagtgaagatctcttcagcctgattgagacccatgaggccaagcccctgaagctgtatgtgtacaacacagacacagacaactgccgggaggtgatcatcacccccaacagcgcctggggcggggagggcagcctgggctgcggcatcggctacggctacctgcaccgcatccccacccggccctttgaggagggcaagaagatcagcctgcccggccagatggccggcacccccatcacccccctgaaggatggcttcacagaggtgcagctgagctctgtgaacccccccagcctgagccccccaggcaccaccggcatcgagcagagcctgaccggcctgagcatcagcagcaccccacctgctgtgtcctctgtgctgagcactggagtgcccaccgtgcccctgctgcccccccaggtgaaccagagcctgacctctgtgccccccatgaacccagccaccaccctgcccggcctgatgcccctgcctgctggcctgcccaacctgcccaacctgaacctgaacctgcctgccccccacatcatgcctggggtgggcctgcctgagctggtgaaccctggcctgccccccctgcccagcatgccacccaggaacctgcccggcatcgcccccctgcccctgcccagcgagttcctgcccagcttccccctggtgcctgagagcagcagcgctgccagcagcggggagctgctgagcagcctgccccccaccagcaatgcccccagcgaccctgccaccaccacagccaaggcagatgctgccagcagcctgactgtggatgtgaccccacccacagccaaggcccccaccaccgtggaggacagagtgggggacagcacccctgtgtctgagaagcctgtgtctgctgctgtggatgccaatgccagcgagagcccctag

SEQ ID NO: 187179 - DNA, 1395 bp, Artificial Sequence
  derived and/or modified sequence
atgcgggagggcagcagcaccctgagcgagatccggaagctgaagccagggataatggtttgtacatgcaacccatcctacagcaaccaagagacggaagtacaggaaaattcacccggccacagagcaggtctggaaccattctttgactttatcgtgtctataaacggctctagactgaacaaagacaatgatactcttaaggatttattaaaagccaacgtggaaaagcccgttaaaatgctgatttactccagcaagaccctcgaactgagagaaaccagtgtaaccccctcaaacctctggggcggccagggcttactaggggtcagtatccgtttctgcagctttgacggagctaacgagaatgtttggcacgtgttggaagtcgaatctaatagccccgctgccctggctgggctacggccacacagtgattatataattggagcagacaccgtaatgaacgaaagtgaagacctcttttccttgatcgagacccatgaggcaaagccgctgaagctctacgtctataacactgacacagataactgcagagaggtgattattaccccaaatagcgcctggggcggagaagggtctcttggatgtggtatcggatatggttacctgcataggatccccactagaccctttgaagaagggaagaaaattagcttgccagggcagatggccggcacgcccatcacccctttgaaagatgggtttaccgaggtccaactgagcagcgtgaacccgcccagtctgtccccccctgggaccacaggaattgagcaatccctcactggtcttagtatctccagcaccccgcctgcggtgagttccgtcctttccacgggggttcccaccgttcccctgctgccacctcaggtgaatcagtccttgacatcagtccccccgatgaatcccgcaactacgctcccaggcctaatgcccttgccggcggggctgcccaatctgcccaacctcaacctgaacctccccgctcctcacattatgcctggtgttggactcccggaattagttaaccccggactcccgccactcccctcaatgcccccaaggaatttaccgggcatcgctccattacccttgccatcagaatttctgcccagcttccctcttgtgcctgaatcctccagcgcagcatcctccggcgaactcctgtcgtcattgccccctacatcaaatgctccgtccgatccagctacaactacagcaaaagccgacgcagcctccagtctgacggtcgatgtaacaccaccaaccgccaaagcccctaccaccgtggaggaccgagtgggggatagcacccctgtgtccgagaagccggtctcagcggccgtggacgcaaatgcgtctgagtcaccttag

SEQ ID NO: 187180 - DNA, 1395 bp, Artificial Sequence
  derived and/or modified sequence
atgcgtgagggaagtagcacgctgtcagagattaggaaactcaagcctggtatcatggtctgcacctgcaatccatcttattctaaccaagagactgaggttcaagaaaactcgcccggacatcgggcaggtctcgaacctttcttcgactttatcgtgagcataaatggttctcgactcaacaaagacaacgacacgctgaaggatctattaaaagcaaacgttgagaagccggtgaagatgttgatatatagcagtaaaaccctggagctcagagagacctcggtcacaccatccaacctatggggcggacaggggctccttggggtgtccattcgtttctgcagtttcgacggtgcaaacgaaaacgtgtggcatgtgctcgaagtcgaaagcaactctccagctgccctggcagggctgaggccgcacagcgactatataatcggagccgacaccgtgatgaacgagtccgaggacctgttttccctcatcgaaacccacgaggccaagccgttgaaactgtacgtgtacaatactgatacggataactgcagagaagtgataataacaccgaacagcgcgtggggcggagagggctcactgggctgcgggattggatacggatacttgcatcgcatccccaccagacccttcgaggaagggaagaagatttccttacccggacagatggctggaacccccattacacctctcaaagatggctttactgaagttcagttatcttccgtgaatccaccttccctgtctcccccaggtacaactggcatcgagcagtctctgacaggtctaagcatctcttctactcctcccgcagttagctccgtcctgtcaactggcgtacccacagtgccgctgctcccaccccaggtaaatcaatcccttacgagcgtgccgcctatgaatcctgccactaccctcccaggcctgatgcccctgccagccggattgcccaacctgcccaacctcaacttgaatctgccagcaccgcacattatgcccggtgtgggactccctgagcttgtgaaccccggactgccgcctttgccaagtatgcctccacggaacctgcccggaatagcacctttgccgttaccaagtgaattcctgccttcatttcctttggtgcctgaaagtagcagcgcagccagctcaggggagcttctaagttccctccccccaaccagcaatgctccgtcagaccccgcaacaacaactgcaaaggccgacgccgctagctcactgacggttgatgtgaccccccctacggccaaagctcctactacggtcgaagaccgggttggggactccaccccggttagtgaaaagcccgtgagtgctgccgtggacgccaacgcttctgagtcaccatag

SEQ ID NO: 187181 - DNA, 1359 bp, Artificial Sequence
  derived and/or modified sequence
atggggagctcccaatcagtcgaaatccccggtggtggaacagaaggctaccatgtcctgagggttcaggaaaacagtcccggacacagggcaggactcgagcccttctttgacttcatcgtgtccatcaatgggagtcggcttaataaggacaatgacacactgaaggacctgttaaaagcaaacgtggaaaagcccgtgaaaatgttgatttatagttctaaaaccctggagctcagggagactagtgtaaccccttcgaatctgtggggggggcaaggacttttgggtgtctccattcgattttgtagcttcgacggagccaatgaaaatgtttggcacgtgttagaggtggagagcaattctccggctgccctggctggcctccgcccccacagcgattatatcataggggccgacacagtgatgaacgagagcgaagaccttttcagccttatcgagacacacgaggcaaaacccctgaagttatatgtctataatactgacacggataattgccgtgaggttatcataacacccaattccgcttggggtggagagggctcactcggatgcgggattgggtatggttatcttcaccggatccctacacgcccttttgaggaaggtaagaagatttctctgccaggccagatggcaggcacaccaatcaccccactcaaagacggtttcaccgaggtgcagctctcttccgtaaaccccccttctctctctcctccggggacaaccggaattgagcagagtctcaccggactaagtatatccagcacgcctcccgcagtcagctcagtcttaagtactggcgttcctacagtccctttgctcccaccacaggttaaccagtctttaacgtcagtccctccaatgaaccctgcaacaactttacccggcctaatgcctctgcccgccggcctccctaatctgcctaatctcaatctgaatttgccagctcctcacataatgcctggtgtgggactccctgagctggtgaatcctggattgcctccgctgccctccatgcctccgcggaacctccctggaatcgcccctttaccccttccatcagagtttctcccatcgttcccgttagttcctgagagtagctctgcagcaagtagtggcgagctcctgtcttctttgcctcctacatccaatgcaccatcagatcccgccacaacgaccgcaaaggccgatgccgcatcttcccttacagtggacgtgacacctcccaccgcaaaggcccctactacagtcgaagaccgagtgggagattccacacctgtgagtgagaagcctgtgtcagcagcagtagatgcaaatgccagcgagtcgccctag

SEQ ID NO: 187182 - DNA, 1359 bp, Artificial Sequence
  derived and/or modified sequence
atgggcagcagccagagcgtggagatccctgggggcggcacagagggctaccacgtgctgcgggtgcaggagaacagccctggccacagagctggcctggagcccttctttgacttcatcgtgtccatcaatggcagccggctgaacaaggacaatgacaccctgaaggacctgctgaaggccaacgtggagaagcctgtgaagatgctgatctacagcagcaagaccctggagctgcgggagacctctgtgacccccagcaacctgtggggcggccagggcctgctgggcgtgtccatccgcttctgcagctttgatggagccaatgaaaatgtgtggcacgtgctggaggtggagagcaacagccctgctgccctggccggcctgcggccccacagcgactacatcattggagctgacacagtgatgaatgaaagtgaagatctcttcagcctgattgagacccatgaggccaagcccctgaagctgtatgtgtacaacacagacacagacaactgccgggaggtgatcatcacccccaacagcgcctggggcggggagggcagcctgggctgcggcatcggctacggctacctgcaccgcatccccacccggccctttgaggagggcaagaagatcagcctgcccggccagatggccggcacccccatcacccccctgaaggatggcttcacagaggtgcagctgagctctgtgaacccccccagcctgagccccccaggcaccaccggcatcgagcagagcctgaccggcctgagcatcagcagcaccccacctgctgtgtcctctgtgctgagcactggagtgcccaccgtgcccctgctgcccccccaggtgaaccagagcctgacctctgtgccccccatgaacccagccaccaccctgcccggcctgatgcccctgcctgctggcctgcccaacctgcccaacctgaacctgaacctgcctgccccccacatcatgcctggggtgggcctgcctgagctggtgaaccctggcctgccccccctgcccagcatgccacccaggaacctgcccggcatcgcccccctgcccctgcccagcgagttcctgcccagcttccccctggtgcctgagagcagcagcgctgccagcagcggggagctgctgagcagcctgccccccaccagcaatgcccccagcgaccctgccaccaccacagccaaggcagatgctgccagcagcctgactgtggatgtgaccccacccacagccaaggcccccaccaccgtggaggacagagtgggggacagcacccctgtgtctgagaagcctgtgtctgctgctgtggatgccaatgccagcgagagcccctag

SEQ ID NO: 187183 - DNA, 1359 bp, Artificial Sequence
  derived and/or modified sequence
atgggcagcagccagagcgtggagatccccggcggcggcaccgagggttaccacgtacttagagtacaggaaaactctcccggccatcgagccggacttgagcctttcttcgattttatcgtctccatcaacgggagccggctgaacaaggataatgatacactcaaggaccttctgaaagccaatgttgaaaagccggtcaagatgctgatctattcttctaaaaccttggagctgcgagagacatcagtgacaccaagcaacctttggggcggccagggcttactcggcgtgtccatcagattctgttcattcgatggggctaacgaaaacgtgtggcatgtgctggaggtggaatccaattctcctgccgctctcgctgggctacgaccccattcagattatattattggggctgataccgtaatgaacgagagcgaggacctgttcagcctgattgagacccatgaggctaaaccgcttaaactttacgtgtacaacacagataccgacaattgtagagaggtcatcattactcccaactccgcttgggggggagagggctctctcggatgtggcatcgggtacggctacctccaccggattccaactcggcccttcgaggagggcaaaaagatttctctacccggccagatggccggaaccccaatcactcccctcaaagacggttttactgaggtgcagctttctagcgtaaacccgccctccctatctcccccagggactacaggcatcgagcagtccctgacaggcctgtctatatcttctactcctccagcagtcagctctgtgcttagtaccggcgttccaacagttcctctgctgcccccccaggttaatcagagcctgacatctgtccctcctatgaaccccgccactacgctgcccggcttgatgcccctcccagctgggctacccaacctcccaaatttgaacttaaatttgcctgctccccacataatgccaggggtcggcctgccggagctcgttaacccagggctaccccctcttccttcaatgccacctcggaacctcccaggaatcgcaccgctaccactgccaagtgaattcctgccttctttcccactcgtccccgaaagctccagcgcagctagcagcggcgagctcctttcttccttacctcctaccagtaatgctcctagcgatcctgccacaactactgctaaggccgatgcggcatcatcgttaactgtcgatgtgactcctccaactgctaaagccccgaccaccgtcgaggatagagttggggacagcacaccagtctctgaaaaaccagtctcagcagccgttgacgctaacgccagcgagagcccctag

SEQ ID NO: 187184 - DNA, 1359 bp, Artificial Sequence
  derived and/or modified sequence
atgggctcatcgcagtccgttgaaatacccggagggggaactgaaggttaccatgtccttcgggtgcaggaaaattcccctgggcatagagccggattagaacccttttttgatttcattgttagcattaacggcagccgcctgaataaagacaacgatacacttaaggacctgctgaaggccaacgtggagaaaccagtgaagatgctcatctatagcagcaagacgttagagctccgtgagaccagcgtcaccccttctaatctgtggggagggcaggggctgctaggagtgtctatccggttttgcagcttcgacggggctaacgaaaatgtatggcacgtgctagaggtggagtctaacagcccagcggctctcgcaggcctgcgtccccatagcgattatattatcggcgcagatacggtgatgaacgagtctgaggacctgttttccctgatcgagactcacgaagctaagcctctgaagctgtatgtgtacaatacagacaccgacaattgtcgcgaagttattattacccctaatagcgcctggggcggtgagggaagcctcggctgtggcataggctacgggtaccttcacaggatccctactcggccatttgaagagggcaaaaaaattagcttgcctgggcagatggccggaacaccgataactcccctcaaggacggattcaccgaggttcagctctcctccgtgaatcccccatccctgtcgccccctgggacaacaggcattgaacagagcctgaccgggttatcaatttccagtaccccaccggctgtctcttccgtcctcagcactggagttccaacagtccccttgcttccacctcaagtcaaccagtcactcaccagtgttccaccgatgaacccggctaccactctcccaggccttatgcctttacctgctggcctaccaaacctgccgaacctgaacctgaacctacccgcaccacatataatgcccggagtcggactgcccgagctggtgaacccgggactcccacccctccccagcatgcctcctagaaatcttccaggcatcgcacctctgccactgcctagcgagtttctcccttcttttcccctggttcccgaatccagctccgcagcatcaagcggagaattattgtcctcgctgcctccaacatcaaatgcccctagcgaccctgcaaccaccacagccaaggccgacgccgcaagttcccttaccgtggatgtcacccccccaacagccaaggcccctaccacagttgaggatcgggtgggagactcaactccagtgagtgagaaaccggtaagcgcagctgtggatgctaatgcgtctgagtccccctag

SEQ ID NO: 187185 - DNA, 1359 bp, Artificial Sequence
  derived and/or modified sequence
atgggcagcagccagagcgtggagatccccggcggcggcaccgagggctaccacgtgctgagagtgcaggagaacagccccggccacagagccggcctggagcccttcttcgacttcatcgtgagcatcaacggcagcagactgaacaaggacaacgacaccctgaaggacctgctgaaggccaacgtggagaagcccgtgaagatgctgatctacagcagcaagaccctggagctgagagagaccagcgtgacccccagcaacctgtggggcggccagggcctgctgggcgtgagcatcagattctgcagcttcgacggcgccaacgagaacgtgtggcacgtgctggaggtggagagcaacagccccgccgccctggccggcctgagaccccacagcgactacatcatcggcgccgacaccgtgatgaacgagagcgaggacctgttcagcctgatcgagacccacgaggccaagcccctgaagctgtacgtgtacaacaccgacaccgacaactgcagagaggtgatcatcacccccaacagcgcctggggcggcgagggcagcctgggctgcggcatcggctacggctacctgcacagaatccccaccagacccttcgaggagggcaagaagatcagcctgcccggccagatggccggcacccccatcacccccctgaaggacggcttcaccgaggtgcagctgagcagcgtgaacccccccagcctgagcccccccggcaccaccggcatcgagcagagcctgaccggcctgagcatcagcagcaccccccccgccgtgagcagcgtgctgagcaccggcgtgcccaccgtgcccctgctgcccccccaggtgaaccagagcctgaccagcgtgccccccatgaaccccgccaccaccctgcccggcctgatgcccctgcccgccggcctgcccaacctgcccaacctgaacctgaacctgcccgccccccacatcatgcccggcgtgggcctgcccgagctggtgaaccccggcctgccccccctgcccagcatgccccccagaaacctgcccggcatcgcccccctgcccctgcccagcgagttcctgcccagcttccccctggtgcccgagagcagcagcgccgccagcagcggcgagctgctgagcagcctgccccccaccagcaacgcccccagcgaccccgccaccaccaccgccaaggccgacgccgccagcagcctgaccgtggacgtgaccccccccaccgccaaggcccccaccaccgtggaggacagagtgggcgacagcacccccgtgagcgagaagcccgtgagcgccgccgtggacgccaacgccagcgagagcccctag

SEQ ID NO: 187186 - protein, 1963 aa, Artificial Sequence
  derived and/or modified sequence
MKQRKGQGSGGSRGRKKRGLSDISPSTSLPPLVEGQLRCFLKLTVNRVIWKIAKPPTCVLVRVRWWGETSDGTLFCPRDALQTEPKAVRTTTRYAIRCGPKQFTSYLTDMAVLVLEVITKLDGLPIGRVQINGLAQLSPTHQINGFFTIVSSTSKKLGELQVSLALEPLSETYDSYHPLPTTDMTENVLLSKQGFRENTEPSSTQFQVPSRPRDIHTIKIDGKELAANSSRSTTPRGKDHVCFAENPDTIKDSSFGLQHSLNSGQSLESVTLKGRAPRKQMSLLNSSEFQPQIRTVAKSHSDSCILSSNNLPTKDLLSALLEQGNKLRNAMVISAMKSSPETSMLLDQVHPPINEDSLRASTQIRAFSRNRFKDHIEDHLLPSTENTFWRHDTKADTRAIQLLLGSAELSQGNFWDGLGSPPDSPSPGSDVYCISELNDPQYDQSLLENLFYTAPKSDTSISDFLSEEDDIVPSKKISQSTALARSSKVLESSDHKLKKRSAGKRNRNLVEQQMLSETPEDAQTMTLSVDRLALLGRTHSVRIIIETMGVPPDSPQMTPGKKSYAGPPPKVTTAKKRTFFVEYHFPVGFSESGLGKTALITEVVRLASSKITDGKVKFQQRFVFPVQFGGPMIEHWWNSNLTFQIYVKKTPQKKPEVIGSVSLSLRAVIQSELLSFSDQLPVQQENGQSPFGPLKVTMELITDNKDFTGINTKLSGNTHYTPLCAPTSPNKALPELNQDMTCTKNPQNLNQIHEETAKKAQNLVLPNRKSPSPVAPHPSTFVATPASHNLVNQTNGTTKESALLLHVLLMVPDGKDFISGESEKQSPCNVYLNCKLFSTEEVTRSVIAWGTTQPVFNFSQVIPVSLSSKYLERLKNNVMVIETWNKVRSPGQDKLLGLVKLPLHQFYMSFKDAKISRLLLDAQYPVVAVDSYMPVIDVFSGHQNGSLRVFLAMGSSNQIMALQRLKNEEGTLPPFSPRPAHFLDQPTAASVAMAEDRGNGLMEHCFEIHIEMVKGLAPLQATVWGEADCYVQYYFPVQHSQSSVLKGPEFLENGITLKPFRTATTLCVPDPIFNSEHHHSLLLPAEVPVQRLLLSAFSAQGLVPGGGVQFEIWCRYYYPNVRDQKVAKGTLPLSRICAMVTTQHREDVGIQTFNLPLTPRIENRKELRNQSSGLLDVGLRYRRSPRTAEGVLAARTVSISVQIIRACGLQAAAKALAEREPALQFSATVGVNASVTTHLSFLPQGEQRRTHPVACSFCPEFSHHVEFTCNLVTQHCSGEACFLAELLEFAEVIFAVYHENTKSASDIISIESCKEYLLGVVKVPTKELLIKRSGITGWYPIILPEDGGLPHGLELMQKIVGGLELSISFTHRGDRERVLEAAEHLGWSFENSLKDFVRMDEGEPATVTISTPRLWLPIHCVLLAGHNHIHKNTYCYLRYKFYDHEAFWTPLKKPKESVNKKQIMVTFKASKRAEVTRGPSLLWYFREERLEIQVWRAYGNDSVERPHQTDSWIGSAYVDLARLGERSARTLTVSGVYPLFGRNASNLSGAALRVHVVLSSLSSHLEPTHELDSMDCSSHSESEQLPRRNDEVQLSPPEVISCHQKSPASTQVPCSSTTAEVRLTQEGPADLDGTFAVSILVERAMHLSLKGSPLTERKVSIPSCCVSFATADESSPVYTQVVENTDSPIWNFQQQSRLSKELLLDPQQTLVFKVWHKGDEERVIGFASVDLSPLLSGFQFVCGWYNITDFSGECQGQIKVAVSPLESLIHFKEERQARRGVETSKSLIPIYSPFSFPASDTYAAFSSHMARQTLDQLAHASSKELDFSSPGRSDTTRSQASRHEEHVQNIRRFHESLHLQGEAPLPCDDKLTTSPLSSQTSILTSLRKNLSELDQIQRYFRQKLTKPFLPLSPQTQTAISQHQESCRDHLGPGASSLDPGSQCILEKSSNLVLQVSSLITGSY

SEQ ID NO: 187187 - DNA, 5892 bp, Artificial Sequence
  derived and/or modified sequence
atgaagcagagaaagggccaggggagtgggggttcccggggccgcaaaaaacgtggcctaagcgacatttcaccgagtacttccctccctcctcttgtggagggacaactgaggtgcttcctaaagctgacggtgaacagggtgatctggaaaatagctaagccccccacctgtgtcctggtccgggttaggtggtggggtgagacaagcgatgggacactattctgtccaagggatgcccttcagaccgaaccaaaggcagtaaggaccacgacccggtacgcaattcggtgcggaccaaagcaatttaccagctatctcacagacatggctgtgttggttctggaggtaataactaagcttgacggtctgccgattggccgagtccagataaatggcctggctcagctctctccaacgcatcagataaacggattcttcactatcgtgagctcaacaagcaagaaactgggggagttgcaagttagcctggccttagaacctttatctgagacgtatgacagctaccacccactgcctaccactgacatgactgaaaatgtgctactgtctaagcagggattcagagaaaataccgaaccttcctcaacacaattccaggtgccatcccgccccagggatatccacaccataaaaattgacggtaaggagctggcggcaaattcttcccgctctacgactcccagaggcaaggatcatgtgtgtttcgcagagaaccccgataccatcaaggactcttctttcggcttgcaacatagtctgaattctggacagtcactagagagcgtcacactgaagggtcgcgcgccccgtaagcagatgagtctcctcaatagttccgaattccagccccagattcggaccgtagctaagagccatagcgactcctgcatcctgtcctcgaataaccttcctacaaaggacctgctttccgctctcttagaacagggcaataagctcagaaatgcaatggtgatctcagccatgaaatcaagcccagaaacttctatgctgctggatcaggtccacccacccataaacgaagactctctgagggcttccacccagataagagcgttttcacgaaatcggttcaaagatcatattgaggaccacttgctgccttccaccgagaacactttttggcgccatgacacaaaagctgacaccagggccatccagctgctgctgggtagtgccgagctcagtcagggcaatttctgggatggcctcggcagtccacccgattcaccttcacctgggagtgatgtgtattgcatttcagaactcaacgatccacaatacgaccagagtctgttagagaatctcttctacactgcacccaaatcagacacatccatttcggactttctatctgaggaggatgatatcgtcccaagtaagaaaattagccagagcactgcccttgcacgatcctcaaaggtcctggagagttccgaccacaaactgaaaaaaaggtctgcagggaagcgaaatagaaaccttgtcgagcagcagatgctgagcgaaactcccgaggatgctcagactatgacactgtctgtagatcggctggctctgttggggcggacacactccgttcgcataattatcgagacaatgggagtccctcctgattctccgcagatgacacctggaaagaaatcgtatgccggccctcccccaaaagtaactacagccaagaagcggacgttttttgtagaataccactttcctgtcggcttctcagaatccggactcggcaagaccgctctgatcactgaagtggtgagactcgctagcagcaagattacagatggtaaggtgaagtttcagcagagatttgtattcccagtccaattcggtggcccgatgatagagcactggtggaatagcaatcttacctttcagatatacgtgaaaaagaccccacaaaaaaagccggaggttataggatccgtatcattgagcttacgtgcggtgatccagagcgaactgttgagcttctccgatcaactccccgtgcagcaagaaaatgggcagtcaccatttggaccactgaaggtgacaatggaactgatcacagataacaaagatttcacaggcattaataccaaacttagtggaaatacacactatacccccctgtgcgccccgacttcacctaacaaggccttgcccgagctgaatcaagatatgacttgcacaaagaaccctcaaaatctgaatcagatccacgaagagacagccaagaaagcgcaaaacctagtcctccccaaccgaaagagcccgtccccagtggccccacacccaagtacctttgttgctactcccgcctcccacaacctagtgaatcagaccaacggaaccacaaaggagtcagccctgttgctccatgtcctgctcatggtgcccgacggaaaggattttataagcggcgagagtgagaagcagagcccctgtaacgtgtaccttaactgtaagttgttctcaactgaggaggtcactcgttccgtgatcgcctgggggactacacaacctgtgttcaatttcagccaggtgattcctgtctcccttagctctaagtacctggaacgcctaaaaaacaacgtgatggtcatcgagacatggaataaagtccgctcacccggccaagataagctcctgggactggtcaagttaccactgcatcagttctacatgtcgtttaaggacgccaaaatctccaggctgctgttagatgctcagtaccctgtcgtcgccgtcgattcttacatgccagtgattgacgtctttagcggacaccagaatggcagtctgcgggtcttcttggccatgggcagttccaaccagatcatggctttacagcgtctgaaaaacgaggagggcaccctccctccttttagccctagacctgctcacttcttagatcagcctacggcagcgtccgtggcaatggccgaggatcgcggaaacggtctgatggagcactgctttgagatccacatcgaaatggttaaggggcttgcaccacttcaggcgaccgtatggggtgaagctgactgttacgtccaatattactttccagtgcaacatagtcagagcagcgtgctgaagggacccgagtttctggagaacggtataaccctgaagcccttccgaaccgccaccaccctgtgtgtcccggatcccatattcaattccgaacaccaccacagcctactgctccccgcagaggtcccagtccagagactgctgctgtcagcgttcagcgcacaaggcctggtacctggggggggagttcagtttgagatctggtgcaggtattactaccccaacgtaagggaccaaaaagttgctaaaggaactctgcccttaagtaggatttgtgctatggtcaccacccagcatcgggaggatgtaggcattcagactttcaatctgccactgaccccacgtatcgagaataggaaggaactgagaaatcagtcatccggactgctggacgtcgggctgaggtataggcggtctcctagaactgctgagggcgtgctagccgcccggacagtgtctataagtgtgcaaatcatccgggcttgtggcttacaggcggctgcaaaagctctggctgagcgcgaacctgctctccagtttagtgcaaccgtcggcgttaacgcgtccgtcacgacccacctgtccttcctgccacagggtgagcagcgccgtacccaccccgtggcatgctcgttctgtcctgagttttcccaccatgtcgaattcacctgtaacctggtgacccaacactgctccggcgaggcctgtttcctcgccgagctgctcgagtttgcagaagtgatattcgctgtctaccacgaaaatacaaagagcgcgtctgatatcatttcaatcgagtcttgtaaagaatatttactaggggtcgtgaaagtgccgactaaggaactcctgatcaaacgtagtggcataactggatggtacccgattattctgccagaagacgggggcctgcctcacggcctggaactgatgcagaaaattgtggggggcctggaactctctataagctttactcatcgaggcgacagagaaagggtcctggaggcggctgaacacttgggatggtccttcgagaatagcttgaaagacttcgtcagaatggacgagggcgaaccagctaccgtcactatctccactcccagactttggcttcccatccactgcgtcctcctggccggccataaccatattcacaagaatacgtactgttatctgagatataaattttatgatcacgaggccttttggacgccccttaaaaagcctaaggagtccgtcaataagaaacaaattatggtcacattcaaggcgtctaagcgagcagaagtgaccaggggcccttccctcttgtggtacttccgtgaagagagactcgagatccaggtttggcgggcttacggaaatgattccgtcgagaggccccaccaaacagatagctggatcggttccgcctatgtcgacctggcgcgcctgggagagaggtctgcccgaactttaacggtatctggggtataccccctattcggccgaaatgctagcaatctcagcggagccgccttaagggtccatgtagtcctgtcctccttgtccagccacctggaaccaacacacgagctcgattcaatggactgctctagtcattctgaaagcgaacaactgcccagacggaatgatgaggtgcagctttcgcctcccgaagtcatttcttgccaccaaaagagtcccgctagcacacaggtgccctgtagtagcactaccgccgaggtgcgtctgactcaagagggccctgcggatttggacggcacttttgctgtgtcaatcctcgtagagagggctatgcacctgtcattaaaagggtcacccctcacagaaagaaaagtgtcaatcccatcttgttgcgtaagtttcgccacagccgacgagtcatcccctgtctatacccaggtggttgagaacactgactcccccatttggaacttccaacaacagtctcgcctgagcaaggagttgctcctagatcctcagcagactctggtcttcaaagtctggcataagggtgatgaagagcgggtgatcggattcgcaagtgttgacttgtcccctttgctaagcggatttcagttcgtctgcggctggtataacatcacagacttcagtggtgaatgccagggacagatcaaggtcgcagtgtcacccttggagtcacttatccatttcaaagaagaacgtcaggcccgccgcggggtggaaacctctaaatctctcatccccatatacagccccttttcgttcccagcgtctgacacttatgcggccttttcctcgcacatggctagacagacactggaccagttggcccatgcaagctccaaagagttggacttcagcagtcccggtaggagcgatactaccaggagtcaggcctcccgtcacgaggaacacgtgcagaatattaggaggtttcacgagagcctccatctgcaaggcgaagctccattgccatgcgacgacaagttgaccacgtcacctctgtcctcccagacctctatcttgaccagtctgagaaaaaacttaagcgagctcgaccagatccagcggtatttcagacagaagctcactaagcccttcctccctctgtctccacaaacccagactgccatttcccagcatcaagagtcatgccgcgatcatctcggacctggtgccagctctctggaccccggaagtcaatgcatcctggagaaaagctctaatttggtgctgcaggtgtcctcgttgattacaggctcatactag

SEQ ID NO: 187188 - DNA, 5586 bp, Artificial Sequence
  derived and/or modified sequence
atgaagcaacggaaggggcagggctcaggcggcagcaggggacgcaagaagcgcgggctttcggacattagtcctagtacgtcactgcctcccctcgtggagggccagcttcggtgctttctgaaactgactgttaaccgagtgatttggaagatcgccaaaccacccacatgcgttcttgttcgtgtcaggtggtggggcgagacctcagacggcacacttttttgtccacgcgacgctctccaaactgaacctaaggccgtacgcaccactaccaggtacgccatacgttgcggtcccaagcagttcacatcttacctcaccgacatggcggttctggtgctggaagtcatcacaaaactcgacggcctgcctatcggaagagtccagattaatgggctggcccagctgtcacctacacaccagatcaacggtttctttactatagtatcctctacctctaaaaagctcggggaattacaggtgagcttggcgttggaacccctcagcgagacgtacgactcctatcacccattacctactacagacatgaccgaaaacgtgctgctttcgaaacagggctttcgggaaaatactgagccaagtagcacgcagttccaggtgcctagtagaccccgggacatacacacgattaaaatcgacgggaaggagctggcagcaaacagttcccggagcaccacacctcgcggcaaggaccatgtctgcttcgctgaaaaccccgacactattaaggacagttcgtttggtctgcagcactccctgaactctggacagtctctcgagtctgtgacactcaagggacgggcacctaggaaacagatgtcgctgcttaatagctcagagttccaaccgcagatacgcaccgttgccaagtcacactcagactcatgtatcctgtcatctaataacctgcctacaaaggatctgctgtctgcacttttggagcagggtaataagctaagaaacgcgatggtgatatccgctatgaagtcatcacccgaaacatccatgctactggaccaggtacacccgccaatcaatgaagattctctccgcgcttccacccagatacgggctttttccaggaaccgtttcaaggaccatatagaagatcacctgctgccctctacagaaaacacattctggcgacacgacacaaaggctgacacccgggcgatacagctcctccttggatccgccgagctctcacagggaaacttttgggatggcctcggctccccgcctgacagccctagcccagggtcagacgtgtactgcatctcggagctcaacgatcctcagtatgatcagagtctgctcgagaacctcttttatactgcgcccaagagtgacacatccataagcgatttcctatccgaagaggatgacattgtgccctctaagaaaattagtcagtccactgcccttgcccgtagtagtaaggtgcttgaatccagcgaccacaaactaaaaaagaggagcgcaggtaagcggaacagaaacctagtcgagcaacagatgctgtcggagactccagaggacgcgcagacgatgacactgtctgtagataggctggccctactgggccggacacacagcgtgcggattatcatcgaaaccatgggtgtgcctcctgattctccgcagatgacccccggtaaaaaaagctacgccggtccgccacccaaggtgactaccgccaaaaagcggaccttctttgttgaatatcacttccctgtcggtttttccgaatccgggcttggaaaaaccgctttgattaccgaagtggttcgtttggcatctagcaaaataaccgatggcaaggtgaagttccagcaacgcttcgttttcccagttcaattcggtggccctatgattgagcactggtggaactcaaacctgacattccaaatctacgttaagaaaaccccgcagaagaagcctgaggtgatcgggtcagtcagcctctccctgcgagccgtcatccagtctgagctgctgtccttttcagatcagctgccagtccagcaggagaatggacagtctcccttcggccccttgaaggtgaccatggaattaattacagacaacaaggattttactggaattaatacgaagctaagtggaaatacccactatacacctttatgtgcccctacctctccaaacaaggctctccctgagctgaatcaagatatgacgtgcacaaagaatccacagaatctcaaccagatccacgaagagactgccaagaaagcccagaacttagtattgccaaatcgaaagtctcccagtccagtcgctcctcacccctcaactttcgtggcaacaccagctagccacaaccttgtgaaccagacaaacgggactactaaagagagtgcattactactgcatgtattacttatggtccctgatggaaaggattttatttccggagaatctgaaaaacagtcgccatgtaatgtgtatcttaattgtaagctgtttagtaccgaggaggtgactcggtctgtcattgcctgggggacaacccagcctgtgttcaatttttcccaagtgattcccgtgagcctgagctctaagtatctggagcgtctgaagaacaacgtcatggttattgaaacctggaataaagtcaggagcccagggcaggataaactactgggcctcgtgaaactccccctgcaccaattctacatgtcgttcaaagacgctaagatttcgcgcctgctcctcgatgcccagtatccagttgtggccgtggatagctacatgcctgtgatcgacgttttctccggtcatcaaaatggtagccttcgggtttttttggccatggggtcgtcaaaccagatcatggctctgcagcggctcaaaaacgaggagggcacactgcctcccttttccccccggcccgcacattttctcgaccaacccacagccgcatccgtggctatggccgaggacaggggtaacggactgatggagcactgctttgagatccacatagagatggttaagggactggcccccctgcaagcaaccgtgtggggagaagccgactgctacgttcaatactattttcccgtccagcacagccagagttctgtgctgaagggtcccgagttcctggagaatggaatcacactcaagccttttagaaccgccactacactctgcgtgcctgatcctatcttcaactcggaacatcaccacagcctgcttcttccagctgaagtgccggttcaaaggctcctcttgtccgcgtttagcgcccagggccttgtacccggcgggggagtgcagttcgagatatggtgccgttactactatccgaatgtcagagatcaaaaggtcgccaagggcactctgccactctcgcggatctgtgccatggtcactacccagcaccgcgaagacgtaggcattcaaacatttaatctgccactgactccccgtatcgagaatagaaaggagctacgaaatcagagtagtgggttgctggatgttggcctccgctatagacgaagtccacggaccgctgaaggtgtgctggcagcacgtactgtctccatttctgtgcagataatcagggcctgtggacttcaagcagccgccaaggccctcgctgagcgcgaacctgcattgcagttttctgctacagttggggtgaacgcatcagttacaacccatttatcgtttctgccacagggggagcagaggcggacccatcctgtagcttgtagtttttgccccgaattcagtcatcatgttgaattcacatgcaatttggttacacaacactgtagcggcgaggcttgcttcctggctgagttgcttgaattcgccgaagtaatcttcgccgtatatcacgagaacaccaagagcgcgtccgatattatatcaatcgagtcttgtaaggaatacctgctgggcgtggtcaaggtgccgaccaaagagcttctgattaaacgctccggaattactggatggtaccccataatactacctgaggacggtgggctaccgcacggactggaactgatgcagaagattgttggaggccttgagcatctcgggtggtcattcgagaatagcctaaaagacttcgtgcgcatggatgagggggagccagcaacagtcacgatctccactccacgtctgtggctcccaattcactgcgtcttgctggccgggcacaaccacattcacaaaaacacgtattgctacctgcggtataaattctatgatcatgaggccttttggacccctctcaaaaagcctaaagaatcagtgaacaagaaacagattatggtaacttttaaagcatcaaaacgtgctgaggtcacccgtggtccctctctcctctggtatttccgggaggagagactggagattcaggtctggcgcgcttacggaaacgattccgtggaacgtccgcaccaaacagattcttggatcgggtcagcctacgtcgatttggctcgcctgggagagagatcggcacggacactcacggtgtctggggtatatcctctgttcggcagaaatgcctccaatctgtctggcgctgcccttcgcgtgcatgtggtgttgtcaagcctctccagtcatctggagccaactcacgaactcgactctatggactgctctagccactccgagtctgaacaattaccacggcgaaacgatgaggtgcagctatctccccctgaggttatctcatgccatcaaaagagtccagcatccacccaggtaccttgctcctccaccaccgcagaggttcgtttaactcaggaggggcctgcggacttggatgggacgtttgccgttagcattctggttgaacgagccatgcacctgagtctcaaaggctcaccactgactgaaagaaaagtgtctatccccagctgttgcgtgtcctttgccaccgcagatgaatcctcacccgtctacacccaggtcgttgaaaacacagactcaccaatctggaattttcagcagcaatcgcgtctaagcaaggaactgctgctagacccccagcagactctggtctttaaagtttggcacaaaggggatgaggagagagtgatcggatttgccagcgtcgacctgagtcctctcctatcaggctttcaatttgtgtgcgggtggtacaatattacagatttcagtggggaatgccaggggcaaatcaaagtagctgtttcccctctggagtccctcattcactttaaggaggaacggcaggcgcggcgaggagtcgaaacatccaaaagcctgatccccatctacagtcccttctccttcccggcaagtgacacatacgccgccttcagctcccatatggcccggcagaccctcgaccagctggcgcacgcaagcagtaaagagctcgacttttcctccccaggcaggtcagataccaccagatctcaagcctcccgccacgaagagcacgtgcagaacatacgccgctttcacgaaagcttacatctacagggtgaagcccctttgccctgtgacgataaactgactaccagcccgctgagcagccagacatag

SEQ ID NO: 187189 - DNA, 5892 bp, Artificial Sequence
  derived and/or modified sequence
atgaagcagaggaagggccagggcagcggcggcagccggggcaggaagaagaggggcctgagtgacatcagccccagcaccagcctgccccccctggtggagggccagctgcgctgcttcctgaagctgactgtgaacagagtcatctggaagatcgccaagccacccacctgtgtgctggtgcgggtgcgctggtggggcgagaccagtgatggcaccctcttctgccccagagatgccctgcagacagagcccaaggctgtgaggaccaccaccaggtatgccatccgctgtggccccaagcagttcaccagctacctgacagacatggctgtgctggtgctggaggtgatcaccaagctggatggcctgcccatcggccgggtgcagatcaatggcctggcccagctgagccccacccaccagatcaatggcttcttcaccatcgtgagcagcaccagcaagaagctgggggagctgcaggtgtccctggccctggagcccctgtctgagacctatgacagctaccaccccctgcccaccacagacatgacagaaaatgtgctgctgagcaagcagggcttcagagaaaatacagagcccagcagcacccagttccaggtgcccagccggccccgggacatccacaccatcaagattgatggcaaggagctggccgccaacagcagccgcagcaccaccccccggggcaaggaccacgtgtgctttgctgaaaatccagacaccatcaaggacagcagctttggcctgcagcacagcctgaacagcggccagagcctggagagcgtgaccctgaagggccgggcccccaggaagcagatgagcctgctgaacagcagcgagttccagccccagatcagaacagtggccaagagccacagcgacagctgcatcctgagcagcaacaacctgcccaccaaggacctgctgagcgccctgctggagcagggcaacaagctgagaaatgccatggtgatcagcgccatgaagagcagccctgagacctccatgctgctggaccaggtgcacccccccatcaatgaagacagcctgcgggccagcacccagatccgggccttcagcaggaaccgcttcaaggaccacatcgaggaccacctgctgcccagcacagagaacaccttctggaggcatgacaccaaggctgacacccgggccatccagctgctgctgggcagcgctgagctgagccagggcaacttctgggatggcctgggcagccccccagacagccccagccctggcagtgatgtgtactgcatcagcgagctgaatgacccccagtatgaccagagcctgctggagaacctcttctacacagcccccaagagtgacaccagcatcagtgacttcctgtctgaggaggatgacatcgtgcccagcaagaagatcagccagagcacagccctggcccggagcagcaaggtgctggagagcagtgaccacaagctgaagaagaggtctgctgggaagaggaacagaaacctggtggagcagcagatgctgtctgagaccccagaagatgcccagaccatgaccctgtctgtggaccggctggccctgctgggccgcacccacagcgtgcgcatcatcatcgagaccatgggcgtgcccccagacagcccccagatgaccccaggcaagaagagctatgccggccccccacccaaggtgaccacagccaagaagaggaccttctttgtggagtaccacttccctgtgggcttcagcgagagcggcctgggcaagacagccctgatcacagaggtggtgcggctggccagcagcaagatcacagatggcaaggtgaagttccagcagagatttgtgtttcctgtgcagtttggaggccccatgattgagcactggtggaacagcaacctgaccttccagatctacgtgaagaagaccccccagaagaagccagaggtgattggctctgtgtccctgagcctgcgggctgtgatccagagcgagctgctgtccttcagtgaccagctgcctgtgcagcaggagaatggccagagccccttcggccccctgaaggtgaccatggagctgatcacagacaacaaggacttcaccggcatcaacaccaagctgagcggcaacacccactacacccccctgtgtgcccccaccagccccaacaaggccctgcctgagctgaaccaggacatgacctgcaccaagaacccccagaacctgaaccagatccacgaggagacagccaagaaggcccagaacctggtgctgcccaacaggaagagccccagccctgtggccccccaccccagcacctttgtggccaccccagccagccacaacctggtgaaccagaccaacggcaccaccaaggagagcgccctgctgctgcacgtgctgctgatggtgcctgatggcaaggacttcatctctggagagagcgagaagcagagcccctgcaatgtgtacctgaactgcaagctgttcagcacagaggaggtgaccaggtctgtgattgcctggggcaccacccagcccgtcttcaacttcagccaggtgattcctgtgtccctgagcagcaagtacctggagcggctgaagaacaacgtgatggtgattgagacctggaacaaggtgcgcagccctggccaggacaagctgctgggcctggtgaagctgcccctgcaccagttctacatgtccttcaaggatgccaagatcagccggctgctgctggatgcccagtaccctgtggtggccgtggacagctacatgcctgtgattgatgtgttcagcggccaccagaatggcagcctgcgggtcttcctggccatgggcagcagcaaccagatcatggccctgcagaggctgaagaatgaggagggcaccctgccccccttcagccccaggcctgcccacttcctggaccagcccacagctgcctctgtggccatggctgaagatagaggaaatggcctgatggagcactgctttgagatccacatcgagatggtgaagggcctggcccccctgcaggccaccgtgtggggcgaggccgactgctacgtgcagtactacttccctgtgcagcacagccagagctctgtgctgaagggccctgagttcctggagaatggcatcaccctgaagcccttcagaacagccaccaccctgtgtgtgcctgaccccatcttcaacagcgagcaccaccacagcctgctgctgcctgctgaggtgcctgtgcagaggctgctgctgagcgccttcagcgcccagggcctggtgcctgggggcggcgtgcagtttgagatctggtgccgctactactaccccaacgtgcgggaccagaaggtggccaagggcaccctgcccctgagccgcatctgtgccatggtgaccacccagcaccgggaggatgtgggcatccagaccttcaacctgcccctgaccccaagaattgagaacaggaaggagctgaggaaccagagcagcggcctgctggatgtgggcctgcgctaccgccgcagccccaggacagctgagggcgtgctggccgccaggacagtgtccatctctgtgcagatcatccgggcctgtggcctgcaggccgccgccaaggccctggccgagcgggagcccgccctgcagttcagcgccaccgtgggcgtgaatgcctctgtgaccacccacctgtccttcctgccccagggcgagcagaggaggacccaccctgtggcctgcagcttctgcccagagttcagccaccacgtggagttcacctgcaacctggtgacccagcactgcagcggggaggcctgcttcctggccgagctgctggagtttgctgaggtgatctttgctgtgtaccacgagaacaccaagagcgccagtgacatcatcagcattgagagctgcaaggagtacctgctgggcgtggtgaaggtgcccaccaaggagctgctgatcaagaggagcggcatcaccggctggtaccccatcatcctgcctgaagatggcggcctgccccacggcctggagctgatgcagaagatcgtgggcggcctggagctgagcatctccttcacccacagaggagaccgggagcgggtgctggaggccgctgagcacctgggctggagctttgagaacagcctgaaggactttgtgaggatggatgaaggagagcccgccaccgtgaccatcagcaccccccggctgtggctgcccatccactgtgtgctgctggccggccacaaccacatccacaagaacacctactgctacctgcgctacaagttctatgaccacgaggccttctggacccccctgaagaagcccaaggagagcgtgaacaagaagcagatcatggtgaccttcaaggccagcaagagagctgaggtgacccggggccccagcctgctgtggtacttccgggaggagcggctggagatccaggtgtggagggcctatggaaatgacagcgtggagcggccccaccagacagacagctggattggcagcgcctacgtggacctggcccggctgggggagaggtctgcccggaccctgactgtgtctggagtgtaccccctgtttggaagaaatgccagcaacctgagcggggccgccctgcgggtgcacgtggtgctgagcagcctgagcagccacctggagcccacccatgagctggacagcatggactgcagcagccacagcgagagcgagcagctgcccaggagaaatgatgaggtgcagctgagccccccagaggtgatcagctgccaccagaagagccctgccagcacccaggtgccctgcagcagcaccacagctgaggtgcggctgacccaggagggccctgctgacctggatggcacctttgctgtgtccatcctggtggagcgggccatgcacctgagcctgaagggcagccccctgacagagaggaaggtgtccatccccagctgctgcgtgtcctttgccacagcagatgagagcagccctgtgtacacccaggtggtggagaacacagacagccccatctggaacttccagcagcagagccggctgagcaaggagctgctgctggacccccagcagaccctggtgttcaaggtgtggcacaagggagatgaggagagggtcatcggctttgcctctgtggacctgagccccctgctgagcggcttccagtttgtgtgtggctggtacaacatcacagacttctctggagagtgccagggccagatcaaggtggccgtgagccccctggagagcctcatccacttcaaggaggagcggcaggcccggcggggcgtggagaccagcaagagcctcatccccatctacagccccttctccttccctgccagtgacacctatgctgccttcagcagccacatggcccggcagaccctggaccagctggcccacgccagcagcaaggagctggacttcagcagccctggccgcagtgacaccaccaggagccaggccagcagacatgaggagcacgtgcagaacatccgccgcttccacgagagcctgcacctgcagggcgaggcccccctgccctgtgatgacaagctgaccaccagccccctgagcagccagaccagcatcctgaccagcctgaggaagaacctgtctgagctggaccagatccagcgctacttccggcagaagctgaccaagcccttcctgcccctgagcccccagacccagacagccatcagccagcaccaggagagctgccgggaccacctgggccctggggccagcagcctggaccccggcagccagtgcatcctggagaagagcagcaacctggtgctgcaggtgagcagcctcatcaccggcagctactag

SEQ ID NO: 187190 - DNA, 5586 bp, Artificial Sequence
  derived and/or modified sequence
atgaagcagaggaagggccagggcagcggcggcagccggggcaggaagaagaggggcctgagtgacatcagccccagcaccagcctgccccccctggtggagggccagctgcgctgcttcctgaagctgactgtgaacagagtcatctggaagatcgccaagccacccacctgtgtgctggtgcgggtgcgctggtggggcgagaccagtgatggcaccctcttctgccccagagatgccctgcagacagagcccaaggctgtgaggaccaccaccaggtatgccatccgctgtggccccaagcagttcaccagctacctgacagacatggctgtgctggtgctggaggtgatcaccaagctggatggcctgcccatcggccgggtgcagatcaatggcctggcccagctgagccccacccaccagatcaatggcttcttcaccatcgtgagcagcaccagcaagaagctgggggagctgcaggtgtccctggccctggagcccctgtctgagacctatgacagctaccaccccctgcccaccacagacatgacagaaaatgtgctgctgagcaagcagggcttcagagaaaatacagagcccagcagcacccagttccaggtgcccagccggccccgggacatccacaccatcaagattgatggcaaggagctggccgccaacagcagccgcagcaccaccccccggggcaaggaccacgtgtgctttgctgaaaatccagacaccatcaaggacagcagctttggcctgcagcacagcctgaacagcggccagagcctggagagcgtgaccctgaagggccgggcccccaggaagcagatgagcctgctgaacagcagcgagttccagccccagatcagaacagtggccaagagccacagcgacagctgcatcctgagcagcaacaacctgcccaccaaggacctgctgagcgccctgctggagcagggcaacaagctgagaaatgccatggtgatcagcgccatgaagagcagccctgagacctccatgctgctggaccaggtgcacccccccatcaatgaagacagcctgcgggccagcacccagatccgggccttcagcaggaaccgcttcaaggaccacatcgaggaccacctgctgcccagcacagagaacaccttctggaggcatgacaccaaggctgacacccgggccatccagctgctgctgggcagcgctgagctgagccagggcaacttctgggatggcctgggcagccccccagacagccccagccctggcagtgatgtgtactgcatcagcgagctgaatgacccccagtatgaccagagcctgctggagaacctcttctacacagcccccaagagtgacaccagcatcagtgacttcctgtctgaggaggatgacatcgtgcccagcaagaagatcagccagagcacagccctggcccggagcagcaaggtgctggagagcagtgaccacaagctgaagaagaggtctgctgggaagaggaacagaaacctggtggagcagcagatgctgtctgagaccccagaagatgcccagaccatgaccctgtctgtggaccggctggccctgctgggccgcacccacagcgtgcgcatcatcatcgagaccatgggcgtgcccccagacagcccccagatgaccccaggcaagaagagctatgccggccccccacccaaggtgaccacagccaagaagaggaccttctttgtggagtaccacttccctgtgggcttcagcgagagcggcctgggcaagacagccctgatcacagaggtggtgcggctggccagcagcaagatcacagatggcaaggtgaagttccagcagagatttgtgtttcctgtgcagtttggaggccccatgattgagcactggtggaacagcaacctgaccttccagatctacgtgaagaagaccccccagaagaagccagaggtgattggctctgtgtccctgagcctgcgggctgtgatccagagcgagctgctgtccttcagtgaccagctgcctgtgcagcaggagaatggccagagccccttcggccccctgaaggtgaccatggagctgatcacagacaacaaggacttcaccggcatcaacaccaagctgagcggcaacacccactacacccccctgtgtgcccccaccagccccaacaaggccctgcctgagctgaaccaggacatgacctgcaccaagaacccccagaacctgaaccagatccacgaggagacagccaagaaggcccagaacctggtgctgcccaacaggaagagccccagccctgtggccccccaccccagcacctttgtggccaccccagccagccacaacctggtgaaccagaccaacggcaccaccaaggagagcgccctgctgctgcacgtgctgctgatggtgcctgatggcaaggacttcatctctggagagagcgagaagcagagcccctgcaatgtgtacctgaactgcaagctgttcagcacagaggaggtgaccaggtctgtgattgcctggggcaccacccagcccgtcttcaacttcagccaggtgattcctgtgtccctgagcagcaagtacctggagcggctgaagaacaacgtgatggtgattgagacctggaacaaggtgcgcagccctggccaggacaagctgctgggcctggtgaagctgcccctgcaccagttctacatgtccttcaaggatgccaagatcagccggctgctgctggatgcccagtaccctgtggtggccgtggacagctacatgcctgtgattgatgtgttcagcggccaccagaatggcagcctgcgggtcttcctggccatgggcagcagcaaccagatcatggccctgcagaggctgaagaatgaggagggcaccctgccccccttcagccccaggcctgcccacttcctggaccagcccacagctgcctctgtggccatggctgaagatagaggaaatggcctgatggagcactgctttgagatccacatcgagatggtgaagggcctggcccccctgcaggccaccgtgtggggcgaggccgactgctacgtgcagtactacttccctgtgcagcacagccagagctctgtgctgaagggccctgagttcctggagaatggcatcaccctgaagcccttcagaacagccaccaccctgtgtgtgcctgaccccatcttcaacagcgagcaccaccacagcctgctgctgcctgctgaggtgcctgtgcagaggctgctgctgagcgccttcagcgcccagggcctggtgcctgggggcggcgtgcagtttgagatctggtgccgctactactaccccaacgtgcgggaccagaaggtggccaagggcaccctgcccctgagccgcatctgtgccatggtgaccacccagcaccgggaggatgtgggcatccagaccttcaacctgcccctgaccccaagaattgagaacaggaaggagctgaggaaccagagcagcggcctgctggatgtgggcctgcgctaccgccgcagccccaggacagctgagggcgtgctggccgccaggacagtgtccatctctgtgcagatcatccgggcctgtggcctgcaggccgccgccaaggccctggccgagcgggagcccgccctgcagttcagcgccaccgtgggcgtgaatgcctctgtgaccacccacctgtccttcctgccccagggcgagcagaggaggacccaccctgtggcctgcagcttctgcccagagttcagccaccacgtggagttcacctgcaacctggtgacccagcactgcagcggggaggcctgcttcctggccgagctgctggagtttgctgaggtgatctttgctgtgtaccacgagaacaccaagagcgccagtgacatcatcagcattgagagctgcaaggagtacctgctgggcgtggtgaaggtgcccaccaaggagctgctgatcaagaggagcggcatcaccggctggtaccccatcatcctgcctgaagatggcggcctgccccacggcctggagctgatgcagaagatcgtgggcggcctggagcacctgggctggagctttgagaacagcctgaaggactttgtgaggatggatgaaggagagcccgccaccgtgaccatcagcaccccccggctgtggctgcccatccactgtgtgctgctggccggccacaaccacatccacaagaacacctactgctacctgcgctacaagttctatgaccacgaggccttctggacccccctgaagaagcccaaggagagcgtgaacaagaagcagatcatggtgaccttcaaggccagcaagagagctgaggtgacccggggccccagcctgctgtggtacttccgggaggagcggctggagatccaggtgtggagggcctatggaaatgattctgtggagcggccccaccagacagacagctggattggcagcgcctacgtggacctggcccggctgggggagaggtctgcccggaccctgactgtgtctggagtgtaccccctgtttggaagaaatgccagcaacctgtctggagctgccctgcgggtgcacgtggtgctgagcagcctgagcagccacctggagcccacccatgagctggacagcatggactgcagcagccacagcgagagcgagcagctgcccaggagaaatgatgaggtgcagctgagccccccagaggtgatcagctgccaccagaagagccctgccagcacccaggtgccctgcagcagcaccacagctgaggtgcggctgacccaggagggccctgctgacctggatggcacctttgctgtgtccatcctggtggagcgggccatgcacctgagcctgaagggcagccccctgacagagaggaaggtgtccatccccagctgctgcgtgtcctttgccacagcagatgagagcagccctgtgtacacccaggtggtggagaacacagacagccccatctggaacttccagcagcagagccggctgagcaaggagctgctgctggacccccagcagaccctggtgttcaaggtgtggcacaagggagatgaggagcgggtgattggatttgcctctgtggacctgagccccctgctgagcggcttccagtttgtgtgtggctggtacaacatcacagacttcagcggggagtgccagggccagatcaaggtggccgtgagccccctggagagcctcatccacttcaaggaggagcggcaggccaggagaggagtggagaccagcaagagcctcatccccatctacagccccttctccttccctgccagtgacacctacgccgccttcagcagccacatggcccggcagaccctggaccagctggcccacgccagcagcaaggagctggacttcagcagccctggccgcagtgacaccaccaggagccaggccagcagacatgaggagcacgtgcagaacatccgccgcttccacgagagcctgcacctgcagggcgaggcccccctgccctgtgatgacaagctgaccaccagccccctgagcagccagacctag

SEQ ID NO: 187191 - DNA, 5892 bp, Artificial Sequence
  derived and/or modified sequence
atgaagcagcggaagggccagggcagcggcggcagccggggccggaaaaaacgaggcctcagtgatatcagtcctagcacaagtttaccccctctcgtggaaggacagcttaggtgcttcctcaagctgacggtgaatagagttatctggaagatagcgaagcccccgacttgcgttctggtacgagtgcggtggtggggagaaacctcggatggcacactgttttgtccccgtgatgctttgcagaccgagcccaaagcagtgcgcacgacgacgcgctacgccatacgctgtggaccaaaacaattcacttcttaccttaccgacatggcggtcctggtgctggaagtgatcacgaaactcgacggcctgccaataggccgcgtacagatcaatggactggcacagctttccccgactcaccagataaacggattcttcaccatcgtttcgagtacctctaaaaagttgggtgaattgcaggtatcattagccctggagccactttctgagacctatgactcttatcacccgctacctaccaccgacatgacagaaaacgtcctgctgagcaaacaggggttcagggagaataccgaacccagctctacacagtttcaggtgccgagccgtcctagagatattcacacgattaaaatcgatggtaaagaactggccgctaatagcagtcggagcaccactccaaggggtaaagaccatgtgtgttttgccgaaaaccctgacaccattaaagattccagctttggcttgcagcatagcctgaattccggacagagcctcgagtctgttaccctaaaaggacgggcgccacggaaacagatgtctctgctgaacagcagtgaattccagccacagataaggaccgttgccaagagtcattctgatagctgtatcctgtcttccaataacttacccactaaagaccttcttagtgccctattggagcagggcaacaaattgagaaatgcaatggtcatttccgccatgaaaagttcccccgagacatctatgctgcttgatcaggtgcatccccctatcaacgaggatagcttacgggccagcacccaaataagagccttctcccgaaaccgattcaaagaccacatagaagatcacctgctgccctctaccgagaatacattctggaggcatgacaccaaagccgacactagggctattcaactactcctgggctccgccgaactgtcccagggaaatttctgggacggcctgggatcacctcccgatagcccaagtcctgggtcagatgtctactgcatttctgagttgaatgacccacagtacgatcaaagcctgctggagaatctcttctacaccgcaccgaaatcagatacaagtatttctgattttctgtcggaagaagatgatatcgttcccagtaagaaaattagtcagtcgacagctttagctcgcagcagcaaagtccttgagtccagtgatcataagctgaaaaagagaagcgctggaaagaggaatcggaatctcgtggaacaacaaatgcttagcgaaacaccggaagacgcccagactatgaccctgtctgtcgacagactggctcttcttgggagaactcattccgtgcggattatcatcgagaccatgggtgtgcctcctgactccccacagatgacgccaggaaagaagtcatacgcaggacctcccccgaaggttacaaccgcaaaaaagaggacattttttgtggagtaccactttcctgtcggtttcagcgagtcaggcctagggaagacagccctgatcacggaggtcgtgaggttagcatcttcgaagatcactgacggcaaagtcaagttccagcaacgcttcgtttttcccgtgcagtttggcggccctatgatcgagcactggtggaattctaatctgactttccagatctatgtcaagaagacacctcagaaaaaaccagaagtgataggatccgtgagtctctccctgagagctgtgattcagtctgagctgctgagcttttctgaccagctgcccgttcaacaggagaacggccagtccccgttcggcccccttaaagtcacaatggagctgattaccgataacaaggacttcaccggaatcaatacaaagctgtcaggcaacactcactacactcctctgtgcgctccaacatccccaaataaggcactcccagaattaaaccaggatatgacttgtaccaaaaatcctcagaatctcaatcaaatccatgaagagacggccaaaaaggcccagaatttggtcctgcccaaccgaaaatccccctctcccgtggccccacacccgtctacgtttgtagcgacgcccgcctcacacaacctggtgaaccagacaaatgggaccacaaaggagagcgcactactccttcacgtgcttctgatggtccccgacggtaaagactttatcagcggggagtccgaaaaacagtccccgtgtaacgtgtatctgaactgtaaacttttcagcactgaggaagtcacaaggtcggtgatcgcctggggcactacccagcctgtatttaattttagtcaggtgatccccgtttcattgtcctcgaaatatctggagaggttgaagaacaatgtgatggtgattgagacatggaataaggtccggtcacccggccaggataagttactcggacttgtcaagttgccccttcatcagttctacatgagcttcaaagatgccaagatttccaggttgctcttggatgcccagtatcctgtggtcgccgtagatagttacatgccagtgatcgacgtgttcagcgggcatcagaacggctctcttagagtctttctagcgatgggctcctccaatcaaattatggctttacagcggcttaaaaacgaagaaggaaccctgccacccttttccccgaggcccgcgcactttctggatcagccaaccgccgctagtgtggcaatggcagaggacagaggcaatgggctgatggagcactgcttcgagatccacattgaaatggtgaagggcctcgctccattgcaagccacggtgtggggtgaagccgactgttatgtacagtattactttcccgttcagcacagccagtcctccgttctgaaaggacctgaattcctggaaaacgggatcacattgaagccctttcgaaccgcgactacgctctgcgtacccgacccaatcttcaactcagagcaccaccactccctgctgttgccagccgaagtgccggtgcaaagactgttgctgagcgcattcagcgcccagggcctcgtgcccgggggaggagtccagtttgaaatctggtgccggtattactaccccaatgtgagagaccaaaaagtcgccaagggtaccctgccgctgtcgagaatatgcgccatggttactacacagcaccgggaggacgtaggaatccagacgtttaacttacctctgacaccccggatcgagaaccggaaagagctgcgaaaccagagctctggcctgctcgacgtgggcttacgttaccgtcgaagcccccgcactgcagagggggtcctggctgcccgcactgtgagcatttcagtgcagatcattcgagcatgcggtctgcaggctgcggccaaagctctggcagaaagagagcctgcccttcagttcagcgctactgtcggtgtgaatgcatcagtcacgacgcatctgtcatttcttccccagggcgaacagcgcaggactcaccccgttgcttgctctttctgcccggaatttagtcatcatgtggaatttacatgtaatctggtcacacagcattgctccggcgaggcttgtttcctggctgaacttctggagtttgccgaggtcatttttgcagtctatcatgaaaatactaaatcagcttccgatataatctccatagagtcttgtaaggaatatctcctgggtgtggtgaaagtgcctacaaaagagctgttaatcaagcgttccggtatcacggggtggtatcctattatcctgcctgaagacggaggtctccctcacgggttggaactgatgcaaaaaatcgtcggcggactcgagctctccatctccttcactcatcggggtgaccgcgagcgagtactcgaggcagcagaacacttagggtggagtttcgaaaattcactaaaggacttcgtgaggatggatgagggcgagccagccaccgtgacaatatcaacccccagactgtggcttccaatccactgcgttcttttggcgggccacaatcacatccataaaaatacttactgctacttgcgctacaagttttacgaccatgaagccttctggacgcctctgaagaaaccaaaagagagcgtcaacaagaaacaaattatggttaccttcaaagcctccaaaagggcggaggtcaccaggggcccatccttgttatggtacttcagggaggagagactggaaattcaggtctggcgggcttatggtaatgatagcgtcgaaagaccccaccagactgactcctggataggatccgcatacgtagacttggccagactgggcgagcgttccgcccggactctcacggtttccggtgtgtacccactcttcggccgcaacgcgagcaacctgtcaggagcagccctgagggtgcatgtcgttctctcctccctcagcagccacctcgagcccacccacgagctcgatagtatggactgctctagccactccgagtcagagcaattaccccgtagaaatgatgaggtgcaattgagccctccagaagtgatctcctgtcaccagaagagtccggccagtacccaagtaccttgttcatctaccacagctgaagtgcgcctgactcaggagggccccgcagacctcgatggcacattcgctgtctccattctggttgagagggccatgcacctgagtctgaaagggtctcccctgaccgagagaaaggtgagcataccaagctgctgcgtctcttttgccaccgcagacgagagcagccccgtgtacacacaggttgtcgaaaacacggattctcccatttggaacttccagcagcagagcaggttgagcaaagagctcctgttggaccctcagcaaaccttggtgttcaaggtgtggcataagggcgacgaggagcgggtcataggttttgcaagtgtcgacctctcccccttgcttagcgggtttcaattcgtgtgcggatggtacaatattactgatttcagcggagaatgtcaaggtcagatcaaagtcgccgtctccccccttgagtccctcatccactttaaggaagagcgccaagcccgcaggggagttgaaacaagtaagagcctgatacctatatattctcctttttccttccccgcaagcgacacctacgcagcattttccagccacatggcccgccagactcttgaccagctggcccatgcgagttccaaggagctggacttcagtagccccggtcgcagcgacaccacgcgttcccaggcgtccagacatgaggaacatgttcagaacatcaggcggtttcacgaatcactgcacctgcagggtgaggccccccttccatgtgacgacaaactgacaacatcgcctctctcatctcagacatccatacttacctcgttgagaaaaaacctatctgagctggatcaaattcagaggtactttaggcagaagttaacaaagccgtttcttccattgtctccccagacccagacagcaatctcccagcatcaggagagctgtcgagaccatctgggacccggagcgagttcactagatcctggttcccagtgcattctagagaagtcatccaatctggtgttacaagtttcaagcctgattaccggttcatattag

SEQ ID NO: 187192 - DNA, 5586 bp, Artificial Sequence
  derived and/or modified sequence
atgaagcagcggaagggccagggcagcggcggcagccggggccggaaaaagcgcgggctgtccgacattagtcctagtacttcacttccaccgctggtagagggccagctgcggtgtttcctcaaactcacggtcaaccgcgtgatctggaaaatagccaaacccccaacgtgcgtgctcgtgcgtgtgcgttggtggggagaaacgagcgacggcacgctcttctgcccaagagacgctctgcaaactgagcccaaggccgtgcggacaacgacccggtatgctatccggtgtggccccaagcaattcacctcctacttgacagacatggcagtcctggtcctggaggttatcacaaaactggacgggctccccatcgggcgcgtccagatcaacgggcttgcacagttatctccaacccaccagattaacggatttttcactattgtatccagcacaagcaagaagctcggtgagcttcaggtgtctttggccctggaaccgctgtctgaaacatatgactcgtaccaccccctgcccactacggacatgaccgagaacgtgctgctcagtaagcaagggtttcgcgaaaatactgagccttcgtcgactcaattccaggttccttcgagaccccgggatatccatactatcaaaatcgatgggaaagagctcgcagcgaattcctcacggagcacaactccccgcggcaaggaccacgtgtgcttcgctgaaaatcccgataccattaaagattctagctttggtcttcagcatagtcttaatagtggacagtctctggaaagcgtgacactgaaaggtcgggctccaagaaaacagatgagcctattgaatagttccgagtttcaaccccaaattcgtacggtggcaaaatcgcatagtgattcttgtatcttgtcttccaacaacctgccaactaaagacctgcttagtgctttgttggaacagggaaacaaacttcggaatgcaatggtgatttctgccatgaagagctcacctgagacaagtatgctgcttgatcaggtccatcccccaatcaacgaagacagcttgcgagcatctactcagatacgcgctttcagcagaaataggttcaaagatcacattgaggatcatctgctgccatccactgaaaacactttttggaggcatgacacaaaggctgacactagggccatccaactcctgttaggatccgccgaactgtctcagggtaacttttgggacggtctcggatcccctccagactcaccgtcccctggcagcgatgtctattgcatatctgaactgaacgatccccagtacgaccagtccctgctggaaaatctgttttacacagcaccaaaatccgacacttccatctccgatttcctctctgaggaagatgacattgttcccagcaaaaagatctcacagtctactgcactggcccgctcctctaaggtgttggaatcctccgaccacaagctcaaaaagcgcagcgctgggaaaaggaatcgcaatttagtcgaacagcagatgctcagtgaaacgcccgaggacgcccagacaatgaccctgtctgtcgacagactggctctgttaggaaggacacactcggtgagaatcatcatcgagaccatgggggtgcctccagactcgccgcagatgacccccgggaagaagagctatgcagggccccccccgaaggttaccacggccaagaaaaggacgttttttgttgagtaccacttccctgttggatttagcgaatcagggctgggcaaaacagccttgataaccgaggttgtgagattagcctcctccaagattacagatgggaaagttaagttccagcagagattcgtattcccggtgcaattcggaggccccatgatcgagcactggtggaattccaatcttacattccagatttacgtcaagaaaacccctcaaaaaaaacctgaagtgattggtagcgtatcgctatcgctgagagccgtgatacagtccgagttgctttccttttctgatcaactgccagtccagcaggagaatgggcagtcgcccttcggccccctgaaggtgactatggaactcataaccgataacaaggatttcactggcattaacaccaaactcagtggcaacacacattatactcccttgtgcgcccctacctctcccaacaaagctctgcctgaattgaaccaagatatgacctgcactaaaaacccccaaaatctgaatcagatacatgaggagacagccaaaaaggctcagaatctcgtgttaccaaatcgaaagtccccctcgcccgtggcacctcatccttccacattcgtagccactcccgcctcccataatctggtgaaccaaaccaacggcacaacaaaggaatccgcactgctgctgcacgtgctcctgatggtgcccgatgggaaagacttcataagtggggaatcagaaaaacaaagtccctgcaacgtctatttgaactgtaaactcttctcgacagaggaggtcactagaagcgtaattgcttggggcacgacacagcccgtcttcaacttttctcaagtcatacccgtttcgctgagttccaagtatctggagcgactcaagaataacgttatggttattgagacctggaacaaagtccgctccccagggcaggataaattgctcggtttagtcaagttacccctgcatcaattctacatgtctttcaaagatgcaaagattagcaggcttctgctcgacgctcagtatccagtggtggccgtcgattcctacatgccggtgatcgacgttttttcggggcaccagaatggttcattacgcgtgttcctggcgatgggaagctcaaatcagattatggctttgcagcgccttaagaacgaggaggggacacttcctcccttctccccccggccagcgcacttccttgaccagcctactgcggcatccgtggcgatggcagaagatagaggaaatggcctgatggagcattgcttcgaaatccatatcgaaatggtgaagggcttagccccccttcaagccactgtttggggcgaagctgactgctatgtgcagtactactttccagtgcagcatagccagagcagcgtacttaaggggccagagtttctggagaatggcatcaccttgaagccttttcgcactgcaacaactctctgcgttcccgatcccatcttcaactccgaacatcaccatagcctgctactaccagccgaggtaccagtgcagcggctccttctgagtgcattttccgcgcaaggcctcgttcccggcggcggggtgcagtttgagatctggtgccggtattattaccctaacgtgagggatcagaaggtggctaaagggaccctgcctctgtcacgcatctgcgccatggtgacaacccagcaccgcgaggacgttggtattcagacgtttaacctgcccctgacaccgcgcatcgaaaaccgcaaggagctgcgtaatcagtcttccggtctgttagatgttggcctacgctatcgtcgatcacccaggaccgccgagggtgtcttagccgcccgcaccgtcagtatctccgtgcagataatccgggcctgcgggctgcaagctgcagccaaggcattggccgaacgcgagccagccctacaattctccgctaccgtgggagtgaacgcctccgtgacaacccatctgtcatttctccctcagggcgaacagaggaggactcacccagttgcttgctctttctgccccgaattcagccatcatgtcgagtttacttgtaatcttgtgacacaacactgtagcggtgaagcctgctttctcgcggagctccttgaatttgctgaagtgatctttgccgtatatcacgaaaatacgaaatcggcttccgacattatcagtatcgagtcttgtaaggaatatctactgggcgtggtgaaggtgcccacgaaagaattgcttatcaaacgaagtggaataaccggctggtaccctatcattctacccgaagacggaggattgccccatggacttgaactaatgcaaaagatcgtgggcggactcgagcacctgggctggtcctttgaaaactcactcaaggattttgtccgaatggacgagggagaacctgcaactgtcaccatctccactccaagactgtggctgcctatccattgtgtgctgctagcgggacacaaccatatccacaaaaacacttattgctaccttaggtataaattttacgaccacgaagctttctggacccctttaaagaagcccaaggaatcggttaacaagaagcaaattatggtcacttttaaggccagtaagagggcagaggtgacgcggggcccttccctgttgtggtattttagggaagagcggctggagatccaggtgtggcgcgcctacggtaacgattctgtggagaggccacaccagacagattcctggatcggtagcgcctacgtcgatcttgcccggctcggcgagcgcagcgccagaacactgacagtttcgggagtctaccccttgttcggccgaaatgctagcaatcttagcggagctgccctgcgtgtgcatgtggtgctgtccagtctgagcagccaccttgaacctacccatgaacttgactccatggactgctcctcacactcagagtctgagcaactcccacggagaaatgatgaagtgcagcttagcccacccgaggtgataagttgtcatcagaaaagcccagcttcaacccaggtgccttgcagttctactaccgcggaagtcaggctgacgcaagagggtcccgctgacttagatggaacctttgctgtttctatcctggttgagagggctatgcacctgtctctgaagggcagcccactgacagagagaaaagtgtcaatccccagctgctgcgttagcttcgcgaccgctgacgagtccagtccagtgtacacacaagtggtcgaaaacacagattcaccgatatggaatttccaacagcagtctagactttcaaaagagcttcttctggatccgcagcagaccctggtgtttaaggtctggcacaaaggcgatgaggaacgagtgattggtttcgcgtccgtggaccttagcccccttctgtcaggcttccagttcgtgtgtggctggtataacataacggacttctccggcgaatgccaggggcaaataaaagttgctgtaagtccgttggagtcactcatccacttcaaagaggagaggcaggcgaggcggggagtggaaacgtccaaaagtctgatccctatctactctcctttttcattcccggcatccgacacatatgcggccttttctagtcatatggcacgccagactcttgatcaacttgcgcatgcgagtagcaaagagctcgattttagctctcctgggcgaagtgacactacccgtagccaagcaagtaggcatgaggagcatgttcagaacatacgccgtttccatgaaagcctgcacctacagggcgaggctccattaccttgcgatgacaagcttactacatcccccctgtcctcccaaacttag

SEQ ID NO: 187193 - DNA, 5892 bp, Artificial Sequence
  derived and/or modified sequence
atgaagcagcggaagggacaagggtccggtggaagccgagggagaaaaaaacggggtctctctgacatttctccctccacttccctgccacctttggttgagggacagctcagatgttttttgaagctaacggtgaatcgggttatttggaagatagctaaaccccctacatgcgttctagtgcgcgtcagatggtggggtgagactagcgatgggacccttttttgccctagggatgctttacagacagaaccgaaagctgtacgcacaaccacgaggtacgctatcagatgtggaccaaagcagttcaccagctacctgaccgacatggcggtcttggtacttgaggttattaccaagttggatggattgcctatcggaagggtacaaatcaacggcctggcacagctctcccccacacaccagatcaatggcttcttcacaatcgtgagcagcacctccaagaagcttggagagctgcaggtgagcctggctctggagccactaagcgagacttacgatagctatcacccacttccaactacagacatgaccgaaaacgtcctgctgtccaagcagggcttccgagaaaacacggaaccttctagcacccagtttcaggtgccgagtagaccacgcgatatacatactataaagattgacggcaaagaattagccgctaactcaagcagaagtaccacgcccagaggtaaagatcatgtgtgcttcgccgaaaatccggacactatcaaagatagctccttcggccttcagcactcgcttaacagtggccagagcctggagtccgtgacacttaaaggtcgggcaccaagaaaacagatgagtctcctgaattcctccgagttccagcctcagattcggactgtggccaagtctcactccgattcttgtattttaagcagcaacaatctccctacgaaggacttgctttcagcactgctcgagcagggcaataagctgagaaatgctatggttatcagcgctatgaagagtagcccagaaacatctatgctgctggaccaggtgcatcctcccatcaatgaagacagtctgagggccagcacccagattagggccttctcccggaatcggttcaaggatcatatcgaagatcacttgctgccgtccactgagaacacgttttggagacatgatacgaaagctgataccagggccattcagctcctgcttggcagcgcagagttgtctcaggggaacttttgggacggactgggcagccctcccgactccccatctcctggttctgatgtatattgtatatctgagcttaatgatccccagtacgatcagtccctcttagagaacctgttttacactgctcccaagagcgatacttcgataagtgactttctttcggaggaagacgacatcgtccccagcaagaaaattagccaatctaccgcgctcgcgaggtcaagcaaagtgttagaaagcagcgaccacaagctcaagaagcggagtgctggaaagcgaaatcgcaaccttgtcgaacagcagatgttgagcgaaactccagaagacgcccagacaatgacgctgagtgtggacaggctggcactactgggccgaacccatagcgtgcggatcattatagagactatgggggtgcccccagacagccctcaaatgactccagggaagaagtcatacgccggacccccacctaaagtgacaactgctaagaagagaacattcttcgtagagtatcacttcccggtaggcttttctgagagcggccttggcaagacggcactgatcaccgaagtcgtaaggctcgcttcatccaagattaccgatggcaaagtgaagttccagcagcgcttcgtctttcccgtccagtttgggggtccgatgatcgaacactggtggaactccaacttaaccttccaaatctatgtcaagaaaactccccagaagaagcccgaagtaatcggctctgtatccctatccctgagggccgtgattcagtctgaactcctctcattctccgaccagctgcccgtgcaacaagagaatggccagagcccctttgggccactcaaagtgaccatggagctcatcactgacaacaaggacttcactggcataaatactaagctgagtgggaacactcactataccccattgtgtgcccctactagccctaacaaagctcttcccgaactcaaccaggatatgacttgcactaaaaacccacagaatctaaatcaaatacacgaggagaccgccaaaaaggcccagaacctggttctgcctaacagaaagtcaccttctcccgtcgccccacacccatctacattcgtcgctacacctgcttcacacaatctggttaaccagaccaacggtactacgaaggaatctgctcttcttctgcacgtcttgttgatggtccccgatggaaaggattttatcagcggtgaatctgagaaacagagtccatgtaacgtctatttgaactgtaagttgttcagtacagaagaagtgacccgatcagtgatcgcctggggaaccactcagcctgtcttcaacttctcacaggtgatacctgtgtccctctcctcaaaatatctggagcgtctgaagaacaacgtcatggtgatagaaacttggaataaggtgcgcagcccaggccaggataagctgctagggctggtaaagctgcccctgcaccagttttatatgagctttaaagacgcaaagatctccaggttgcttcttgacgcgcagtacccagtggtggctgtggattcttacatgcccgtgatcgacgtgtttagcgggcaccaaaacgggagcttgagggtgttcctggctatgggctcttccaatcagatcatggctctgcagagattgaagaacgaggagggcacactgccgcctttctcacccaggcccgctcattttcttgatcagccaactgccgcttccgtggcgatggccgaggaccggggtaacggactcatggaacactgcttcgagatccacatagaaatggtaaaaggcctggctccacttcaggccacggtgtggggcgaagccgattgctatgtgcagtattatttccctgtacagcacagtcagtccagcgtccttaaagggccagaattcctagaaaatggcattactcttaagcccttccggaccgcgacaaccctgtgtgtccctgatccgatcttcaattccgagcatcaccactcactgttgttgccagccgaagtccccgttcaacggttgctcctgtctgccttcagcgcacagggcttagtgccaggcggaggggttcagttcgaaatatggtgcagatactactatcctaatgtgagagaccagaaagtcgctaaagggacacttcctctttctagaatttgtgctatggttacaacccagcatagagaggacgtgggaatacaaacgttcaacctgccactcaccccacgtatcgaaaatcgcaaagagctgagaaaccagagctcaggcctgctggacgtaggcttgcgctaccgaagaagtccgaggaccgcagaaggggtacttgctgccagaacggtcagtatatcggtgcaaattattcgagcctgcgggctacaggccgctgctaaagccctggcagaaagagagcctgcccttcagttctctgccaccgtcggtgtaaacgcttctgtcacaacccatctgagttttttaccgcagggggaacagaggcgaacccaccctgttgcctgctccttttgcccggagttttcccaccatgtcgagtttacctgcaatctcgttacccagcattgctccggtgaggcttgcttcctggcagaacttctggaatttgcggaagtcatttttgccgtctatcatgaaaacaccaaatcagccagtgacatcattagcattgagtcatgcaaggagtatctgctaggggtcgtaaaggtgcctacaaaggaactcttaattaagcggtctggcataactggatggtatcccatcatcctcccagaggatggagggctgccccacggcctagaactaatgcagaaaattgtgggagggcttgaactgagtatcagttttacacacaggggtgatagggagagggtattggaagctgctgagcatctgggatggagttttgagaattctctgaaggactttgtgcggatggatgagggcgagccagcaacagtgactatcagtaccccaaggctatggttacccattcattgcgtactgctcgcgggtcataaccacattcacaagaacacgtattgttatctccgctataagttctacgatcatgaagcattttggaccccactgaaaaaacccaaggaaagcgtgaacaagaaacaaattatggtcacttttaaagcaagcaaacgtgccgaagttacacggggaccgagccttctgtggtatttcagggaagagcgtctggaaatacaggtgtggagggcgtacggcaatgacagcgttgaacgcccacaccagacagacagctggatagggtctgcatatgtcgacttagcaagactcggggagagatctgcacggactctgactgttagtggagtataccctctgtttggacgtaacgcatcaaatctctcgggggctgcacttcgcgtgcacgtggtgctttcttcacttagcagtcatttggaacctacacacgaactcgacagcatggactgttcatcccacagcgaaagcgaacagctgcccaggagaaacgatgaagtgcagctgtctcctccagaagtgatttcgtgtcaccagaagtcgcctgctagtacccaggtgccgtgcagttccacaacagcagaagtccggctcacacaagaaggcccagcagatctcgatggcacattcgccgtgagcattctggtggagcgagctatgcacctctctctgaaagggtcacccctgactgaacgtaaggtgtcaatcccctcatgctgcgtgagctttgctactgctgatgagagctctccagtgtatacccaggtcgtggagaacactgactcgcctatatggaattttcagcagcaatcaaggttatcaaaggagctcttgctcgaccctcagcagactctggtgtttaaggtatggcacaaaggtgacgaggaaagggttatcgggtttgcatcagtggacctctcccctctgctgtctggttttcagttcgtttgtgggtggtataacatcacagacttttctggggaatgccagggtcaaatcaaggtggccgtatctcccctggagtcccttattcatttcaaggaggaaagacaagccaggcgaggggtggaaacaagcaagagcctgatccctatttactcaccattctcctttcctgcttccgatacatacgccgcattcagctcacatatggctagacagacactggaccaactggcccacgcaagctctaaggaattagactttagcagcccgggtcgtagcgacaccacgagatctcaggcctcccggcacgaagagcatgtgcagaacatcaggcgcttccatgagtccctacatctgcagggcgaggcccctctgccttgtgatgataagcttacaacctctcccctctcatcacaaacaagtattcttacaagcctgcgtaaaaacctgagcgagctcgaccaaatccagcggtattttcgacagaagcttacgaaaccttttctgcctctgtcccctcagacacagacggccatctcccaacatcaggaaagctgtcgggaccaccttggaccaggagcaagctccttagatcctgggagccagtgcatcctggaaaagtcatcaaatctggtgctccaggtgtcatcactcatcaccgggtcctattat

SEQ ID NO: 187194 - DNA, 5586 bp, Artificial Sequence
  derived and/or modified sequence
atgaaacagcgtaagggacaaggatctggagggagtaggggtcgcaagaagagaggactgtccgatatttcccccagcacctccctgcctcccctcgtcgaaggccaattacgatgtttccttaaactcaccgttaacagggtgatttggaagatcgcaaagccacccacctgtgtgttagtgagagttcgctggtggggtgaaacgagtgacggtactctgttctgccccagagatgcactgcaaacagagccaaaggcggtgcggaccacgacccgctacgctattagatgtggccctaagcaatttacttcgtacttaacagatatggcagtactcgtgctggaggttattacaaaacttgacggcctgccgataggcagagtgcagattaatggtctggcccaattgagccctactcaccagattaacggattttttactattgtctcttccacaagcaaaaaactcggtgagttacaggtgtcccttgctcttgaacctctatcggagacctatgacagctatcacccgctccctaccacagacatgactgagaacgttctgctgtccaaacagggtttccgggaaaatactgagcccagcagtacacagttccaagtgcctagccgcccacgggacatacacaccatcaaaatcgacgggaaggagctggccgctaactccagcagaagcacgaccccaagagggaaggatcatgtctgctttgccgaaaaccctgacacaataaaggattcatccttcggcctccagcattccttgaattctggtcagtcccttgaatcagtcacgctcaagggcagggctcctcgaaagcagatgtcattactcaacagctcagaatttcaaccccaaatccgcacagttgcaaagtcccattctgactcatgcatactcagctcaaataatcttcccactaaagatctcttaagtgccttgttagagcaagggaacaagctgcgcaacgcgatggtcatttccgccatgaaaagttcacctgagacctctatgctgctagaccaggtgcacccacccattaatgaggactcattgcgagcaagcacccaaattcgggctttttccagaaatcgctttaaggatcatattgaggaccacctgctcccttcgaccgagaacaccttttggagacacgatactaaggccgacaccagagcaatccagctgcttctcggcagtgcagaactcagccaggggaatttctgggatggcctcgggtctccaccagattccccttcgccaggatccgatgtttactgcatcagcgagctgaatgacccccagtacgaccagtcccttctcgagaatctgttctatacagcaccaaagtccgacacgtccatctccgatttcctcagcgaggaagacgacatagtccctagtaagaagatatcccagagcactgccttggctcggagttcaaaagtgctagagtcgagcgaccataagctgaagaagagaagtgcgggaaaaaggaataggaatctagtggagcagcaaatgctgagtgaaactcctgaggacgcccagacaatgactctgagcgtcgatcggctggcactgctaggacggacccatagtgtcagaatcatcatcgagactatgggggtgcctccagacagcccccagatgacccccggaaaaaagagctatgccggaccaccaccaaaggtaaccacagctaaaaaaagaactttcttcgtggaatatcattttccagttgggttctctgaatccggtctaggcaagacagcactgatcacggaagttgtgcgcctagccagctccaagatcacagatggcaaagtgaaattccagcagagattcgtcttccctgttcagttcgggggtccaatgatagagcattggtggaatagcaatttgacttttcagatttacgtgaaaaagaccccccaaaaaaagcctgaggtaatcggctctgtgagcttgagcctgagagcggtgatacagagtgagctgttatctttttcagatcagctgcccgttcaacaggaaaacggccagagcccatttgggccactcaaggtcactatggaactgatcacagataacaaggactttactggcattaataccaaactctcaggcaacacacactacacccccctctgcgccccaacatcccctaacaaggccttgcctgagttgaaccaggatatgacctgtacaaagaatccacaaaacctgaatcagatacacgaggagaccgctaagaaggctcagaacctagtgctgccaaacaggaagtctccatccccggtcgccccacacccttccacttttgttgccacacctgcctcgcacaatcttgtgaaccagacgaacggtaccactaaggaatcagctttgctgctacatgttcttctgatggtccccgacgggaaagatttcatttctggagagagcgagaaacaaagcccctgcaacgtttatttgaattgcaagctgtttagtaccgaggaggtaacgcgttctgttatagcctggggcactactcaacctgtgttcaatttctctcaggtcatcccagtctcactgagttccaagtatttggaaaggctaaagaacaacgtcatggtgatagaaacttggaacaaggtgcgatcccctggtcaggataaactcctgggcctggtgaaactgcctctgcaccaattttatatgtcattcaaggacgccaagattagcaggctcctattggacgctcagtaccccgtcgtggccgtagactcatatatgcctgtgatcgacgtcttttccggtcatcagaatggatccctccgcgttttcctggccatgggatcgtcaaaccagatcatggcccttcagagacttaagaatgaagagggaacattacccccattcagtcctagacccgcacactttctcgaccagcctactgctgcctccgtggcgatggccgaagatcgaggcaatggcctgatggagcattgcttcgagatccacattgaaatggtgaagggccttgctccattacaggcaaccgtatggggcgaggctgactgttacgtgcagtattacttcccggttcagcacagtcaaagttctgtgctcaaaggccctgagttcctggagaacggcatcacgctgaagccctttaggacagcaactacattatgcgtgcctgatcctatctttaattcagagcaccaccacagtctgctgctgcctgctgaggtccctgtccagcgccttttattgtctgcattctcagctcaaggccttgtcccagggggtggtgttcaattcgagatttggtgtcggtattattaccccaatgttcgtgaccagaaagtggcgaagggaaccctgccgctgtctcggatttgcgcaatggtgacaacgcaacacagagaggacgtgggaatacagaccttcaacttgcccctcacacccaggatcgagaacaggaaggagctgaggaatcagtcatccggcctgctcgacgtaggtctacgctatcggaggtctccacggactgctgagggcgtgctggctgcccgaacagtgtctatcagcgtgcagatcataagagcatgtggcctgcaggctgcagccaaggcactcgcagagcgcgagcccgctttgcagtttagcgccacagtaggagtaaacgcctcagtgactacccacctgagtttcctgccccagggtgagcagaggcgcacacatcccgtcgcttgttcattttgcccggagttctcacatcacgtcgagttcacctgcaatctggtcacacaacattgctctggagaggcttgcttcctggccgagctgctggaattcgccgaagttatttttgccgtttatcatgagaacacaaagtcagcgtcagatattatatcgatcgaatcttgcaaagagtatctgctgggggtcgtcaaagtcccaacaaaagagctgctgatcaaacgcagtgggattaccggttggtatccgattattttgccagaggacggagggctgccccacggcctggagctgatgcaaaagattgtcggaggtctagaacatctcggctggtcctttgagaatagtctgaaggactttgtgcgtatggacgaaggagagcccgcaacggtaaccatcagcactcctaggctttggttgcctattcactgcgttctgctcgcagggcataaccatatccacaagaatacttattgttacctgcgatacaagttttatgatcatgaggctttttggacacccctcaagaaaccaaaagaaagtgtcaataagaagcagataatggttacatttaaggcctccaaacgggcagaagttaccaggggtcctagcctactatggtatttcagagaggagagacttgaaattcaagtatggagagcttatggtaatgattctgttgaacggcctcatcaaaccgattcctggattggatccgcctacgtcgaccttgctcgcttgggcgaacggtcagcacgcacattgacggtcagcggtgtataccctctgttcggcagaaacgcctctaatttgtctggagccgcactccgcgtgcatgtggtcctgtcttctctgagctcccatctagaacccactcatgagctggacagtatggattgcagttcgcacagcgaatccgagcagttgcccagacggaacgacgaagtccagctatccccgccagaagtcatcagctgccatcagaagagtcccgcatccacgcaagttccctgctccagtacaactgctgaagtcaggctcactcaagagggccctgctgaccttgacgggacctttgcagtctctatcctcgtggagcgggctatgcacctgagtcttaagggcagccctctgaccgagaggaaggtgagcatcccttcatgctgcgtgagctttgcgaccgcagatgagtccagccctgtctacacccaggttgttgagaacacggactccccaatctggaactttcagcagcaaagcagactgtctaaggagctgctactagatcctcagcagacgttagtcttcaaggtctggcataagggtgacgaggagagggtgatcggctttgcaagcgtggacctgtctcccctgctgtctgggttccagttcgtgtgcggttggtacaatattacagatttttctggggagtgtcagggccagattaaggtggcagtcagccccctggaaagcctgatacacttcaaggaagagcgccaggctcgacgaggggtggagacaagtaaaagcctcatccctatttattcgcccttctcatttcccgcttcagatacatacgccgcattcagctctcacatggctagacagactctggaccagttagctcacgcgtcgagcaaagaacttgatttttccagccccggtcgcagtgatacaacccggtcacaggcttcgagacatgaggagcacgtccaaaatatcagacgctttcatgaatccttgcatcttcaaggcgaagccccactcccctgcgatgacaagctgaccacctctccgctatcttctcagacttaa

SEQ ID NO: 187195 - DNA, 2586 bp, Artificial Sequence
  derived and/or modified sequence
gttttccggagactgttagaggaagagtcgctttttcctgcctcccaggctgcccagcggcgccggttgccggggaacgcaggcgccgtggggagggatggcgggaggatactgcttaggtgctggagacggagttgagctggtgaagaagagctcgggctcatcatgaaacaacgaaaaggccaagggtctgggggcagccgtgggcgcaaaaaaagaggtttaagtgacatttctccatctacaagcctgccacctctggttgaaggccagctacgctgttttctaaaacttactgttaatagagtcatatggaagattgcaaagcctcccacttgtgtacttgtccgagtgagatggtggggagaaacatcagatggaaccctcttttgtcccagggatgcattgcagactgaaccaaaagctgtgagaacaactacacgttacgctattcgttgtggtccaaaacagtttacctcttatctaacagatatggctgtgctggtgctggaagtaatcaccaaacttgatggtcttccaattggtagagttcagatcaatggactagctcaactttctccaacccatcaaatcaatggattttttaccattgtttcatcaacgtctaagaaacttggagaactccaggtctcacttgccctggaacctctgtcagaaacttacgacagctaccatccacttcctaccactgacatgacagaaaatgtgcttttatctaagcagggattcagagagaatactgaacccagcagtacccagtttcaggttccatcaaggcctcgcgacatacataccatcaaaattgatggaaaagagttagcagccaacagcagtagatcaaccactccgaggggaaaagaccatgtatgctttgcagagaaccctgatacaataaaggattcttcctttggactacagcacagtcttaattcaggacagagtttagagtctgtaactctgaaaggcagagctccacggaagcagatgtcccttctgaacagttctgaattccagcctcaaattagaacagttgccaagagtcacagtgactcatgcattctttcttcaaacaacctccctaccaaggatcttctttcagctctgttagaacaaggcaataaactgcgtaatgccatggtgatttctgcaatgaaatcaagcccagagaccagcatgttgttggaccaagttcatcctctattaatgaagattctcttagagcatcaacacagatcagagccttttctaggaatcggtttaaagaccacattgaagatcacctcctcccttcaactgagaatacattttggagacatgacacaaaagctgataccagagctatacagctgctattaggcagtgctgaattatcccaaggcaatttctgggatgggctaggctctcctccagattccccatctcctgggagtgatgtgtattgcatcagtgagctgaatgaccctcagtatgaccagagtcttctggagaatttattttatacagcacctaaatctgataccagcatcagtgatttcctcagtgaagaggatgatatcgtcccttctaaaaaaataagccagtcaacagctcttgccagatcatctaaggttctggagtcaagtgatcataagctgaagaagaggtcagcaggcaagagaaatagaaatttggttgaacaacagatgctctcagaaactccagaagatgcccaaacgatgacactaagtgtggatagactggcccttttgggtagaacacattcagtcagaatcatcatcgaaaccatgggagttcctccagatagtcctcagatgacccctggcaaaaaaagctatgctggtccaccacctaaggtgactacagcaaaaaagcgcactttctttgtagaatatcactttcctgtgggcttttcggaaagcggattgggaaagacagctttgatcactgaggttgttcgactcgcctccagtaaaattacagatggaagtaagagacacactggttttctgcaccttagacattctgactttggaagaatttttgaattcctaattactcatttgactttttttttttttttttttttgacatggagtctcactctttcgcccaggctggagtgtggtggcgcaatctctgctcactgcagcctccacctcccgggttcaagtgattctcccatctcagcctcctgagtagctgggattacaggcgtatgccaccacacccagctaatttttgtattttttagtagagacagggtttcaccatgttggccagggtggtctcaaacccctgaccttaagtgatccgcctgcctcggcctcccaaagtgctgggattacaggcataagccatcacgcccagccaatattttcaaggctgtgcaaccatcaccacaatctaattttagaacattttcatcccccctaaaagaaaccccatacttactagcattcgcttcgcatttccctcttcccccagccctaagcaactgctaatctttctttccctatcaatttgtccattctggatgtctcatataaatggaatcatgcaacttgt

SEQ ID NO: 187196 - DNA, 6283 bp, Artificial Sequence
  derived and/or modified sequence
aaagcgtcctgggtattgtagtgtattggagggaaggcgtcttggcgccttctcttcgcaccgttttccggagactgttagaggaagagtcgctttttcctgcctcccaggctgcccagcggcgccggttgccggggaacgcaggcgccgtggggagggatggcgggaggatactgcttaggtgctggagacggagttgagctggtgaagaagagctcgggctcatcatgaaacaacgaaaaggccaagggtctgggggcagccgtgggcgcaaaaaaagaggtttaagtgacatttctccatctacaagcctgccacctctggttgaaggccagctacgctgttttctaaaacttactgttaatagagtcatatggaagattgcaaagcctcccacttgtgtacttgtccgagtgagatggtggggagaaacatcagatggaaccctcttttgtcccagggatgcattgcagactgaaccaaaagctgtgagaacaactacacgttacgctattcgttgtggtccaaaacagtttacctcttatctaacagatatggctgtgctggtgctggaagtaatcaccaaacttgatggtcttccaattggtagagttcagatcaatggactagctcaactttctccaacccatcaaatcaatggattttttaccattgtttcatcaacgtctaagaaacttggagaactccaggtctcacttgccctggaacctctgtcagaaacttacgacagctaccatccacttcctaccactgacatgacagaaaatgtgcttttatctaagcagggattcagagagaatactgaacccagcagtacccagtttcaggttccatcaaggcctcgcgacatacataccatcaaaattgatggaaaagagttagcagccaacagcagtagatcaaccactccgaggggaaaagaccatgtatgctttgcagagaaccctgatacaataaaggattcttcctttggactacagcacagtcttaattcaggacagagtttagagtctgtaactctgaaaggcagagctccacggaagcagatgtcccttctgaacagttctgaattccagcctcaaattagaacagttgccaagagtcacagtgactcatgcattctttcttcaaacaacctccctaccaaggatcttctttcagctctgttagaacaaggcaataaactgcgtaatgccatggtgatttctgcaatgaaatcaagcccagagaccagcatgttgttggaccaagttcatcctcctattaatgaagattctcttagagcatcaacacagatcagagccttttctaggaatcggtttaaagaccacattgaagatcacctcctcccttcaactgagaatacattttggagacatgacacaaaagctgataccagagctatacagctgctattaggcagtgctgaattatcccaaggcaatttctgggatgggctaggctctcctccagattccccatctcctgggagtgatgtgtattgcatcagtgagctgaatgaccctcagtatgaccagagtcttctggagaatttattttatacagcacctaaatctgataccagcatcagtgatttcctcagtgaagaggatgatatcgtcccttctaaaaaaataagccagtcaacagctcttgccagatcatctaaggttctggagtcaagtgatcataagctgaagaagaggtcagcaggcaagagaaatagaaatttggttgaacaacagatgctctcagaaactccagaagatgcccaaacgatgacactaagtgtggatagactggcccttttgggtagaacacattcagtcagaatcatcatcgaaaccatgggagttcctccagatagtcctcagatgacccctggcaaaaaaagctatgctggtccaccacctaaggtgactacagcaaaaaagcgcactttctttgtagaatatcactttcctgtgggcttttcggaaagcggattgggaaagacagctttgatcactgaggttgttcgactcgcctccagtaaaattacagatggaaaggtgaagttccagcagcgatttgtgtttccagtacagtttggtggcccaatgatagagcactggtggaattccaacctcactttccaaatttatgtaaagaaaactccacagaaaaagccagaagtcattggatctgtgtcactttctttgcgagctgtcattcaatcagagctgctttctttcagtgatcagcttccagtgcaacaagaaaatggtcagtctccatttggccccctcaaggtaaccatggagcttattacagataacaaagatttcactggtatcaatactaagttaagtggcaacacccattataccccactttgtgctcctacaagtccaaataaggcactaccagaacttaaccaagatatgacctgtaccaaaaatccacaaaacttaaaccaaattcatgaggaaactgcaaagaaagcacagaacttggtgctccccaaccgaaagtcaccaagccctgtagcaccacatccttcaaccttcgtagctacgccagcctcccataatttagtcaatcagacaaatgggacaacaaaagagagtgctttgctgttgcatgtgctgttgatggtgccagatgggaaagattttattagtggagaatctgagaaacaatcaccatgcaatgtttatttaaattgtaaactcttcagcacagaggaagtcaccagatctgtcatcgcatggggcacaacacaaccggtctttaacttttctcaggtgattcctgtctctctgtcttccaaatacctggaaaggcttaagaacaatgtgatggtaattgaaacttggaataaggtgcggagcccaggacaggacaagctgctcgggctggtgaaacttcccctccaccagttttacatgtcattcaaagatgctaagatttctcgcctgctgctggatgcccagtacccagttgttgctgtcgacagctacatgcctgtgattgatgtgttttcaggccaccaaaatgggagtcttcgagtctttttagctatgggttcttcaaatcaaataatggcactacaaagattaaagaatgaagaaggaacactccctcccttcagccctaggccagcccatttcctggaccagccaactgcagcatctgttgctatggcagaggaccgaggaaatggactgatggagcactgctttgagatccatatagagatggttaaagggctagcccctcttcaggcaacagtctggggagaagcagattgttatgtccagtactactttccagttcaacactctcaatccagtgtgctgaaaggacctgagttccttgaaaatggaattactctgaagcccttcagaactgcaaccacactctgtgttccagatcccatctttaatagtgaacaccatcactctctcctgttgccagctgaggttccagtgcaaaggctcctactaagtgctttctctgcacagggcctcgtgcctggaggtggagtccagtttgaaatctggtgcagatactattatcctaatgtgagagaccagaaggtcgccaaaggaaccttgccattatcaaggatctgtgctatggtaaccacccagcatcgtgaggatgtgggaatacagacctttaatctccctttaacccccaggattgagaacaggaaagaattgaggaaccagtcatcaggtttactggatgtgggcctaaggtacaggcgtagtccaagaacagcagagggagttcttgctgcccgaactgtttccatctcagtccagattatcagagcctgtggtctgcaagcagcagccaaggctttggctgaacgggaacccgctctacagtttagtgccacagtcggggtcaatgcctctgtcaccactcatctctccttcctgccccagggagaacagcgccgaacccaccctgtggcctgttctttctgccctgagttctcccatcacgttgagttcacatgtaacttggtgactcagcactgtagtggagaggcctgtttcctagcagagttgttggagtttgcagaagttatttttgctgtctatcatgaaaataccaagtcagcaagtgatataatcagtattgagtcatgcaaagagtatctgcttggagtagtaaaagttccaacaaaagagctgctgatcaagagatctgggatcacaggatggtatcctatcattttaccagaagacgggggcctacctcatggcctggagctcatgcagaagatcgtgggtggtctggagctttcgatttccttcacgcatcgtggagatagagaacgggtgttggaagctgctgagcatttgggctggagctttgagaacagcctgaaagattttgtcagaatggatgaaggggagccagccactgtcaccatctccaccccaaggctgtggctgcccatccattgtgtgctgcttgctggccacaaccacattcataagaatacatattgctaccttcgctacaagttctatgatcatgaagccttttggacccctctcaagaagcctaaggaatctgtaaacaaaaagcagattatggtcactttcaaggcatccaaaagagcagaagtcaccaggggcccatcactgctttggtacttcagggaggagaggctagagatccaagtgtggcgagcttatggcaatgacagtgtggagagaccccatcagacagacagctggattggctcagcctatgtggacctggccagacttggggagaggtcagcgaggacgctaactgtcagtggtgtgtatcctctgtttggacgaaatgcttccaacctctcaggagctgccttgcgagttcatgtggttctttcctctctttcctcacaccttgagcccactcatgagctggactccatggactgcagcagccacagtgagtctgagcagctccccagaaggaatgatgaggtccagctctctccaccagaagtcatctcctgccaccagaagtctcctgcctccacccaggtcccctgcagcagcaccacagctgaagtccgcctgacgcaggagggccctgctgatttggatggaacgtttgcagtcagcatcctagtagaaagagcaatgcacttgagcttgaaagggagccccttgacagagcggaaagtatcgatacccagttgttgtgtatcctttgcaacagccgatgagtcatctcctgtatacacccaagtggttgaaaacacagattcccccatctggaattttcaacagcagtcaaggctatcaaaagagctgcttctggacccacaacaaaccctggtcttcaaagtttggcataaaggagatgaggagagggtgattggctttgcctcggtggacctctccccacttctctctggcttccagtttgtctgtggctggtacaacatcacagacttcagtggagagtgccaggggcagataaaagttgctgtctcccctttggagagtttgatacacttcaaagaagaaaggcaagcaaggcgtggagtggagacctcaaaatcactgatcccaatatacagtcccttttccttccctgcctctgatacgtatgctgcattctccagccacatggcaaggcagaccctagaccaacttgctcatgcctcctcaaaggagcttgatttctcctctcctgggagaagtgataccacaagaagccaagcatcacgccatgaagagcatgtgcagaacattcgccggtttcatgaatccctgcatcttcagggagaggcacccttgccatgtgatgacaaactgaccacatcacctttgtcctcccaaacctccattctgacttctctcaggaagaatctgagtgagcttgatcagattcagaggtacttccgccagaagctcaccaagcctttcctacccctcagccctcagactcaaacggccatctcacagcaccaggagagctgtagggaccatcttgggccaggtgccagcagcctagaccctgggagccagtgtatcctggagaaatccagtaacctggtgttgcaagtcagctccttaatcacaggtagttactgaagtaactggaagcatgaacatgcccaccaggactcccagctcccaacgattcctgagcatgagcagatagtctctgaaagcatttccacagatgtatccacaactatagattagattctggtcctctgatattagaataaagtactaaaaattgtaccgccttg

SEQ ID NO: 187197 - DNA, 6225 bp, Artificial Sequence
  derived and/or modified sequence
aaagcgtcctgggtattgtagtgtattggagggaaggcgtcttggcgccttctcttcgcaccgttttccggagactgttagaggaagagtcgctttttcctgcctcccaggctgcccagcggcgccggttgccggggaacgcaggcgccgtggggagggatggcgggaggatactgcttaggtgctggagacggagttgagctggtgaagaagagctcgggctcatcatgaaacaacgaaaaggccaagggtctgggggcagccgtgggcgcaaaaaaagaggtttaagtgacatttctccatctacaagcctgccacctctggttgaaggccagctacgctgttttctaaaacttactgttaatagagtcatatggaagattgcaaagcctcccacttgtgtacttgtccgagtgagatggtggggagaaacatcagatggaaccctcttttgtcccagggatgcattgcagactgaaccaaaagctgtgagaacaactacacgttacgctattcgttgtggtccaaaacagtttacctcttatctaacagatatggctgtgctggtgctggaagtaatcaccaaacttgatggtcttccaattggtagagttcagatcaatggactagctcaactttctccaacccatcaaatcaatggattttttaccattgtttcatcaacgtctaagaaacttggagaactccaggtctcacttgccctggaacctctgtcagaaacttacgacagctaccatccacttcctaccactgacatgacagaaaatgtgcttttatctaagcagggattcagagagaatactgaacccagcagtacccagtttcaggttccatcaaggcctcgcgacatacataccatcaaaattgatggaaaagagttagcagccaacagcagtagatcaaccactccgaggggaaaagaccatgtatgctttgcagagaaccctgatacaataaaggattcttcctttggactacagcacagtcttaattcaggacagagtttagagtctgtaactctgaaaggcagagctccacggaagcagatgtcccttctgaacagttctgaattccagcctcaaattagaacagttgccaagagtcacagtgactcatgcattctttcttcaaacaacctccctaccaaggatcttctttcagctctgttagaacaaggcaataaactgcgtaatgccatggtgatttctgcaatgaaatcaagcccagagaccagcatgttgttggaccaagttcatcctcctattaatgaagattctcttagagcatcaacacagatcagagccttttctaggaatcggtttaaagaccacattgaagatcacctcctcccttcaactgagaatacattttggagacatgacacaaaagctgataccagagctatacagctgctattaggcagtgctgaattatcccaaggcaatttctgggatgggctaggctctcctccagattccccatctcctgggagtgatgtgtattgcatcagtgagctgaatgaccctcagtatgaccagagtcttctggagaatttattttatacagcacctaaatctgataccagcatcagtgatttcctcagtgaagaggatgatatcgtcccttctaaaaaaataagccagtcaacagctcttgccagatcatctaaggttctggagtcaagtgatcataagctgaagaagaggtcagcaggcaagagaaatagaaatttggttgaacaacagatgctctcagaaactccagaagatgcccaaacgatgacactaagtgtggatagactggcccttttgggtagaacacattcagtcagaatcatcatcgaaaccatgggagttcctccagatagtcctcagatgacccctggcaaaaaaagctatgctggtccaccacctaaggtgactacagcaaaaaagcgcactttctttgtagaatatcactttcctgtgggcttttcggaaagcggattgggaaagacagctttgatcactgaggttgttcgactcgcctccagtaaaattacagatggaaaggtgaagttccagcagcgatttgtgtttccagtacagtttggtggcccaatgatagagcactggtggaattccaacctcactttccaaatttatgtaaagaaaactccacagaaaaagccagaagtcattggatctgtgtcactttctttgcgagctgtcattcaatcagagctgctttctttcagtgatcagcttccagtgcaacaagaaaatggtcagtctccatttggccccctcaaggtaaccatggagcttattacagataacaaagatttcactggtatcaatactaagttaagtggcaacacccattataccccactttgtgctcctacaagtccaaataaggcactaccagaacttaaccaagatatgacctgtaccaaaaatccacaaaacttaaaccaaattcatgaggaaactgcaaagaaagcacagaacttggtgctccccaaccgaaagtcaccaagccctgtagcaccacatccttcaaccttcgtagctacgccagcctcccataatttagtcaatcagacaaatgggacaacaaaagagagtgctttgctgttgcatgtgctgttgatggtgccagatgggaaagattttattagtggagaatctgagaaacaatcaccatgcaatgtttatttaaattgtaaactcttcagcacagaggaagtcaccagatctgtcatcgcatggggcacaacacaaccggtctttaacttttctcaggtgattcctgtctctctgtcttccaaatacctggaaaggcttaagaacaatgtgatggtaattgaaacttggaataaggtgcggagcccaggacaggacaagctgctcgggctggtgaaacttcccctccaccagttttacatgtcattcaaagatgctaagatttctcgcctgctgctggatgcccagtacccagttgttgctgtcgacagctacatgcctgtgattgatgtgttttcaggccaccaaaatgggagtcttcgagtctttttagctatgggttcttcaaatcaaataatggcactacaaagattaaagaatgaagaaggaacactccctcccttcagccctaggccagcccatttcctggaccagccaactgcagcatctgttgctatggcagaggaccgaggaaatggactgatggagcactgctttgagatccatatagagatggttaaagggctagcccctcttcaggcaacagtctggggagaagcagattgttatgtccagtactactttccagttcaacactctcaatccagtgtgctgaaaggacctgagttccttgaaaatggaattactctgaagcccttcagaactgcaaccacactctgtgttccagatcccatctttaatagtgaacaccatcactctctcctgttgccagctgaggttccagtgcaaaggctcctactaagtgctttctctgcacagggcctcgtgcctggaggtggagtccagtttgaaatctggtgcagatactattatcctaatgtgagagaccagaaggtcgccaaaggaaccttgccattatcaaggatctgtgctatggtaaccacccagcatcgtgaggatgtgggaatacagacctttaatctccctttaacccccaggattgagaacaggaaagaattgaggaaccagtcatcaggtttactggatgtgggcctaaggtacaggcgtagtccaagaacagcagagggagttcttgctgcccgaactgtttccatctcagtccagattatcagagcctgtggtctgcaagcagcagccaaggctttggctgaacgggaacccgctctacagtttagtgccacagtcggggtcaatgcctctgtcaccactcatctctccttcctgccccagggagaacagcgccgaacccaccctgtggcctgttctttctgccctgagttctcccatcacgttgagttcacatgtaacttggtgactcagcactgtagtggagaggcctgtttcctagcagagttgttggagtttgcagaagttatttttgctgtctatcatgaaaataccaagtcagcaagtgatataatcagtattgagtcatgcaaagagtatctgcttggagtagtaaaagttccaacaaaagagctgctgatcaagagatctgggatcacaggatggtatcctatcattttaccagaagacgggggcctacctcatggcctggagctcatgcagaagatcgtgggtggtctggagcatttgggctggagctttgagaacagcctgaaagattttgtcagaatggatgaaggggagccagccactgtcaccatctccaccccaaggctgtggctgcccatccattgtgtgctgcttgctggccacaaccacattcataagaatacatattgctaccttcgctacaagttctatgatcatgaagccttttggacccctctcaagaagcctaaggaatctgtaaacaaaaagcagattatggtcactttcaaggcatccaaaagagcagaagtcaccaggggcccatcactgctttggtacttcagggaggagaggctagagatccaagtgtggcgagcttatggcaatgacagtgtggagagaccccatcagacagacagctggattggctcagcctatgtggacctggccagacttggggagaggtcagcgaggacgctaactgtcagtggtgtgtatcctctgtttggacgaaatgcttccaacctctcaggagctgccttgcgagttcatgtggttctttcctctctttcctcacaccttgagcccactcatgagctggactccatggactgcagcagccacagtgagtctgagcagctccccagaaggaatgatgaggtccagctctctccaccagaagtcatctcctgccaccagaagtctcctgcctccacccaggtcccctgcagcagcaccacagctgaagtccgcctgacgcaggagggccctgctgatttggatggaacgtttgcagtcagcatcctagtagaaagagcaatgcacttgagcttgaaagggagccccttgacagagcggaaagtatcgatacccagttgttgtgtatcctttgcaacagccgatgagtcatctcctgtatacacccaagtggttgaaaacacagattcccccatctggaattttcaacagcagtcaaggctatcaaaagagctgcttctggacccacaacaaaccctggtcttcaaagtttggcataaaggagatgaggagagggtgattggctttgcctcggtggacctctccccacttctctctggcttccagtttgtctgtggctggtacaacatcacagacttcagtggagagtgccaggggcagataaaagttgctgtctcccctttggagagtttgatacacttcaaagaagaaaggcaagcaaggcgtggagtggagacctcaaaatcactgatcccaatatacagtcccttttccttccctgcctctgatacgtatgctgcattctccagccacatggcaaggcagaccctagaccaacttgctcatgcctcctcaaaggagcttgatttctcctctcctgggagaagtgataccacaagaagccaagcatcacgccatgaagagcatgtgcagaacattcgccggtttcatgaatccctgcatcttcagggagaggcacccttgccatgtgatgacaaactgaccacatcacctttgtcctcccaaacctccattctgacttctctcaggaagaatctgagtgagcttgatcagattcagaggtacttccgccagaagctcaccaagcctttcctacccctcagccctcagactcaaacggccatctcacagcaccaggagagctgtagggaccatcttgggccaggtgccagcagcctagaccctgggagccagtgtatcctggagaaatccagtaacctggtgttgcaagtcagctccttaatcacaggtagttactgaagtaactggaagcatgaacatgcccaccaggactcccagctcccaacgattcctgagcatgagcagatagtctctgaaagcatttccacagatgtatccacaactatagattagattctggtcctctgatattagaataaagtactaaaaattgtaccgcctt

SEQ ID NO: 187198 - DNA, 5892 bp, Artificial Sequence
  derived and/or modified sequence
atgaagcagagaaagggccagggcagcggcggcagcagaggcagaaagaagagaggcctgagcgacatcagccccagcaccagcctgccccccctggtggagggccagctgagatgcttcctgaagctgaccgtgaacagagtgatctggaagatcgccaagccccccacctgcgtgctggtgagagtgagatggtggggcgagaccagcgacggcaccctgttctgccccagagacgccctgcagaccgagcccaaggccgtgagaaccaccaccagatacgccatcagatgcggccccaagcagttcaccagctacctgaccgacatggccgtgctggtgctggaggtgatcaccaagctggacggcctgcccatcggcagagtgcagatcaacggcctggcccagctgagccccacccaccagatcaacggcttcttcaccatcgtgagcagcaccagcaagaagctgggcgagctgcaggtgagcctggccctggagcccctgagcgagacctacgacagctaccaccccctgcccaccaccgacatgaccgagaacgtgctgctgagcaagcagggcttcagagagaacaccgagcccagcagcacccagttccaggtgcccagcagacccagagacatccacaccatcaagatcgacggcaaggagctggccgccaacagcagcagaagcaccacccccagaggcaaggaccacgtgtgcttcgccgagaaccccgacaccatcaaggacagcagcttcggcctgcagcacagcctgaacagcggccagagcctggagagcgtgaccctgaagggcagagcccccagaaagcagatgagcctgctgaacagcagcgagttccagccccagatcagaaccgtggccaagagccacagcgacagctgcatcctgagcagcaacaacctgcccaccaaggacctgctgagcgccctgctggagcagggcaacaagctgagaaacgccatggtgatcagcgccatgaagagcagccccgagaccagcatgctgctggaccaggtgcacccccccatcaacgaggacagcctgagagccagcacccagatcagagccttcagcagaaacagattcaaggaccacatcgaggaccacctgctgcccagcaccgagaacaccttctggagacacgacaccaaggccgacaccagagccatccagctgctgctgggcagcgccgagctgagccagggcaacttctgggacggcctgggcagcccccccgacagccccagccccggcagcgacgtgtactgcatcagcgagctgaacgacccccagtacgaccagagcctgctggagaacctgttctacaccgcccccaagagcgacaccagcatcagcgacttcctgagcgaggaggacgacatcgtgcccagcaagaagatcagccagagcaccgccctggccagaagcagcaaggtgctggagagcagcgaccacaagctgaagaagagaagcgccggcaagagaaacagaaacctggtggagcagcagatgctgagcgagacccccgaggacgcccagaccatgaccctgagcgtggacagactggccctgctgggcagaacccacagcgtgagaatcatcatcgagaccatgggcgtgccccccgacagcccccagatgacccccggcaagaagagctacgccggccccccccccaaggtgaccaccgccaagaagagaaccttcttcgtggagtaccacttccccgtgggcttcagcgagagcggcctgggcaagaccgccctgatcaccgaggtggtgagactggccagcagcaagatcaccgacggcaaggtgaagttccagcagagattcgtgttccccgtgcagttcggcggccccatgatcgagcactggtggaacagcaacctgaccttccagatctacgtgaagaagaccccccagaagaagcccgaggtgatcggcagcgtgagcctgagcctgagagccgtgatccagagcgagctgctgagcttcagcgaccagctgcccgtgcagcaggagaacggccagagccccttcggccccctgaaggtgaccatggagctgatcaccgacaacaaggacttcaccggcatcaacaccaagctgagcggcaacacccactacacccccctgtgcgcccccaccagccccaacaaggccctgcccgagctgaaccaggacatgacctgcaccaagaacccccagaacctgaaccagatccacgaggagaccgccaagaaggcccagaacctggtgctgcccaacagaaagagccccagccccgtggccccccaccccagcaccttcgtggccacccccgccagccacaacctggtgaaccagaccaacggcaccaccaaggagagcgccctgctgctgcacgtgctgctgatggtgcccgacggcaaggacttcatcagcggcgagagcgagaagcagagcccctgcaacgtgtacctgaactgcaagctgttcagcaccgaggaggtgaccagaagcgtgatcgcctggggcaccacccagcccgtgttcaacttcagccaggtgatccccgtgagcctgagcagcaagtacctggagagactgaagaacaacgtgatggtgatcgagacctggaacaaggtgagaagccccggccaggacaagctgctgggcctggtgaagctgcccctgcaccagttctacatgagcttcaaggacgccaagatcagcagactgctgctggacgcccagtaccccgtggtggccgtggacagctacatgcccgtgatcgacgtgttcagcggccaccagaacggcagcctgagagtgttcctggccatgggcagcagcaaccagatcatggccctgcagagactgaagaacgaggagggcaccctgccccccttcagccccagacccgcccacttcctggaccagcccaccgccgccagcgtggccatggccgaggacagaggcaacggcctgatggagcactgcttcgagatccacatcgagatggtgaagggcctggcccccctgcaggccaccgtgtggggcgaggccgactgctacgtgcagtactacttccccgtgcagcacagccagagcagcgtgctgaagggccccgagttcctggagaacggcatcaccctgaagcccttcagaaccgccaccaccctgtgcgtgcccgaccccatcttcaacagcgagcaccaccacagcctgctgctgcccgccgaggtgcccgtgcagagactgctgctgagcgccttcagcgcccagggcctggtgcccggcggcggcgtgcagttcgagatctggtgcagatactactaccccaacgtgagagaccagaaggtggccaagggcaccctgcccctgagcagaatctgcgccatggtgaccacccagcacagagaggacgtgggcatccagaccttcaacctgcccctgacccccagaatcgagaacagaaaggagctgagaaaccagagcagcggcctgctggacgtgggcctgagatacagaagaagccccagaaccgccgagggcgtgctggccgccagaaccgtgagcatcagcgtgcagatcatcagagcctgcggcctgcaggccgccgccaaggccctggccgagagagagcccgccctgcagttcagcgccaccgtgggcgtgaacgccagcgtgaccacccacctgagcttcctgccccagggcgagcagagaagaacccaccccgtggcctgcagcttctgccccgagttcagccaccacgtggagttcacctgcaacctggtgacccagcactgcagcggcgaggcctgcttcctggccgagctgctggagttcgccgaggtgatcttcgccgtgtaccacgagaacaccaagagcgccagcgacatcatcagcatcgagagctgcaaggagtacctgctgggcgtggtgaaggtgcccaccaaggagctgctgatcaagagaagcggcatcaccggctggtaccccatcatcctgcccgaggacggcggcctgccccacggcctggagctgatgcagaagatcgtgggcggcctggagctgagcatcagcttcacccacagaggcgacagagagagagtgctggaggccgccgagcacctgggctggagcttcgagaacagcctgaaggacttcgtgagaatggacgagggcgagcccgccaccgtgaccatcagcacccccagactgtggctgcccatccactgcgtgctgctggccggccacaaccacatccacaagaacacctactgctacctgagatacaagttctacgaccacgaggccttctggacccccctgaagaagcccaaggagagcgtgaacaagaagcagatcatggtgaccttcaaggccagcaagagagccgaggtgaccagaggccccagcctgctgtggtacttcagagaggagagactggagatccaggtgtggagagcctacggcaacgacagcgtggagagaccccaccagaccgacagctggatcggcagcgcctacgtggacctggccagactgggcgagagaagcgccagaaccctgaccgtgagcggcgtgtaccccctgttcggcagaaacgccagcaacctgagcggcgccgccctgagagtgcacgtggtgctgagcagcctgagcagccacctggagcccacccacgagctggacagcatggactgcagcagccacagcgagagcgagcagctgcccagaagaaacgacgaggtgcagctgagcccccccgaggtgatcagctgccaccagaagagccccgccagcacccaggtgccctgcagcagcaccaccgccgaggtgagactgacccaggagggccccgccgacctggacggcaccttcgccgtgagcatcctggtggagagagccatgcacctgagcctgaagggcagccccctgaccgagagaaaggtgagcatccccagctgctgcgtgagcttcgccaccgccgacgagagcagccccgtgtacacccaggtggtggagaacaccgacagccccatctggaacttccagcagcagagcagactgagcaaggagctgctgctggacccccagcagaccctggtgttcaaggtgtggcacaagggcgacgaggagagagtgatcggcttcgccagcgtggacctgagccccctgctgagcggcttccagttcgtgtgcggctggtacaacatcaccgacttcagcggcgagtgccagggccagatcaaggtggccgtgagccccctggagagcctgatccacttcaaggaggagagacaggccagaagaggcgtggagaccagcaagagcctgatccccatctacagccccttcagcttccccgccagcgacacctacgccgccttcagcagccacatggccagacagaccctggaccagctggcccacgccagcagcaaggagctggacttcagcagccccggcagaagcgacaccaccagaagccaggccagcagacacgaggagcacgtgcagaacatcagaagattccacgagagcctgcacctgcagggcgaggcccccctgccctgcgacgacaagctgaccaccagccccctgagcagccagaccagcatcctgaccagcctgagaaagaacctgagcgagctggaccagatccagagatacttcagacagaagctgaccaagcccttcctgcccctgagcccccagacccagaccgccatcagccagcaccaggagagctgcagagaccacctgggccccggcgccagcagcctggaccccggcagccagtgcatcctggagaagagcagcaacctggtgctgcaggtgagcagcctgatcaccggcagctactag

SEQ ID NO: 187199 - DNA, 5586 bp, Artificial Sequence
  derived and/or modified sequence
atgaagcagagaaagggccagggcagcggcggcagcagaggcagaaagaagagaggcctgagcgacatcagccccagcaccagcctgccccccctggtggagggccagctgagatgcttcctgaagctgaccgtgaacagagtgatctggaagatcgccaagccccccacctgcgtgctggtgagagtgagatggtggggcgagaccagcgacggcaccctgttctgccccagagacgccctgcagaccgagcccaaggccgtgagaaccaccaccagatacgccatcagatgcggccccaagcagttcaccagctacctgaccgacatggccgtgctggtgctggaggtgatcaccaagctggacggcctgcccatcggcagagtgcagatcaacggcctggcccagctgagccccacccaccagatcaacggcttcttcaccatcgtgagcagcaccagcaagaagctgggcgagctgcaggtgagcctggccctggagcccctgagcgagacctacgacagctaccaccccctgcccaccaccgacatgaccgagaacgtgctgctgagcaagcagggcttcagagagaacaccgagcccagcagcacccagttccaggtgcccagcagacccagagacatccacaccatcaagatcgacggcaaggagctggccgccaacagcagcagaagcaccacccccagaggcaaggaccacgtgtgcttcgccgagaaccccgacaccatcaaggacagcagcttcggcctgcagcacagcctgaacagcggccagagcctggagagcgtgaccctgaagggcagagcccccagaaagcagatgagcctgctgaacagcagcgagttccagccccagatcagaaccgtggccaagagccacagcgacagctgcatcctgagcagcaacaacctgcccaccaaggacctgctgagcgccctgctggagcagggcaacaagctgagaaacgccatggtgatcagcgccatgaagagcagccccgagaccagcatgctgctggaccaggtgcacccccccatcaacgaggacagcctgagagccagcacccagatcagagccttcagcagaaacagattcaaggaccacatcgaggaccacctgctgcccagcaccgagaacaccttctggagacacgacaccaaggccgacaccagagccatccagctgctgctgggcagcgccgagctgagccagggcaacttctgggacggcctgggcagcccccccgacagccccagccccggcagcgacgtgtactgcatcagcgagctgaacgacccccagtacgaccagagcctgctggagaacctgttctacaccgcccccaagagcgacaccagcatcagcgacttcctgagcgaggaggacgacatcgtgcccagcaagaagatcagccagagcaccgccctggccagaagcagcaaggtgctggagagcagcgaccacaagctgaagaagagaagcgccggcaagagaaacagaaacctggtggagcagcagatgctgagcgagacccccgaggacgcccagaccatgaccctgagcgtggacagactggccctgctgggcagaacccacagcgtgagaatcatcatcgagaccatgggcgtgccccccgacagcccccagatgacccccggcaagaagagctacgccggccccccccccaaggtgaccaccgccaagaagagaaccttcttcgtggagtaccacttccccgtgggcttcagcgagagcggcctgggcaagaccgccctgatcaccgaggtggtgagactggccagcagcaagatcaccgacggcaaggtgaagttccagcagagattcgtgttccccgtgcagttcggcggccccatgatcgagcactggtggaacagcaacctgaccttccagatctacgtgaagaagaccccccagaagaagcccgaggtgatcggcagcgtgagcctgagcctgagagccgtgatccagagcgagctgctgagcttcagcgaccagctgcccgtgcagcaggagaacggccagagccccttcggccccctgaaggtgaccatggagctgatcaccgacaacaaggacttcaccggcatcaacaccaagctgagcggcaacacccactacacccccctgtgcgcccccaccagccccaacaaggccctgcccgagctgaaccaggacatgacctgcaccaagaacccccagaacctgaaccagatccacgaggagaccgccaagaaggcccagaacctggtgctgcccaacagaaagagccccagccccgtggccccccaccccagcaccttcgtggccacccccgccagccacaacctggtgaaccagaccaacggcaccaccaaggagagcgccctgctgctgcacgtgctgctgatggtgcccgacggcaaggacttcatcagcggcgagagcgagaagcagagcccctgcaacgtgtacctgaactgcaagctgttcagcaccgaggaggtgaccagaagcgtgatcgcctggggcaccacccagcccgtgttcaacttcagccaggtgatccccgtgagcctgagcagcaagtacctggagagactgaagaacaacgtgatggtgatcgagacctggaacaaggtgagaagccccggccaggacaagctgctgggcctggtgaagctgcccctgcaccagttctacatgagcttcaaggacgccaagatcagcagactgctgctggacgcccagtaccccgtggtggccgtggacagctacatgcccgtgatcgacgtgttcagcggccaccagaacggcagcctgagagtgttcctggccatgggcagcagcaaccagatcatggccctgcagagactgaagaacgaggagggcaccctgccccccttcagccccagacccgcccacttcctggaccagcccaccgccgccagcgtggccatggccgaggacagaggcaacggcctgatggagcactgcttcgagatccacatcgagatggtgaagggcctggcccccctgcaggccaccgtgtggggcgaggccgactgctacgtgcagtactacttccccgtgcagcacagccagagcagcgtgctgaagggccccgagttcctggagaacggcatcaccctgaagcccttcagaaccgccaccaccctgtgcgtgcccgaccccatcttcaacagcgagcaccaccacagcctgctgctgcccgccgaggtgcccgtgcagagactgctgctgagcgccttcagcgcccagggcctggtgcccggcggcggcgtgcagttcgagatctggtgcagatactactaccccaacgtgagagaccagaaggtggccaagggcaccctgcccctgagcagaatctgcgccatggtgaccacccagcacagagaggacgtgggcatccagaccttcaacctgcccctgacccccagaatcgagaacagaaaggagctgagaaaccagagcagcggcctgctggacgtgggcctgagatacagaagaagccccagaaccgccgagggcgtgctggccgccagaaccgtgagcatcagcgtgcagatcatcagagcctgcggcctgcaggccgccgccaaggccctggccgagagagagcccgccctgcagttcagcgccaccgtgggcgtgaacgccagcgtgaccacccacctgagcttcctgccccagggcgagcagagaagaacccaccccgtggcctgcagcttctgccccgagttcagccaccacgtggagttcacctgcaacctggtgacccagcactgcagcggcgaggcctgcttcctggccgagctgctggagttcgccgaggtgatcttcgccgtgtaccacgagaacaccaagagcgccagcgacatcatcagcatcgagagctgcaaggagtacctgctgggcgtggtgaaggtgcccaccaaggagctgctgatcaagagaagcggcatcaccggctggtaccccatcatcctgcccgaggacggcggcctgccccacggcctggagctgatgcagaagatcgtgggcggcctggagcacctgggctggagcttcgagaacagcctgaaggacttcgtgagaatggacgagggcgagcccgccaccgtgaccatcagcacccccagactgtggctgcccatccactgcgtgctgctggccggccacaaccacatccacaagaacacctactgctacctgagatacaagttctacgaccacgaggccttctggacccccctgaagaagcccaaggagagcgtgaacaagaagcagatcatggtgaccttcaaggccagcaagagagccgaggtgaccagaggccccagcctgctgtggtacttcagagaggagagactggagatccaggtgtggagagcctacggcaacgacagcgtggagagaccccaccagaccgacagctggatcggcagcgcctacgtggacctggccagactgggcgagagaagcgccagaaccctgaccgtgagcggcgtgtaccccctgttcggcagaaacgccagcaacctgagcggcgccgccctgagagtgcacgtggtgctgagcagcctgagcagccacctggagcccacccacgagctggacagcatggactgcagcagccacagcgagagcgagcagctgcccagaagaaacgacgaggtgcagctgagcccccccgaggtgatcagctgccaccagaagagccccgccagcacccaggtgccctgcagcagcaccaccgccgaggtgagactgacccaggagggccccgccgacctggacggcaccttcgccgtgagcatcctggtggagagagccatgcacctgagcctgaagggcagccccctgaccgagagaaaggtgagcatccccagctgctgcgtgagcttcgccaccgccgacgagagcagccccgtgtacacccaggtggtggagaacaccgacagccccatctggaacttccagcagcagagcagactgagcaaggagctgctgctggacccccagcagaccctggtgttcaaggtgtggcacaagggcgacgaggagagagtgatcggcttcgccagcgtggacctgagccccctgctgagcggcttccagttcgtgtgcggctggtacaacatcaccgacttcagcggcgagtgccagggccagatcaaggtggccgtgagccccctggagagcctgatccacttcaaggaggagagacaggccagaagaggcgtggagaccagcaagagcctgatccccatctacagccccttcagcttccccgccagcgacacctacgccgccttcagcagccacatggccagacagaccctggaccagctggcccacgccagcagcaaggagctggacttcagcagccccggcagaagcgacaccaccagaagccaggccagcagacacgaggagcacgtgcagaacatcagaagattccacgagagcctgcacctgcagggcgaggcccccctgccctgcgacgacaagctgaccaccagccccctgagcagccagacctag

SEQ ID NO: 187200 - protein, 368 aa, Artificial Sequence
  derived and/or modified sequence
MCSLPRGFEPQAPEDLAQRSLVELREMLKRQERLLRNEKFICKLPDKGKKIFDSFAKLKAAIAECEEVRRKSELFNPVSLDCKLRQKAIAEVDVGTDKAQNSDPILDTSSLVPGCSSVDNIKSSQTSQNQGLGRPTLEGDEETSEVEYTVNKGPASSNRDRVPPSSEASEHHPRHRVSSQAEDTSSSFDNLFIDRLQRITIADQGEQQSEENASTKNLTGLSSGTEKKPHYMEVLEMRAKNPVPQLRKFKTNVLPFRQNDSSSHCQKSGSPISSEERRRRDKQHLDDITAARLLPLHHMPTQLLSIEESLALQKQQKQNYEEMQAKLAAQKLAERLNIKMRSYNPEGESSGRYREVRDEDDDWSSDEF

SEQ ID NO: 187201 - protein, 363 aa, Artificial Sequence
  derived and/or modified sequence
MCSLPRGFEPQAPEDLAQRSLVELREMLKRQERLLRNEKFICKLPDKGKKIFDSFAKLKAAIAECEEVRRKSELFNPVSLDCKLRQKAIAEVDVGTDKAQNSDPILDTSSLVPGCSSVDNIKSSQTSQNQGLGRPTLEGDEETSEVEYTVNKGPASSNRDRVPPSSEASEHHPRHRVSSQAEDTSSSFDNLFIDRLQRITIADQGEQQSEENASTKNLTGLSSGTEKKPHYMEVLEMRAKNPVPQLRKFKTNVLPFRQNDSSSHCQKSGSPISSEERRRRDKQHLDDITAARLLPLHHMPTQLLSIEESLALQKQQKQNYEERPFYSPQYRSSMNLLSLAAAAKDTRGSKSGKMGSLALLTKL

SEQ ID NO: 187202 - DNA, 1107 bp, Artificial Sequence
  derived and/or modified sequence
atgtgctccttacctcgcggatttgagcctcaggccccagaagatctagctcagcggtcacttgttgagctgcgcgaaatgctgaaacgccaggaaaggttgttacggaacgaaaaattcatatgtaaactgccggacaaaggtaagaagattttcgactctttcgccaaactgaaggcagctattgcagagtgtgaggaagtgagacggaagtcggagctgttcaatccagtgagccttgactgtaaactaagacagaaagcaatcgctgaagtggacgttggtacggacaaagcccaaaactctgatcccatcttggacacttcctccttggtgccaggctgttcctctgtcgacaatataaagagtagtcagacttcccaaaaccagggattggggcggcctacgcttgaaggcgacgaagagacctccgaagtagaatacaccgtaaacaaaggacccgcctcttctaatcgagaccgagtgcctcccagctcagaagcgagtgagcaccatccacgccatcgtgtgtcttctcaggccgaagacactagtagctcttttgacaatctcttcatcgatagactacagagaattactatcgccgaccaaggagagcagcaaagtgaagaaaacgctagcactaagaacctgaccggcttgagctcaggcacagagaagaaacctcattatatggaggttctggaaatgagggccaagaaccctgtaccccagctgagaaagtttaagactaatgtgttgccattccgccagaacgactcctcatcgcattgccaaaaatccgggtcccctataagtagcgaagaacgacgtaggagggacaagcagcacctcgatgacattactgctgcccgcctcttacctctgcatcacatgcctacccagctcctctccatagaggaaagtctggccctgcagaagcaacagaagcagaattacgaggagatgcaagccaaactcgcagcacagaaactggcagagcgtctgaatatcaagatgaggtcttacaatccagagggagagtccagcggacgctacagggaagtgcgtgacgaagatgacgactggtcctctgacgaattttag

SEQ ID NO: 187203 - DNA, 1092 bp, Artificial Sequence
  derived and/or modified sequence
atgtgtagtctgcctagaggctttgagccccaggcccccgaggacctggctcagagatcgctggtagagcttagagagatgctcaagcgtcaggagagattgctgaggaatgagaagtttatctgcaagctcccagacaaaggcaagaagattttcgatagtttcgccaagctcaaggcggcaatcgccgagtgcgaggaagttcgtaggaagtccgaactatttaatcccgtcagcctcgattgcaagctgcggcaaaaggcgatcgccgaggtggacgttggaacagataaagcccagaatagcgacccgatcctggacacttccagcctggtgcccggatgtagcagcgtggataatatcaagtctagccagacatctcagaatcaggggctggggcgaccaactctcgagggggacgaggaaacatcagaggtggaatacaccgtgaacaaggggccagcctcctcaaatagggatagggtgcccccttccagtgaagcctcggaacaccacccaagacaccgcgtgagttcccaggccgaggacacgtccagctcctttgataacctgttcattgatcgactacagcgcataaccatcgctgatcagggagagcaacagagcgaagaaaatgcttctacgaagaatctcacagggctgtcttccggcaccgagaagaagccccactatatggaggtcctcgaaatgcgagccaaaaacccggttcctcagctgcgaaaatttaagactaacgttctgcccttcaggcaaaacgactccagttcccactgccaaaagagcggcagcccaatttcctccgaggaacgcagacgccgggacaagcaacatctggatgatatcacagctgctagactgcttccattgcaccatatgccaacgcagttgctgtccatagaggagtctctggccctgcagaagcagcagaagcagaactacgaagagagacctttctactctcctcagtaccgctcatccatgaacttgcttagcctggcagccgctgccaaggatacacgcggctccaagtccggaaaaatggggtcccttgccctcctgaccaaattgtag

SEQ ID NO: 187204 - DNA, 1107 bp, Artificial Sequence
  derived and/or modified sequence
atgtgcagcctgccccggggctttgagccccaggcccctgaggacctggcccagaggagcctggtggagctgcgggagatgctgaagaggcaggagcggctgctgagaaatgagaagttcatctgcaagctgcctgacaagggcaagaagatctttgacagctttgccaagctgaaggccgccatcgccgagtgtgaggaggtgcggaggaagtctgagctgttcaaccctgtgtccctggactgcaagctgcggcagaaggccatcgccgaggtggatgtgggcacagacaaggcccagaacagcgaccccatcctggacaccagcagcctggtgcccggctgcagctctgtggacaacatcaagagcagccagaccagccagaaccagggcctgggccggcccaccctggagggagatgaggagaccagcgaggtggagtacacagtgaacaagggccctgccagcagcaacagagacagagtgccccccagcagcgaggccagcgagcaccaccccaggcaccgggtgagcagccaggccgaggacaccagcagcagctttgacaacctcttcatcgaccggctgcagaggatcaccatcgctgaccagggcgagcagcagagtgaagaaaatgccagcaccaagaacctgaccggcctgagcagcggcacagagaagaagccccactacatggaggtgctggagatgagggccaagaaccctgtgccccagctgaggaagttcaagaccaacgtgctgcccttccggcagaatgacagcagcagccactgccagaagagcggcagccccatcagcagcgaggagaggagaagaagagacaagcagcacctggatgacatcacagctgcccggctgctgcccctgcaccacatgcccacccagctgctgagcattgaggagagcctggccctgcagaagcagcagaagcagaactatgaggagatgcaggccaagctggccgcccagaagctggccgagcggctgaacatcaagatgaggagctacaaccctgagggggagagcagcggccgctaccgggaggtgagagatgaagatgatgactggagcagtgatgagttctag

SEQ ID NO: 187205 - DNA, 1092 bp, Artificial Sequence
  derived and/or modified sequence
atgtgcagcctgccccggggctttgagccccaggcccctgaggacctggcccagaggagcctggtggagctgcgggagatgctgaagaggcaggagcggctgctgagaaatgagaagttcatctgcaagctgcctgacaagggcaagaagatctttgacagctttgccaagctgaaggccgccatcgccgagtgtgaggaggtgcggaggaagtctgagctgttcaaccctgtgtccctggactgcaagctgcggcagaaggccatcgccgaggtggatgtgggcacagacaaggcccagaacagcgaccccatcctggacaccagcagcctggtgcccggctgcagctctgtggacaacatcaagagcagccagaccagccagaaccagggcctgggccggcccaccctggagggagatgaggagaccagcgaggtggagtacacagtgaacaagggccctgccagcagcaacagagacagagtgccccccagcagcgaggccagcgagcaccaccccaggcaccgggtgagcagccaggccgaggacaccagcagcagctttgacaacctcttcatcgaccggctgcagaggatcaccatcgctgaccagggcgagcagcagagtgaagaaaatgccagcaccaagaacctgaccggcctgagcagcggcacagagaagaagccccactacatggaggtgctggagatgagggccaagaaccctgtgccccagctgaggaagttcaagaccaacgtgctgcccttccggcagaatgacagcagcagccactgccagaagagcggcagccccatcagcagcgaggagaggagaagaagagacaagcagcacctggatgacatcacagctgcccggctgctgcccctgcaccacatgcccacccagctgctgagcattgaggagagcctggccctgcagaagcagcagaagcagaactatgaggagcggcccttctacagcccccagtaccgcagctccatgaacctgctgagcctggccgccgccgccaaggacacccggggcagcaagagcggcaagatgggcagcctggccctgctgaccaagctgtag

SEQ ID NO: 187206 - DNA, 4199 bp, Artificial Sequence
  derived and/or modified sequence
aacgctcctgcggacgcccccttctcccagtccgtgtttgtttccggaatttcaataaagctcgattcggctcgaagaagaccccgttcttccgggaaaatggcgactcccgctcgtgccccggagtcaccgccgtccgcggatccggcgctagtagcggggcctgccgaggaagccgagtgcccgccgccgcgccagcctcagcccgcgcagaatgtgctcgctgccccgcggcttcgagccccaagctcccgaggacttggcgcagcggagtttggtggagctgcgggaaatgttgaagcgccaggagagacttttgcgcaacgaaaaattcatttgcaaattgcccgacaaaggtaaaaagatctttgactcttttgccaaactgaaagctgccattgcagaatgtgaagaagttagaagaaaaagtgaactgtttaaccctgttagtttagactgtaagctaaggcaaaaagcaattgcagaagttgatgtgggtacagataaggcccagaattctgacccgatacttgatacttcatcactagttcctggatgttcctctgtagataacatcaagtcatctcaaacctcacaaaaccagggacttggacgtcctactcttgaaggtgatgaagagacttcagaggttgagtacacagtgaataagggcccagcttccagcaatagagacagggtaccaccttcatctgaagctagtgagcatcacccgcggcatcgtgtttcaagtcaagcggaagatacttccagcagctttgacaacctgtttattgacaggttacagaggatcaccattgcggaccaaggtgaacaacagtcagaagaaaacgcaagtactaagaacttgacaggcctttccagtgggactgagaagaaacctcattacatggaagtgctagaaatgcgagccaaaaacccagtgccccagctgcgtaaatttaaaaccaatgtgttaccttttcgacaaaatgattcatctagtcattgccagaagagtgggtctcctatttcctcagaagagcggcggcgcagggataagcagcatcttgatgacatcacagcagctcggcttctaccacttcaccatatgcccacgcagctgctctccatagaagaatccttggcacttcagaaacagcagaaacagaattatgaggagatgcaagcaaagctcgcagcgcaaaaattagctgaaagactgaatattaaaatgcggagttataatccagaaggggagtcttcagggagataccgagaagtaagggatgaagatgacgattggtcctctgatgaattctgaagataatctcctaaatcactgacgttgagatgtcatcatcttacatcagactttctaactagtatcaagatcagtgtcagatattgttgagggaagtaattttataaagttacacaaaggtagttataaaaaaagcccagtttgtctttcagaaggtgactttcatgtgcttgaaaagtttaatatttgaatattgtgtttaaccacatggtattaaaattttgcaatatattgtgtattggtctgatattttagtatatagtagaacatactttttttttctttaagccaaatgaaaagaggtaactttgcttttttcctttttcttacctatcaaatagcatttattacatgtctttcagtgaaatacttagttgttccaggcacctaaaatcaattaggaagacatagttcccttcttttttgggtaatgaagggagcagtctaaagaattgtatgcatgtttgcatggggttattgagacattggatgtgaaatacctaggaagacatgtatggagaatgcttaacaaatgctcttctcctttttctgtcttcccttaggaagaacgttatctctcttctgattaggaaggacttcccttttgagtagatgctggaaagtggaggttttttttgttggtttgtttgtttggttttgtgtttttttttgagatggggtcttgctctgtcgcccaggctggagtgcagtggcaggatctcggctcactgcaatctaggtggaggtctttttaaataacctcatgttacttcaggcaaatctggtacaggagaagcccaagctaactgagctgggtgaaggcttgtgcatcacctggcttgagttccttgctgtcacagatgataggttcatgtacacaacattaatgtttgataaggaaagcattttttttttgttaaaattgaattgtcagtactttacttttttccccccaaataggtatatatagactgcagaagcttcagtcccatatataaacgttcatgtcattttagaggattatatggttgtctccagagaaattaacttacattatcaaaaaattctttgtctaatatattggagtctttaaaagtgttgaagaataaaatattaattagaacaacttcaaatgctaaggtgatgttttaccgggacttaattaaatacaactttttcctttcgaaaaagactgttcacatttgcttccaggtgtaattattgctttcattccttacccccctcaagcaaatgtgaaaagtatactgacctaagattctcattagttttagttcttaaaacgaatagtaaatgatttcacagcgtaaaatttgatgttatttctggaagctggatgatatggaagagttcatgtgcctggacacacagttccctgtaatcctgccatctagggagataaactctgttaacattttgatgttgtgtttttgcttatttttctatgcatagttatgcatttatattctcaaaaatgaaatcataatgtacattgctttgtagtctgctctatatattgtcaatatgttcccatattaaatattttgctttttagacagctgtaggatattttatttcatgggtataccataactttaagatttatttcctattcagcaatttgattatgtattataatgtaatctgtaaatagtgatatgattaacatcttaatcacatccatagaaaatgacttatttccagaagataccgctctaaaaatgaaattgttaggtgaaagtgtttttgagaatttttatatatattactcactgcagagatcatgttcatttacattcccattagcaatatatccaatgctcagaattgaaaattactacttaaaatctttgcaaattgaataattacagaaaagggctacatttaaaatttgtatttgtttttcttacttagtgaaggttgtgttttttttcatattcattggccatgctatattcattcttttgagaattgctcattcatattttttctgttgcttgcttggagaatttgctctttttttggcatataagttcttaagaatgtccgtcctttgtcatatattgtaactttttttagccttatttgtcatttaacatagtttgtggtatttcagtatagaagttgttttctttaggagtctacctttgtgtatgtgcttgaaagtatttttgtaatccaagaatggataaatgtccttattttcttctagtattttcttatttcacttttacacctatctttaaaaggaatttaaattttgtttatatacattaactaaatcagtacaagtttggggtgaaaaggaaatttttaatccatctcaaatgtatttggttatattatataaggtagggatttgattttatttcgaagaatttaccaattggttcagtatgtgaaaccaccatttcccctctgattagtaatgctatttttatagaatattaaattcttatgtgtcttttgtgtcttaggccaatttctgggccttctgggttttttctacactgtcaataattatcgctttaattggtgttaatatttggtagtacacaggttctcccttgttcttttaaattttgtgaaatataacttacaaataagtacttaaaacagagcttaatgggtaaagcaacagctgtgtaatcacaaactagatgcagaggaggtcttgccagcactccaaaatctctgtgtgtcccctcttgacactcactgtttcccccagagctaactatcctgacgtatggtaattctccctctgtccttttaagaattattttaccagttatgtgtataacaatatggtttacattttgctcacttttgacttatataaaaatagaataatactata

SEQ ID NO: 187207 - DNA, 1107 bp, Artificial Sequence
  derived and/or modified sequence
atgtgcagcctgccccggggcttcgagccccaggcccccgaggacctggctcagagatccctggttgagcttagagaaatgctgaaacggcaagaaaggctattgaggaacgaaaaattcatttgcaaactgcctgataaaggcaaaaagatttttgacagctttgccaagttgaaggcagccatcgctgaatgtgaagaagttaggcgcaagtccgagctgtttaacccagtctctctcgattgcaaactacgccagaaagcaatagccgaagtcgatgtgggtacagacaaggcgcagaattccgacccaatactggatacgagcagcctggtccctgggtgttcttcggtggacaacattaaaagtagccagacatcccaaaatcaaggccttggtaggcccacattagagggagatgaggaaaccagcgaagtcgaatacaccgtcaacaaagggccagccagctcaaatcgcgatagagttcctccaagcagtgaggcctctgagcaccaccctaggcatcgggtgtcatcccaggccgaggacacaagctctagcttcgacaatctgtttattgacagactgcaacgcatcacaattgctgatcagggggagcagcagtccgaggagaatgccagtaccaaaaatctgaccggactctcaagtggcacagagaaaaagccccactacatggaggtgctggagatgcgcgcaaaaaatccagtacctcaactcagaaaatttaagacaaatgttctgcccttcagacagaatgattcaagttcccactgccaaaaatccggctcgccaatctcatcagaggagagaagacgaagagacaagcaacatctcgacgatatcactgccgcacgcctgctacccttacaccatatgccaacccagctccttagcattgaggagtcactggctctgcagaaacagcagaagcagaattacgaggaaatgcaggccaaacttgccgcacagaaactagccgaacgcctcaatattaagatgagaagttacaacccggaaggggaatcttccgggcgatacagggaagtgcgggatgaagatgacgactggtcttcagatgaattttag

SEQ ID NO: 187208 - DNA, 1092 bp, Artificial Sequence
  derived and/or modified sequence
atgtgcagcctgccccggggcttcgagccccaggcccccgaggacctggctcaaaggtcgcttgtggagctgagggaaatgctgaaaaggcaagagcgcctgctcagaaatgaaaaattcatctgcaagctacctgacaaagggaaaaaaatattcgacagctttgccaaacttaaggccgccattgctgaatgcgaggaggtacggagaaaatctgaactgttcaaccccgtgagtctcgattgtaagctgaggcagaaggcaatcgcggaggttgacgtaggcactgataaggcacagaactcagaccccatactggacacgagctctttagtgccagggtgctcatcagttgacaacataaaaagcagccagactagtcagaaccaaggtctaggaagacctactctggaaggagacgaagagacgagcgaagtagaatacacagtgaacaaaggtcccgcctcttctaatagagacagagtgcccccctcaagtgaagcttcagagcaccatccgagacaccgggtaagttctcaggcagaggatactagtagcagttttgacaatctatttatcgataggttacagaggattacaatcgccgatcagggagaacagcaatccgaggagaatgccagtacaaagaatctaacggggctctcttccggtactgagaaaaaaccgcattatatggaagtgttggaaatgcgggctaagaaccctgtaccccagctgcgcaaatttaagactaacgtgctaccctttcggcagaacgacagctcatcacattgccagaagagtggttcccccatttccagcgaagagcgtaggagacgagataagcagcaccttgacgatatcaccgcagcccgtctcctgcccttgcaccatatgcccacacagctactgtctattgaggagtctctggcacttcagaaacaacaaaagcaaaactatgaagagcgccctttctattcaccgcaatacagatcctccatgaacctcttatccctggccgctgctgcaaaggatacccgagggtcaaaaagtggcaagatgggaagtctcgccctgctcaccaaactgtag

SEQ ID NO: 187209 - DNA, 1107 bp, Artificial Sequence
  derived and/or modified sequence
atgtgcagcctgccgcgaggattcgagcctcaagcacctgaggacctggctcagcgctcattggtggagctccgggagatgctaaaaaggcaggagcggctcctcagaaacgagaagttcatctgcaaactccccgacaaaggaaagaaaatttttgactcatttgcaaagttgaaagcagctatagctgagtgcgaagaggtgaggcgcaagtctgagttgttcaatcctgtcagtctggattgtaaactgaggcaaaaagcgattgccgaagttgatgttggaactgacaaggcccagaattctgacccgattctcgacacctcttccttggttcccggatgctcctcagtggataacatcaagagcagccagacctctcagaatcagggcttgggacgaccaactctggagggagatgaagaaacttccgaggtggagtacaccgttaacaagggaccagcatcatccaaccgcgatagggtccctccctctagcgaagccagtgagcatcatccgaggcacagggtttcctcccaagctgaggatacctcatctagttttgataatctctttatagacagactacagcggatcacaatcgccgatcaaggtgaacaacagtccgaggaaaacgcttccacaaaaaacctgactgggttgtcctccggcaccgagaaaaagcctcactacatggaagttttagaaatgcgagccaaaaatcctgtgccccagctgaggaaattcaaaacaaacgttctccctttcagacagaacgattcctctagtcattgccaaaaaagtggttcacccatcagcagcgaggagcggaggagaagggacaagcaacatctggatgacataaccgccgcacgcctcctgccacttcatcacatgccaacccagttgctgagcattgaagagtcactcgctctccaaaagcagcaaaaacagaactatgaggagatgcaagcgaagctggccgctcagaagcttgccgaacgcttgaacatcaaaatgcggagctataatcccgaaggagagagctcaggccgataccgcgaagttcgagacgaggacgatgattggtcctccgatgaattttag

SEQ ID NO: 187210 - DNA, 1092 bp, Artificial Sequence
  derived and/or modified sequence
atgtgttctcttcctcggggttttgaacctcaagcacctgaagacttagcccagagatcactggttgaactgcgtgagatgctcaaaagacaggagcgcctattgcgcaacgagaagttcatctgtaagttgccagacaaaggaaagaaaatttttgattcatttgcaaaactcaaggccgcaatcgctgagtgtgaagaagtgagacgaaagagcgaactgttcaatcccgtttctctggactgcaagcttcgccaaaaggccatagcagaggtcgatgtcggcaccgacaaagcccagaactcagacccgatcctcgataccagttctctggtccccggatgttcctccgttgataatatcaagagctcccaaacttcccagaaccaggggttaggacggcctactttggagggggatgaggagactagcgaagttgaatacactgtcaacaagggtccagctagctcgaaccgagatcgtgtccctccttccagtgaagcgtccgaacaccatcctaggcatagagtgtcctctcaggctgaggatacttcttcgtcttttgacaacctcttcattgacagactgcagaggattaccattgccgaccaaggagagcaacagtccgaagagaacgcgtcaacaaagaacctaactgggctaagttccgggacagagaagaagcctcactacatggaagtactcgagatgcgcgctaaaaaccctgtgcctcagctgaggaagtttaaaacgaacgtgctcccatttcgtcagaatgacagctcaagccattgccagaagagcggcagccctatatcctcagaggaacgtcggaggagagataagcagcacctggacgacattaccgccgctcggctgctacctctccatcatatgcctactcagctactgtcaatcgaggagtctctggcactccagaagcagcagaagcagaattacgaggagagacccttctactcccctcagtatcgctcttcaatgaatctgctttcattggccgcagcagcaaaagataccaggggatccaaatcggggaagatgggaagtctggctctgcttactaagctgtag

SEQ ID NO: 187211 - DNA, 1107 bp, Artificial Sequence
  derived and/or modified sequence
atgtgcagcctgcccagaggcttcgagccccaggcccccgaggacctggcccagagaagcctggtggagctgagagagatgctgaagagacaggagagactgctgagaaacgagaagttcatctgcaagctgcccgacaagggcaagaagatcttcgacagcttcgccaagctgaaggccgccatcgccgagtgcgaggaggtgagaagaaagagcgagctgttcaaccccgtgagcctggactgcaagctgagacagaaggccatcgccgaggtggacgtgggcaccgacaaggcccagaacagcgaccccatcctggacaccagcagcctggtgcccggctgcagcagcgtggacaacatcaagagcagccagaccagccagaaccagggcctgggcagacccaccctggagggcgacgaggagaccagcgaggtggagtacaccgtgaacaagggccccgccagcagcaacagagacagagtgccccccagcagcgaggccagcgagcaccaccccagacacagagtgagcagccaggccgaggacaccagcagcagcttcgacaacctgttcatcgacagactgcagagaatcaccatcgccgaccagggcgagcagcagagcgaggagaacgccagcaccaagaacctgaccggcctgagcagcggcaccgagaagaagccccactacatggaggtgctggagatgagagccaagaaccccgtgccccagctgagaaagttcaagaccaacgtgctgcccttcagacagaacgacagcagcagccactgccagaagagcggcagccccatcagcagcgaggagagaagaagaagagacaagcagcacctggacgacatcaccgccgccagactgctgcccctgcaccacatgcccacccagctgctgagcatcgaggagagcctggccctgcagaagcagcagaagcagaactacgaggagatgcaggccaagctggccgcccagaagctggccgagagactgaacatcaagatgagaagctacaaccccgagggcgagagcagcggcagatacagagaggtgagagacgaggacgacgactggagcagcgacgagttctag

SEQ ID NO: 187212 - DNA, 1092 bp, Artificial Sequence
  derived and/or modified sequence
atgtgcagcctgcccagaggcttcgagccccaggcccccgaggacctggcccagagaagcctggtggagctgagagagatgctgaagagacaggagagactgctgagaaacgagaagttcatctgcaagctgcccgacaagggcaagaagatcttcgacagcttcgccaagctgaaggccgccatcgccgagtgcgaggaggtgagaagaaagagcgagctgttcaaccccgtgagcctggactgcaagctgagacagaaggccatcgccgaggtggacgtgggcaccgacaaggcccagaacagcgaccccatcctggacaccagcagcctggtgcccggctgcagcagcgtggacaacatcaagagcagccagaccagccagaaccagggcctgggcagacccaccctggagggcgacgaggagaccagcgaggtggagtacaccgtgaacaagggccccgccagcagcaacagagacagagtgccccccagcagcgaggccagcgagcaccaccccagacacagagtgagcagccaggccgaggacaccagcagcagcttcgacaacctgttcatcgacagactgcagagaatcaccatcgccgaccagggcgagcagcagagcgaggagaacgccagcaccaagaacctgaccggcctgagcagcggcaccgagaagaagccccactacatggaggtgctggagatgagagccaagaaccccgtgccccagctgagaaagttcaagaccaacgtgctgcccttcagacagaacgacagcagcagccactgccagaagagcggcagccccatcagcagcgaggagagaagaagaagagacaagcagcacctggacgacatcaccgccgccagactgctgcccctgcaccacatgcccacccagctgctgagcatcgaggagagcctggccctgcagaagcagcagaagcagaactacgaggagagacccttctacagcccccagtacagaagcagcatgaacctgctgagcctggccgccgccgccaaggacaccagaggcagcaagagcggcaagatgggcagcctggccctgctgaccaagctgtag

SEQ ID NO: 187213 - protein, 528 aa, Artificial Sequence
  derived and/or modified sequence
MGAAASRRRALRSEAMSSVAAKVRAARAFGEYLSQSHPENRNGADHLLADAYSGHDGSPEMQPAPQNKRRLSLVSNGCYEGSLSEEPSIRKPAGEGPQPRVYTISGEPALLPSPEAEAIELAVVKGRRQRHPHHHSQPLRASPGGSREDVSRPCQSWAGSRQGSKECPGCAQLAPGPTPRAFGLDQPPLPETSGRRKKLERMYSVDRVSDDIPIRTWFPKENLFSFQTATTTMQAVFRGYAERKRRKRENDSASVIQRNFRKHLRMVGSRRVKAQTFAERRERSFSRSWSDPTPMKADTSHDSRDSSDLQSSHCTLDEAFEDLDWDTEKGLEAVACDTEGFVPPKVMLISSKVPKAEYIPTIIRRDDPSIIPILYDHEHATFEDILEEIERKLNVYHKGAKIWKMLIFCQGGPGHLYLLKNKVATFAKVEKEEDMIHFWKRLSRLMSKVNPEPNVIHIMGCYILGNPNGEKLFQNLRTLMTPYRVTFESPLELSAQGKQMIETYFDFRLYRLWKSRQHSKLLDFDDVL

SEQ ID NO: 187214 - protein, 327 aa, Artificial Sequence
  derived and/or modified sequence
MYSVDRVSDDIPIRTWFPKENLFSFQTATTTMQAVFRGYAERKRRKRENDSASVIQRNFRKHLRMVGSRRVKAQTFAERRERSFSRSWSDPTPMKADTSHDSRDSSDLQSSHCTLDEAFEDLDWDTEKGLEAVACDTEGFVPPKVMLISSKVPKAEYIPTIIRRDDPSIIPILYDHEHATFEDILEEIERKLNVYHKGAKIWKMLIFCQGGPGHLYLLKNKVATFAKVEKEEDMIHFWKRLSRLMSKVNPEPNVIHIMGCYILGNPNGEKLFQNLRTLMTPYRVTFESPLELSAQGKQMIETYFDFRLYRLWKSRQHSKLLDFDDVL

SEQ ID NO: 187215 - protein, 327 aa, Artificial Sequence
  derived and/or modified sequence
MQLGRRLDPERQALHLCSGVEGEPWKAVAGRALGGICLWVGGGARSQGEHWLPTPKGNFRKHLRMVGSRRVKAQTFAERRERSFSRSWSDPTPMKADTSHDSRDSSDLQSSHCTLDEAFEDLDWDTEKGLEAVACDTEGFVPPKVMLISSKVPKAEYIPTIIRRDDPSIIPILYDHEHATFEDILEEIERKLNVYHKGAKIWKMLIFCQGGPGHLYLLKNKVATFAKVEKEEDMIHFWKRLSRLMSKVNPEPNVIHIMGCYILGNPNGEKLFQNLRTLMTPYRVTFESPLELSAQGKQMIETYFDFRLYRLWKSRQHSKLLDFDDVL

SEQ ID NO: 187216 - DNA, 1587 bp, Artificial Sequence
  derived and/or modified sequence
atgggcgctgccgcgtcccggcgacgtgctttgagaagcgaggctatgtcaagtgtggctgctaaggtgcgggccgccagggccttcggcgagtatcttagccagagtcatcccgagaatagaaacggtgctgatcacctccttgcagatgcatactcaggacatgacggtagccccgagatgcagcccgccccccagaataagcggcggcttagtctcgtgtccaatggatgttacgaggggagtcttagcgaggagccatcaattagaaagcctgccggcgagggtccacagcctcgggtttatacaatatccggagagccggccttgctgccatcccctgaagccgaggccatcgagctggcagtggtgaagggaagacggcagcgccatccccatcatcattcacagccactgagggcgagcccggggggtagtcgggaggatgttagtcggccctgccaatcctgggccggatcacggcaggggtcaaaagaatgcccgggctgcgcacagctggctcctggccccacaccaagagcgttcggccttgaccagcccccactgccggaaacgtcgggcagacgcaagaagctagagaggatgtactctgttgaccgcgtgtcggacgacatcccgatccgcacatggttccccaaggaaaatttgtttagctttcaaacagcaacgactaccatgcaggccgtttttcggggatatgctgagcgcaaacgtcggaaacgcgagaacgacagtgcgtctgtcattcagcggaactttaggaaacacttgaggatggttggaagtcggcgagtcaaggcacagacctttgcagagagacgcgaacgatcattctcacgaagctggagtgacccaacccctatgaaagccgacacatctcatgactcaagggattcttccgacctgcagtcctcacactgcactctggacgaggctttcgaggacctggattgggacacggagaaaggtctcgaggcagtggcttgtgacactgaaggttttgtccctcccaaagttatgctgatcagttcaaaggtacccaaagcggaatacatacctacaattatcagacgggacgatcccagcatcatacccatcctgtatgatcacgaacatgctacctttgaggatatcttggaggagatcgagcgaaagctgaacgtgtatcataaaggcgccaaaatctggaaaatgctgattttttgccagggcgggcctggtcacctctatttgctcaagaataaggtcgctactttcgccaaggtcgaaaaagaagaagatatgatccatttttggaagcgactaagtcggttgatgtcaaaagtgaatcccgagcctaacgtgattcacattatgggctgctatatcttgggcaaccccaatggtgagaagctgtttcagaaccttaggaccttgatgaccccctatcgcgtcacatttgagtcaccgctggagctttctgcccagggtaagcagatgatcgagacctactttgacttcaggttgtatcgtctctggaaatcgaggcagcatagcaaactcctggattttgacgacgtgttatag

SEQ ID NO: 187217 - DNA, 984 bp, Artificial Sequence
  derived and/or modified sequence
atgtactctgtcgacagagtgtcagatgacatacccatacggacctggtttcccaaagagaacctcttctccttccagaccgcaaccactactatgcaagcagttttcaggggatacgcagagcggaaacgtaggaaaagggagaacgacagcgcatccgtcatccagcgaaactttcgaaagcatctgcggatggtagggagccgccgtgtgaaggcacagaccttcgccgaaaggagggaaagatctttttcccggtcgtggtctgatcccacaccaatgaaggctgacacgtcccacgatagcagggactcaagcgacctgcagtccagccattgtacactcgacgaagcttttgaggatcttgattgggacacggagaagggattggaagcagtcgcctgcgacacagagggattcgtcccacccaaggtaatgctgataagctccaaggttcctaaggcagaatacatcccaacgatcatcaggcgagacgacccaagcattatcccgattctttacgaccacgagcacgcaacgtttgaggacattttggaggagatcgaacgaaaactgaatgtttaccacaaaggtgccaagatttggaagatgctgattttctgtcagggcgggccaggacacctgtacctgcttaagaacaaggtggcgacattcgccaaggtagagaaggaggaagatatgatccatttctggaagagactttcaagacttatgtcaaaagtcaaccctgaaccaaacgtgattcacattatggggtgttatatcctcgggaacccaaatggggagaagttatttcaaaatctgcgcactcttatgacgccttacagggtgactttcgagtcacctctggagctctccgctcaaggtaagcagatgatcgaaacgtacttcgattttcgcctttacaggctgtggaagagcaggcagcacagtaagctgttggactttgatgatgtcctatag

SEQ ID NO: 187218 - DNA, 1587 bp, Artificial Sequence
  derived and/or modified sequence
atgggagccgctgctagtcggcgtcgtgctctgcgcagtgaggccatgtccagtgtggccgccaaagtgcgcgctgctcgcgcctttggcgagtatttgtcccagtctcatcccgagaatcggaatggtgccgatcatttgttagccgacgcctacagcggtcatgatggaagccctgagatgcagcctgccccacaaaataagagaagacttagcctcgtttcaaatgggtgctatgagggatccctgagcgaggaaccgtccattaggaaaccagctggagaaggcccccagcctagggtgtacactatttccggcgaaccagccctcctgcctagccctgaggcggaggccattgagctggctgtggtgaaaggacgtcgccaacggcacccccatcaccatagccaaccgttaagggccagccctggcggctctagagaggacgtgtcccggccttgtcagagctgggcaggatcacgccagggttctaaggaatgcccgggatgcgcacaactcgcacctggaccaaccccacgcgccttcggcctggatcagccacccctgcccgagacgtccggtcgtcggaaaaagttggagaggatgtatagtgttgatagagttagtgacgatattccaattcgcacctggtttcccaaagagaatctgtttagttttcaaaccgctactacgactatgcaggccgtctttcggggttatgctgagagaaaaaggcgaaagcgggagaacgattctgcttcagtgatccagcggaatttcagaaaacacctgagaatggtaggttcaaggcgggttaaggcgcagacattcgccgaacgacgggagaggtctttctctaggagttggagcgatccaacccccatgaaggctgatacgagtcacgactcccgagacagttctgaccttcagtcaagccactgcacattggatgaagcttttgaggatctggattgggacacagagaagggcctggaagcggtggcttgtgatacagaggggttcgtgccgcccaaggttatgctcatttcctcaaaagtgcccaaggctgaatatatacctaccattatcagacgtgacgaccccagcatcattccaatactgtacgaccatgagcacgcaactttcgaagatattctagaagaaatcgagcgcaagttgaatgtgtaccacaagggggcgaaaatctggaagatgttgattttctgtcaaggtggtcctggccacctgtatctgttgaagaataaagtagctacatttgctaaagtagagaaggaagaggatatgatccacttctggaagcgactgagtagactgatgtcaaaggtgaaccccgagccaaacgttattcacataatgggttgctacatcctcgggaacccaaatggcgagaagctgttccagaatctcagaacgcttatgactccgtatagggtcacgttcgagtcccccctggaattgagtgcacagggcaagcaaatgattgagacctatttcgacttccggttgtacaggctgtggaagagccggcagcactcaaaactgctggattttgacgatgtgctttag

SEQ ID NO: 187219 - DNA, 1587 bp, Artificial Sequence
  derived and/or modified sequence
atgggcgccgccgccagcagaagaagagccctgcggtctgaggccatgagctctgtggccgccaaggtgcgggccgcccgggcctttggagagtacctgagccagagccacccagaaaatagaaatggagctgaccacctgctggctgatgcctacagcggccatgatggcagccctgagatgcagcctgccccccagaacaagaggcggctgagcctggtgtccaatggctgctatgagggcagcctgtctgaggagcccagcatcaggaagccagctggggagggcccccagccccgggtgtacaccatctctggagagcccgccctgctgcccagccctgaggccgaggccatcgagctggccgtggtgaagggccggcggcagaggcacccccaccaccacagccagcccctgcgggccagccctgggggcagccgggaggatgtgtcccggccctgccagagctgggccggcagccggcagggcagcaaggagtgccccggctgtgcccagctggcccctggccccaccccccgggccttcggcctggaccagccccccctgcctgagaccagcggccgcaggaagaagctggagaggatgtacagcgtggacagagtgtctgatgacatccccatccgcacctggttccccaaggaaaatctcttctccttccagacagccaccaccaccatgcaggccgtgttccggggctatgcagagaggaagaggaggaagagagaaaatgacagcgccagcgtcatccagaggaacttcaggaagcacctgaggatggtgggcagccggcgggtgaaggcccagacctttgctgagcggcgggagaggagcttcagccgctcctggagcgaccccacccccatgaaggctgacaccagccatgacagccgggacagcagtgacctgcagagcagccactgcaccctggatgaggcctttgaggacctggactgggacacagagaagggcctggaggccgtggcctgtgacacagagggctttgtgccccccaaggtgatgctgatcagcagcaaggtgcccaaggccgagtacatccccaccatcatcagaagagatgaccccagcatcatccccatcctgtatgaccatgaacatgccacctttgaggacatcctggaggagattgaaaggaagctgaatgtgtaccacaagggggccaagatctggaagatgctgatcttctgccagggcggccctggccacctgtacctgctgaagaacaaggtggccacctttgccaaggtggagaaggaggaggacatgatccacttctggaagaggctgagccggctgatgagcaaggtgaaccctgagcccaacgtcatccacatcatgggctgctacatcctgggcaaccccaacggggagaagctgttccagaacctgcggaccctgatgaccccctacagagtgacctttgagagccccctggagctgagcgcccagggcaagcagatgattgagacctactttgacttccggctgtaccgcctgtggaagagccggcagcacagcaagctgctggactttgatgatgtgctgtag

SEQ ID NO: 187220 - DNA, 984 bp, Artificial Sequence
  derived and/or modified sequence
atgtacagcgtggacagagtgtctgatgacatccccatccgcacctggttccccaaggagaacctcttctccttccagacagccaccaccaccatgcaggccgtgttccggggctacgccgagaggaagaggaggaagcgggagaatgattctgccagcgtcatccagaggaacttcaggaagcacctgaggatggtgggcagcagaagagtgaaggcccagacctttgctgagcggcgggagaggagcttcagccgctcctggagcgaccccacccccatgaaggctgacaccagccatgacagccgggacagcagtgacctgcagagcagccactgcaccctggatgaggcctttgaggacctggactgggacacagagaagggcctggaggccgtggcctgtgacacagagggctttgtgccccccaaggtgatgctgatcagcagcaaggtgcccaaggccgagtacatccccaccatcatcagaagagatgaccccagcatcatccccatcctgtatgaccacgagcacgccacctttgaggacatcctggaggagattgaaaggaagctgaatgtgtaccacaagggggccaagatctggaagatgctgatcttctgccagggcggccctggccacctgtacctgctgaagaacaaggtggccacctttgccaaggtggagaaggaggaggacatgatccacttctggaagaggctgagccggctgatgagcaaggtgaaccctgagcccaacgtcatccacatcatgggctgctacatcctgggcaaccccaatggagagaagctgttccagaacctgcggaccctgatgaccccctacagagtgacctttgagagccccctggagctgagcgcccagggcaagcagatgattgagacctactttgacttccggctgtaccgcctgtggaagagccggcagcacagcaagctgctggactttgatgatgtgctgtag

SEQ ID NO: 187221 - DNA, 3640 bp, Artificial Sequence
  derived and/or modified sequence
ggttcgggcagcgctctcccgggagcggcggcacgcgcggagcgccgggtgcggccatgcggggaccgggcccgaccccgagcccgaccccgagcccaagcccgagccggagcccgagcgagaccccgagcccgagcccgagcgcgacccccggtgcggcgcggctaccccggcggaggcggcgggcgcggggcgcgctctgaggcccgggggatgcgccgccgcctcgaccatgggcgccgccgcctccaggaggagggcgctgaggagcgaggccatgtcctcggtggcggccaaagtgcgagcagcccgagcgtttggagagtacctgtcccagagtcaccctgagaaccgcaacggcgcagatcacctgctggctgatgcctactctggccacgacgggtcccccgagatgcagccggccccccagaacaagcgccgcctgtccctcgtctccaacggctgctacgagggcagcctctcagaggagcccagcattaggaagcccgcaggcgagggccctcagcctcgagtgtacaccatctctggggagcctgccctgctgcccagccctgaggcggaggccattgagctggcggtggtgaaggggcggcggcagcggcaccctcaccatcacagccagcccctgcgcgccagccctggtggcagccgggaggacgtcagcaggccctgccagagctgggcgggcagccgccagggctccaaggagtgccccggatgtgcccagctggctcctggccccacccctcgggcctttgggctggaccagccacctctgcctgagacctccggtcgccgcaagaagctggagaggatgtacagcgttgaccgtgtgtctgacgacatccctattcgtacctggttccccaaggaaaatcttttcagcttccagacagcaaccacaactatgcaagcggtgttcaggggctacgcggagaggaagcgccggaaacgggagaatgattccgcgtctgtaatccagaggaacttccgcaaacacctgcgcatggtcggcagccggagggtgaaggcccagacgttcgctgagcggcgcgagcggagcttcagccggtcctggagcgaccccacccccatgaaagccgacacttcccacgactcccgagacagcagtgacctgcagagctcccactgcacgctggacgaggccttcgaggacctggactgggacactgagaagggcctggaggctgtggcctgcgacaccgaaggcttcgtgccaccaaaggtcatgctcatttcctccaaggtgcccaaggctgagtacatccccactatcatccgccgggatgacccctccatcatccccatcctctacgaccatgagcacgcaaccttcgaggacatccttgaggagatagagaggaagctgaacgtctaccacaagggagccaagatctggaaaatgctgattttctgccagggaggtcctggacacctctatctcctcaagaacaaggtggccacctttgccaaagtggagaaggaagaggacatgattcacttctggaagcggctgagccgcctgatgagcaaagtgaacccagagccgaacgtcatccacatcatgggctgctacattctggggaaccccaatggagagaagctgttccagaacctcaggaccctcatgactccttatagggtcaccttcgagtcacccctggagctctcagcccaagggaagcagatgatcgagacgtactttgacttccggttgtatcgcctgtggaagagccgccagcactcgaagctgctggactttgacgacgtcctgtgaggggcagaggcctccgcccagtcaccatcaggccactccctctgcaccgggacctggggctgggccgcctcgtgctccccgggactgtgtggctccggtctcgcctggagccacttcagggcacctcagacgttgctcaggttccccctgtgggttccggtcctcgctgcacccgtggccgcagaggctgcagtccctgggggccgggaggatcccgccctgtggcccgtggatgctcagcggccaggcactgacctgccatgcctcgcctggaggctcagctgtgggcatccctccatggggttcatagaaataagtgcaatttctacacccccgaaacaattcaaagggaagcagcatttcttgttaactagttaagcactatgctgctagttacagtgtaggcaccccggcccagcagcccagcagcccacatgtgttcaggaccctccctgcccaccccctccctgccgtatcgatcaccagcaccagggtggcccgtgtgcgtggggccagcgtcgccgggctgcccagcctggctctgtctacactggccgagtctctgggtctgtctacactggccgagtctccgactgtctgtgctttcacttacactcctcttgccaccccccatccctgcttacttagacctcagccggcgccggacccggtaggggcagtctgggcagcaggaaggaagggcgcagcgtcccctccttcagaggaggctctgggtggggcctgctccccatccccccaagcccacccagcactctcattgctgctgttgagttcagcttttaccagcctcagtgtggaggctccatcccagcacacaggcctggggcttggcaggggcccagctggggctgggccctgggttttgagaaactcgctggcaccacagtgggcccctggacccggccgcgcagctggtggactgtaggggctcctgactgggcacaggagctcccagcttttgtccacggccagcaggatgggctgtcgtgtatatagctggggcgagggggcaggccccccttgtgcagagccaggggtctgagggcacctggctgtgttcccagctgagggagggctggggcgggggccgggcttggaacgatgtacgataccctcatagtgaccattaaacctgatcctccaccgcggccgccgcgtgggtctgtcctctcagtgctttccaggggccttcctgtgcccagcttctgggcccactcctgtgaggtcactgctgcagggccttcctgcctggacagagttggagctaggccactagaccaccccacagggcatagccagggggaccagcacaggaggggacggagaggagctgcaggagggctggggggaggctgcagtctcggaggggggcctcgccgggtctggaggggacagcagagacagcccgttccccctgccgcctgagggcaccagggagagggctgtatgtccctcacgccacactgtgtgtgcagtcagcagtgtggccacagatgggggccactctctcaacctcaggtgtcctcagggcccagaccgctgctgggcacagccaggctggctgccagctggttccctgccccgtggctgggggacagagcagcacgtatcagctgggctagggtcagggggccactggtgcgcagcctggcacagcctggcaggcttgaggcccagtgtgctgggggtggtcacacagccgtcagccacctccagctcttccagggcattctagatggggtcccgggagggggcaggttttggtgccaatttgagtgtataaagttttaggtaaatacc

SEQ ID NO: 187222 - DNA, 2914 bp, Artificial Sequence
  derived and/or modified sequence
gtgccccggatgtgcccagctggctcctggccccacccctcgggcctttgggctggaccagccacctctgcctgagacctccggtcgccgcaagaagctggagaggatgtacagcgttgaccgtgtgtctgacgacatccctattcgtacctggttccccaaggaaaatcttttcagcttccagacagcaaccacaactatgcaagcggtgttcaggggctacgcggagaggaagcgccggaaacgggagaatgattccgcgtctgtaatccagaggaacttccgcaaacacctgcgcatggtcggcagccggagggtgaaggcccagacgttcgctgagcggcgcgagcggagcttcagccggtcctggagcgaccccacccccatgaaagccgacacttcccacgactcccgagacagcagtgacctgcagagctcccactgcacgctggacgaggccttcgaggacctggactgggacactgagaagggcctggaggctgtggcctgcgacaccgaaggcttcgtgccaccaaaggtcatgctcatttcctccaaggtgcccaaggctgagtacatccccactatcatccgccgggatgacccctccatcatccccatcctctacgaccatgagcacgcaaccttcgaggacatccttgaggagatagagaggaagctgaacgtctaccacaagggagccaagatctggaaaatgctgattttctgccagggaggtcctggacacctctatctcctcaagaacaaggtggccacctttgccaaagtggagaaggaagaggacatgattcacttctggaagcggctgagccgcctgatgagcaaagtgaacccagagccgaacgtcatccacatcatgggctgctacattctggggaaccccaatggagagaagctgttccagaacctcaggaccctcatgactccttatagggtcaccttcgagtcacccctggagctctcagcccaagggaagcagatgatcgagacgtactttgacttccggttgtatcgcctgtggaagagccgccagcactcgaagctgctggactttgacgacgtcctgtgaggggcagaggcctccgcccagtcaccatcaggccactccctctgcaccgggacctggggctgggccgcctcgtgctccccgggactgtgtggctccggtctcgcctggagccacttcagggcacctcagacgttgctcaggttccccctgtgggttccggtcctcgctgcacccgtggccgcagaggctgcagtccctgggggccgggaggatcccgccctgtggcccgtggatgctcagcggccaggcactgacctgccatgcctcgcctggaggctcagctgtgggcatccctccatggggttcatagaaataagtgcaatttctacacccccgaaacaattcaaagggaagcagcatttcttgttaactagttaagcactatgctgctagttacagtgtaggcaccccggcccagcagcccagcagcccacatgtgttcaggaccctccctgcccaccccctccctgccgtatcgatcaccagcaccagggtggcccgtgtgcgtggggccagcgtcgccgggctgcccagcctggctctgtctacactggccgagtctctgggtctgtctacactggccgagtctccgactgtctgtgctttcacttacactcctcttgccaccccccatccctgcttacttagacctcagccggcgccggacccggtaggggcagtctgggcagcaggaaggaagggcgcagcgtcccctccttcagaggaggctctgggtggggcctgctccccatccccccaagcccacccagcactctcattgctgctgttgagttcagcttttaccagcctcagtgtggaggctccatcccagcacacaggcctggggcttggcaggggcccagctggggctgggccctgggttttgagaaactcgctggcaccacagtgggcccctggacccggccgcgcagctggtggactgtaggggctcctgactgggcacaggagctcccagcttttgtccacggccagcaggatgggctgtcgtgtatatagctggggcgagggggcaggccccccttgtgcagagccaggggtctgagggcacctggctgtgttcccagctgagggagggctggggcgggggccgggcttggaacgatgtacgataccctcatagtgaccattaaacctgatcctccaccgcggccgccgcgtgggtctgtcctctcagtgctttccaggggccttcctgtgcccagcttctgggcccactcctgtgaggtcactgctgcagggccttcctgcctggacagagttggagctaggccactagaccaccccacagggcatagccagggggaccagcacaggaggggacggagaggagctgcaggagggctggggggaggctgcagtctcggaggggggcctcgccgggtctggaggggacagcagagacagcccgttccccctgccgcctgagggcaccagggagagggctgtatgtccctcacgccacactgtgtgtgcagtcagcagtgtggccacagatgggggccactctctcaacctcaggtgtcctcagggcccagaccgctgctgggcacagccaggctggctgccagctggttccctgccccgtggctgggggacagagcagcacgtatcagctgggctagggtcagggggccactggtgcgcagcctggcacagcctggcaggcttgaggcccagtgtgctgggggtggtcacacagccgtcagccacctccagctcttccagggcattctagatggggtcccgggagggggcaggttttggtgccaatttgagtgtataaagttttaggtaaataccaaa

SEQ ID NO: 187223 - DNA, 672 bp, Artificial Sequence
  derived and/or modified sequence
tgccgtcaccctctcacggccctcttcagcccctggcttcctcccccaggaacttccgcaaacacctgcgcatggtcggcagccggagggtgaaggcccagacgttcgctgagcggcgcgagcggagcttcagccggtcctggagcgaccccacccccatgaaagccgacacttcccacgactcccgagacagcagtgacctgcagagctcccactgcacgctggacgaggccttcgaggacctggactgggacactgagaagggcctggaggctgtggcctgcgacaccgaaggcttcgtgccaccaaaggtcatgctcatttcctccaaggtgcccaaggctgagtacatccccactatcatccgccgggatgacccctccatcatccccatcctctacgtgagtcccgccccgggcctgcccccaacagatgccctcttgcggccccaccctgggccagcgccggcaccccaggtccccagggtgctgtggcgctgctggctctgacgcagccttgatgtggccttgtggcctgtgtctgtccccaggaccatgagcacgcaaccttcgaggacatccttggtatgtgcctcattggccttctctctgctggttccaggcctgggaggggcagacacaggtgggggtgcccctggggctggggtggggg

SEQ ID NO: 187224 - DNA, 1838 bp, Artificial Sequence
  derived and/or modified sequence
acgcgcggagcgccgggtgcggccatgcggggaccgggcccgaccccgagcccgaccccgagcccaagcccgagccggagcccgagcgagaccccgagcccgagcccgagcgcgacccccggtgcggcgcggctaccccggcggaggcggcgggcgcggggcgcgctctgaggcccgggggatgcgccgccgcctcgaccatgggcgccgccgcctccaggaggagggcgctgaggagcgaggccatgtcctcggtggcggccaaagtgcgagcagcccgagcgtttggagagtacctgtcccagagtcaccctgagaaccgcaacggcgcagatcacctgctggctgatgcctactctggccacgacgggtcccccgagatgcagccggccccccagaacaagcgccgcctgtccctcgtctccaacggctgctacgagggcagcctctcagaggagcccagcattaggaagcccgcaggcgagggccctcagcctcgagtgtacaccatctctggggagcctgccctgctgcccagccctgaggcggaggccattgagctggcggtggtgaaggggcggcggcagcggcaccctcaccatcacagccagcccctgcgcgccagccctggtggcagccgggaggacgtcagcaggccctgccagagctgggcgggcagccgccagggctccaaggagtgccccggatgtgcccagctggctcctggccccacccctcgggcctttgggctggaccagccacctctgcctgagacctccggtcgccgcaagaagctggagaggatgtacagcgttgaccgtgtgtctgacgacatccctattcgtacctggttccccaaggaaaatcttttcagcttccagacagcaaccacaactatgcaagcggtgttcaggggctacgcggagaggaagcgccggaaacgggagaatgattccgcgtctgtaatccagaggaacttccgcaaacacctgcgcatggtcggcagccggagggtgaaggcccagacgttcgctgagcggcgcgagcggagcttcagccggtcctggagcgaccccacccccatgaaagccgacacttcccacgactcccgagacagcagtgacctgcagagctcccactgcacgctggacgaggccttcgaggacctggactgggacactgagaagggcctggaggctgtggcctgcgacaccgaaggcttcgtgccaccaaaggtcatgctcatttcctccaaggtgcccaaggctgagtacatccccactatcatccgccgggatgacccctccatcatccccatcctctacgaccatgagcacgcaaccttcgaggacatccttgaggagatagagaggaagctgaacgtctaccacaagggagccaagatctggaaaatgctgattttctgccagggaggtcctggacacctctatctcctcaagaacaaggtggccacctttgccaaagtggagaaggaagaggacatgattcacttctggaagcggctgagccgcctgatgagcaaagtgaacccagagccgaacgtcatccacatcatgggctgctacattctggggaaccccaatggagagaagctgttccagaacctcaggaccctcatgactccttatagggtcaccttcgagtcacccctggagctctcagcccaagggaagcagatgatcgagacgtactttgacttccggttgtatcgcctgtggaagagccgccagcactcgaagctgctggactttgacgacgtcctgtgaggggccgggcttggaacgatgtacgataccctcatagtgaccattaaacct

SEQ ID NO: 187225 - DNA, 1587 bp, Artificial Sequence
  derived and/or modified sequence
atgggcgccgccgccagccggcggcgggccctgcggagcgaggccatgtcatcagtggccgcgaaggtgagagccgctagggcctttggcgagtatctatctcaatcccatccagagaaccgtaatggtgctgatcacttgctcgccgatgcatattcgggtcacgacggaagccccgaaatgcagcccgcacctcaaaacaagcgccgcctgagcctggtgtctaacggatgctatgagggatccttgtcagaagagccttccatcagaaaaccagctggtgagggacctcagcctcgcgtgtatactatttctggagaaccagcactgttacccagcccggaagctgaagctatcgaactggcggtagtgaaaggcaggaggcaaaggcatccacaccaccactcccagcctttgagggcaagcccaggcggctcacgcgaggacgtcagccgcccttgccagtcatgggctggctccaggcaggggagtaaagaatgtcctggctgtgcacagctcgctcctggccctaccccaagagcttttgggcttgaccaaccccccttgcctgagacaagcgggcgcagaaagaagcttgagcgcatgtatagcgtggatagggtgtctgacgatattccaatacggacctggttccccaaggaaaatctgttctcatttcagactgctaccaccacaatgcaggccgtgtttcgggggtatgcggagagaaaacgccgcaaaagagagaacgattccgcaagcgtgatacaacgcaactttcgcaagcatctcaggatggtgggttcccggcgcgtcaaggctcaaacgtttgcggaacggcgcgagaggtcatttagccgatcctggtctgatcctacccccatgaaggctgatacatctcatgactcaagggattctagtgacctccagagcagccattgtacgttggatgaggcgttcgaggacctagactgggacacggaaaagggtctggaggccgttgcatgtgacaccgagggatttgtcccacccaaggtaatgctgatttcttctaaggtgcccaaagccgagtatatccctacaatcatccgacgcgatgacccatcaataattcccattctgtatgaccacgagcacgcgaccttcgaggacattctggaggaaattgaacggaaacttaatgtgtatcacaagggagctaagatttggaagatgctgatcttctgtcaagggggacctggacacctctatctcctcaaaaacaaggtggcaacttttgcaaaagtcgaaaaagaagaggatatgatacacttctggaaacggctcagccgcctgatgagcaaggtgaacccagaacccaatgtgatccatattatgggctgttatattctgggcaatccaaacggcgagaagctattccagaaccttagaacattgatgaccccctatagggtgacctttgaatctcccctcgagctgagtgcgcagggaaagcagatgattgaaacttactttgattttcgactctaccggttgtggaaatctagacaacatagcaaacttttggacttcgatgatgtactgtag

SEQ ID NO: 187226 - DNA, 984 bp, Artificial Sequence
  derived and/or modified sequence
atgtacagcgtggaccgggtgagcgacgacatccccatccggacctggttccccaaggagaacctgttttccttccagactgcaaccaccacaatgcaggcggtgtttcgagggtatgccgagcggaagaggcgaaagagggaaaacgactcagcgagcgttatacaaaggaactttcggaaacaccttcgaatggttgggtctcggagagtcaaggcacaaacctttgcagaaagacgagaacgtagcttttcaaggtcgtggagcgacccaacaccaatgaaagcagacactagtcacgactccagagatagctcagacctgcagagttcacactgcaccctggacgaagcgttcgaggatctggattgggataccgaaaagggccttgaggccgtggcctgtgatacagaggggttcgtacctcccaaagtgatgctgatctcttcgaaggtccccaaggccgagtatattcccacaatcattaggagagacgacccttctattatacctatcctgtacgatcatgaacatgccacattcgaggatattctggaggagattgagagaaagttgaatgtgtaccacaaaggcgctaaaatctggaagatgctgattttttgtcagggaggcccaggccatctttacctcctgaagaataaagtggcaacctttgctaaggttgagaaagaggaagatatgattcacttctggaagcgcttgtctcggctgatgtcaaaagtgaatcccgagcccaatgtgattcatattatggggtgttatatcctcggcaaccccaacggggagaagctctttcagaatctcagaaccctgatgaccccttacagggttacttttgagagtcctctggaactgagtgcccagggtaaacagatgatcgagacatatttcgattttagactgtataggctatggaaatctagacagcactctaagttgctggattttgacgatgtgctctag

SEQ ID NO: 187227 - DNA, 1587 bp, Artificial Sequence
  derived and/or modified sequence
atgggcgccgccgccagccggcggcgggccctgcggagcgaggccatgtcaagcgttgccgctaaagttcgcgctgcacgagcattcggtgaatatttgtcccagagccatcctgagaacagaaatggagcagatcatctgttagctgatgcatactccggacacgacggcagccccgaaatgcagccggcgccacaaaacaagcggagactaagcctggtctccaatggatgttatgaggggtctctaagtgaggagccctctatccgtaagccggcgggcgaggggccacagccccgagtgtataccatttctggtgagcccgccctcttgccgtctccggaagccgaggcgatcgagttagccgtcgttaagggcaggcggcagaggcaccctcaccaccattcgcagccactgcgagcgagccctggcggctcccgcgaggatgtctctaggccatgccagtcatgggccgggagccgccagggttctaaagagtgccccggttgcgcccaactcgcgcctggaccaacacccagagcgtttggattagaccaacctccattaccagagacttcaggccgacgcaagaaactcgaacggatgtacagcgtggatcgggtatctgacgacatccctattcgcacatggtttcccaaagagaatctgttctcgttccagaccgccaccacaactatgcaagccgtgtttaggggatatgcagaaagaaaaagacgcaagcgcgaaaacgacagcgccagcgtgatccagcggaatttcagaaaacaccttagaatggtgggtagccggagagttaaagcccagacctttgcggagagacgggaaagatcattttcaagatcttggtctgaccccacccctatgaaggcggatacctctcacgactcaagggacagttctgacttacagagtagccattgtacacttgacgaagctttcgaggacctcgattgggacactgagaaagggctagaggccgtggcttgcgatacagagggtttcgtgccaccaaaggtgatgctgatttcatccaaagtgccaaaagccgaatatatccccaccatcattcggcgggatgatccttctatcataccaatcttgtacgatcacgaacacgcaactttcgaagatattctggaggagattgagcgtaagctgaacgtgtaccataagggtgcaaagatatggaagatgctgattttctgccaggggggccctggccacctgtacctgttaaagaataaggtcgccaccttcgcaaaggtggaaaaagaagaggatatgattcatttttggaagcggctctcacgcctaatgagtaaggttaaccccgaacccaacgtcatccacatcatgggatgctacattcttggaaatccgaacggagaaaagctcttccagaatctaagaacactaatgacgccgtatagggtcacattcgagtctccactggagctgtccgcacaggggaagcagatgatcgaaacctatttcgattttcgactataccggctctggaagagcaggcagcattcaaaactgctcgacttcgatgacgtcttgtag

SEQ ID NO: 187228 - DNA, 1587 bp, Artificial Sequence
  derived and/or modified sequence
atgggagccgcagccagtagacgtagagccctgcgatctgaggccatgtcctcagtagctgctaaggtgcgcgcagcacgggcttttggggagtatctttcccagtcacatcctgaaaacaggaatggggctgaccacctactggcagatgcgtattcaggccatgatgggagcccggaaatgcagcccgctcctcaaaacaaacgccgactgtcattggttagtaatggctgttatgagggaagcctgtccgaggaaccttctatcagaaaacccgcaggcgaagggcctcaaccgagagtctacaccattagtggcgaaccagcccttctacctagtccagaagcagaggccatcgagctggctgtggtcaaagggaggaggcaaagacatccccaccaccactcccagcctctgagagccagcccaggcggttctcgagaggatgtgagccgaccatgccagtcctgggcgggaagccgccagggcagtaaggagtgtcctggctgcgctcaattggctcctggtccaactcctcgggctttcggtctggatcagccacccctcccagagacctcggggagaagaaaaaagcttgaaaggatgtatagcgtggatcgagtgtctgatgatatccccatcaggacttggttcccaaaggagaatttgttttcattccagacagcgacaacaacaatgcaggccgtttttagaggatacgctgaacggaagcgtaggaagcgtgaaaacgacagtgcaagcgtgatccagagaaacttcaggaagcacctcagaatggtgggaagtagacgggtcaaggctcagaccttcgcggagagacgggagcggtccttttctcggagctggtccgaccctacccccatgaaggccgatacttcccatgacagtcgcgattcttctgatctccagtccagccattgtaccctcgacgaggctttcgaggatctagactgggacaccgaaaagggcctggaagcagttgcctgcgacactgaaggctttgtgcctcccaaagtcatgctcatctccagtaaggtgcctaaggccgagtatatccccactatcattcgcagggacgatcctagcattattccaatcttgtacgaccacgagcacgccacattcgaagatatcctggaggaaattgaacgcaaactgaacgtctaccacaagggtgctaagatctggaagatgctcatcttctgccaggggggaccaggccatctttaccttttgaaaaacaaagtggcgacctttgcgaaggtggaaaaagaggaagatatgatccatttctggaaaaggctctcacgcctcatgtctaaggtgaacccggaacccaatgtcattcacataatggggtgttatattctcggtaaccccaatggcgagaagttgtttcagaatttgaggacactgatgaccccgtacagagtgacattcgaaagccccctggaactttctgcgcagggcaaacagatgatagagacttacttcgacttccgattatatcgtttgtggaaatccaggcagcattccaaactcctggattttgacgatgttctttag

SEQ ID NO: 187229 - DNA, 984 bp, Artificial Sequence
  derived and/or modified sequence
atgtacagcgtggaccgagtgtctgacgacatcccaattcgcacttggtttccaaaggagaacctcttctccttccagaccgccacaacaaccatgcaggcagtgtttcggggttatgccgaaaggaagcggagaaagcgggagaacgacagtgccagcgtcattcaaagaaacttccgaaagcatctgagaatggtgggaagcagaagggtgaaagctcaaacatttgcggaacggagagagagatctttttctaggtcctggagtgatcctacccctatgaaggctgataccagccatgattcacgtgactcatcagatctgcagtctagtcattgtactctcgatgaagcctttgaggacctagattgggacactgagaaaggattagaggcagtggcctgtgacacagaggggttcgtcccgcctaaggttatgctcataagctcaaaggtgccaaaagccgagtacatcccaacaatcattcggcgtgatgaccctagcattatcccaatactttatgaccacgaacatgcgacctttgaagatattctcgaggagattgaaaggaaacttaacgtgtaccacaagggggctaagatctggaagatgcttatcttttgccagggcggaccgggtcatctgtatctcttaaaaaataaggtggccacattcgcaaaggtagagaaggaagaagatatgatccatttctggaaacgcttgtcccgtctgatgtcgaaggtgaatccggagccgaatgtgatccatatcatggggtgctacatcctgggcaaccctaacggggagaagctgttccagaatctgagaactcttatgactccctaccgcgtgacctttgagagccccttggagctctccgcccaagggaaacagatgatcgaaacctattttgatttcaggctttacaggctgtggaaaagccggcagcattcaaagttactagattttgatgatgtgctgtag

SEQ ID NO: 187230 - DNA, 1587 bp, Artificial Sequence
  derived and/or modified sequence
atgggggctgccgcatctcgtcgtcgggctctaagatccgaagcgatgagcagtgttgcggcaaaagttcgggcagcccgagcatttggcgagtacctttcccagtcccaccccgagaatcgcaatggggctgatcacctcttagccgacgcttattctgggcacgacggctcccccgaaatgcagcccgcacctcagaacaagcggagactgagcctcgtttccaacggttgttacgaagggagcttaagtgaggagcctagcatcagaaaaccggcaggggagggtcctcagccaagggtgtacaccatctctggggagcctgccctgctccccagtcccgaagctgaagccatagaactcgcagtggtgaaggggaggcggcagagacaccctcatcatcactctcaaccactgcgcgctagtccgggtggctctagggaggacgtatctcggccatgtcagtcctgggcagggagccgccagggatctaaggaatgtccaggctgtgcccagctggctccagggcctacaccccgtgcattcggactggaccaaccgcctcttcctgaaacttccggaaggcgcaagaagctggaaagaatgtactccgttgaccgcgtatctgatgacatcccgattcgcacctggttcccgaaggagaatttgttcagctttcagacagcaaccacaacaatgcaagcagtattccggggatacgcggaacggaagcggagaaaacgcgagaatgatagcgcgagcgtcattcaaaggaactttagaaagcacctacgtatggtgggctcacggagagtgaaggcccagaccttcgccgaaagacgcgagagaagtttctctagaagttggtctgaccctacgcctatgaaggctgatacaagccacgacagtagagactcgtctgatctgcaatccagccactgtactctcgatgaggcctttgaggatttggactgggatacagagaaaggcctggaggcagtggcttgcgacactgaaggcttcgttcccccaaaggtcatgctgatctccagtaaagtccctaaggctgagtatatccccactataatccgtagggacgaccctagtatcattcctatactgtatgatcatgaacacgctacattcgaagatatccttgaggagatcgagcgcaagctgaatgtttaccataagggtgcgaaaatttggaaaatgttgatattttgccaaggcggacccggacatctgtacctcctgaagaataaggtggccactttcgccaaggtggagaaggaagaagacatgatccacttttggaaaagactgtctaggctgatgtccaaggtgaacccagagcctaatgtcatacacatcatgggctgctacattttgggtaacccaaacggggagaaactctttcagaatcttaggaccctcatgactccatatcgcgttacatttgagtcacccctcgagctgtctgctcaggggaagcagatgatcgagacgtacttcgactttcggctctaccgtctatggaagagccggcagcactctaagttgcttgattttgacgacgtcctttag

SEQ ID NO: 187231 - DNA, 1587 bp, Artificial Sequence
  derived and/or modified sequence
atgggcgccgccgccagcagaagaagagccctgagaagcgaggccatgagcagcgtggccgccaaggtgagagccgccagagccttcggcgagtacctgagccagagccaccccgagaacagaaacggcgccgaccacctgctggccgacgcctacagcggccacgacggcagccccgagatgcagcccgccccccagaacaagagaagactgagcctggtgagcaacggctgctacgagggcagcctgagcgaggagcccagcatcagaaagcccgccggcgagggcccccagcccagagtgtacaccatcagcggcgagcccgccctgctgcccagccccgaggccgaggccatcgagctggccgtggtgaagggcagaagacagagacacccccaccaccacagccagcccctgagagccagccccggcggcagcagagaggacgtgagcagaccctgccagagctgggccggcagcagacagggcagcaaggagtgccccggctgcgcccagctggcccccggccccacccccagagccttcggcctggaccagccccccctgcccgagaccagcggcagaagaaagaagctggagagaatgtacagcgtggacagagtgagcgacgacatccccatcagaacctggttccccaaggagaacctgttcagcttccagaccgccaccaccaccatgcaggccgtgttcagaggctacgccgagagaaagagaagaaagagagagaacgacagcgccagcgtgatccagagaaacttcagaaagcacctgagaatggtgggcagcagaagagtgaaggcccagaccttcgccgagagaagagagagaagcttcagcagaagctggagcgaccccacccccatgaaggccgacaccagccacgacagcagagacagcagcgacctgcagagcagccactgcaccctggacgaggccttcgaggacctggactgggacaccgagaagggcctggaggccgtggcctgcgacaccgagggcttcgtgccccccaaggtgatgctgatcagcagcaaggtgcccaaggccgagtacatccccaccatcatcagaagagacgaccccagcatcatccccatcctgtacgaccacgagcacgccaccttcgaggacatcctggaggagatcgagagaaagctgaacgtgtaccacaagggcgccaagatctggaagatgctgatcttctgccagggcggccccggccacctgtacctgctgaagaacaaggtggccaccttcgccaaggtggagaaggaggaggacatgatccacttctggaagagactgagcagactgatgagcaaggtgaaccccgagcccaacgtgatccacatcatgggctgctacatcctgggcaaccccaacggcgagaagctgttccagaacctgagaaccctgatgaccccctacagagtgaccttcgagagccccctggagctgagcgcccagggcaagcagatgatcgagacctacttcgacttcagactgtacagactgtggaagagcagacagcacagcaagctgctggacttcgacgacgtgctgtag

SEQ ID NO: 187232 - DNA, 984 bp, Artificial Sequence
  derived and/or modified sequence
atgtacagcgtggacagagtgagcgacgacatccccatcagaacctggttccccaaggagaacctgttcagcttccagaccgccaccaccaccatgcaggccgtgttcagaggctacgccgagagaaagagaagaaagagagagaacgacagcgccagcgtgatccagagaaacttcagaaagcacctgagaatggtgggcagcagaagagtgaaggcccagaccttcgccgagagaagagagagaagcttcagcagaagctggagcgaccccacccccatgaaggccgacaccagccacgacagcagagacagcagcgacctgcagagcagccactgcaccctggacgaggccttcgaggacctggactgggacaccgagaagggcctggaggccgtggcctgcgacaccgagggcttcgtgccccccaaggtgatgctgatcagcagcaaggtgcccaaggccgagtacatccccaccatcatcagaagagacgaccccagcatcatccccatcctgtacgaccacgagcacgccaccttcgaggacatcctggaggagatcgagagaaagctgaacgtgtaccacaagggcgccaagatctggaagatgctgatcttctgccagggcggccccggccacctgtacctgctgaagaacaaggtggccaccttcgccaaggtggagaaggaggaggacatgatccacttctggaagagactgagcagactgatgagcaaggtgaaccccgagcccaacgtgatccacatcatgggctgctacatcctgggcaaccccaacggcgagaagctgttccagaacctgagaaccctgatgaccccctacagagtgaccttcgagagccccctggagctgagcgcccagggcaagcagatgatcgagacctacttcgacttcagactgtacagactgtggaagagcagacagcacagcaagctgctggacttcgacgacgtgctgtag

SEQ ID NO: 187233 - protein, 1393 aa, Artificial Sequence
  derived and/or modified sequence
MLSRPKPGESEVDLLHFQSQFLAAGAAPAVQLVKKGNRGGGDANSDRPPLQDHRDVVMLDNLPDLPPALVPSPPKRARPSPGHCLPEDEDPEERLRRHDQHITAVLTKIIERDTSSVAVNLPVPSGVAFPAVFLRSRDTQGKSATSGKRSIFAQEIAARRIAEAKGPSVGEVVPNVGPPEGAVTCETPTPRNQGCQLPGSSHSFQGPNLVTGKGLRDQEAEQEAQTIHEENIARLQAMAPEEILQEQQRLLAQLDPSLVAFLRSHSHTQEQTGETASEEQRPGGPSANVTKEEPLMSAFASEPRKRDKLEPEAPALALPVTPQKEWLHMDTVELEKLHWTQDLPPVRRQQTQERMQARFSLQGELLAPDVDLPTHLGLHHHGEEAERAGYSLQELFHLTRSQVSQQRALALHVLAQVISRAQAGEFGDRLAGSVLSLLLDAGFLFLLRFSLDDRVDGVIATAIRALRALLVAPGDEELLDSTFSWYHGALTFPLMPSQEDKEDEDEDEECPAGKAKRKSPEEESRPPPDLARHDVIKGLLATSLLPRLRYVLEVTYPGPAVVLDILAVLIRLARHSLESATRVLECPRLIETIVREFLPTSWSPVGAGPTPSLYKVPCATAMKLLRVLASAGRNIAARLLSSFDLRSRLCRIIAEAPQELALPPEEAEMLSTEALRLWAVAASYGQGGYLYRELYPVLMRALQVVPRELSTHPPQPLSMQRIASLLTLLTQLTLAAGSTPAETISDSAEASLSATPSLVTWTQVSGLQPLVEPCLRQTLKLLSRPEMWRAVGPVPVACLLFLGAYYQAWSQQPSSCPEDWLQDMQRLSEELLLPLLSQPTLGSLWDSLRHCSLLCNPLSCVPALEAPPSLVSLGCSGGCPRLSLAGSASPFPFLTALLSLLNTLAQIHKGLCGQLAAILAAPGLQNYFLQCVAPGAAPHLTPFSAWALRHEYHLQYLALALAQKAAALQPLPATHAALYHGMALALLSRLLPGSEYLTHELLLSCVFRLEFLPERTSGGPEAADFSDQLSLGSSRVPRCGQGTLLAQACQDLPSIRNCYLTHCSPARASLLASQALHRGELQRVPTLLLPMPTEPLLPTDWPFLPLIRLYHRASDTPSGLSPTDTMGTAMRVLQWVLVLESWRPQALWAVPPAARLARLMCVFLVDSELFRESPVQHLVAALLAQLCQPQVLPNLNLDCRLPGLTSFPDLYANFLDHFEAVSFGDHLFGALVLLPLQRRFSVTLRLALFGEHVGALRALSLPLTQLPVSLECYTVPPEDNLALLQLYFRTLVTGALRPRWCPVLYAVAVAHVNSFIFSQDPQSSDEVKAARRSMLQKTWLLADEGLRQHLLHYKLPNSTLPEGFELYSQLPPLRQHYLQRLTSTVLQNGVSET

SEQ ID NO: 187234 - DNA, 4182 bp, Artificial Sequence
  derived and/or modified sequence
atgctgtcccgacccaagccgggggaaagcgaagtcgacttgctgcatttccagagccagtttttggccgccggcgctgcccccgccgtccaactggtcaaaaagggcaacagaggcgggggggacgccaactccgatagacctcctctccaggaccaccgggatgtagtgatgctcgataacctccccgatctgccccctgctctggtgcccagcccacccaagcgcgcacggccgtctccgggccattgcctgcccgaagacgaggatccggaagaaaggctgaggagacacgaccagcatatcactgctgtgttaaccaaaatcatagagagagatacgagctccgtcgccgttaacctgcctgtcccaagcggtgtcgcctttcccgccgtgttcctgagatctcgtgacactcaaggcaagagcgccacttcagggaagagatctattttcgcccaggagatcgctgccagacggattgcagaagccaaaggacctagcgtgggcgaggttgtgcccaacgtggggcctcccgagggcgccgtgacgtgtgaaactcctaccccaaggaaccaggggtgtcagctccccggctcgagtcattcttttcaaggaccaaacctggtgaccgggaagggactgcgggaccaggaagccgagcaggaagcacagacaattcacgaggagaatattgcacgcctgcaggctatggcccccgaggagattttacaggagcagcagcgacttttagctcagttggatccaagtttggtggccttcctccgcagccactctcatacacaggaacaaaccggcgaaacagcatccgaagagcagaggccaggcggaccaagcgccaatgtcaccaaagaggagccgctgatgtccgctttcgcgagcgagcctcgcaagagggacaaactggaacctgaggctcccgccctagccctgcctgtgacacctcagaaggagtggctgcacatggacactgttgagctggagaaattgcactggacacaggatttgcccccagtccgtcgacagcaaacacaagagcggatgcaggcacgcttttccctgcagggggaactgctggccccggatgtggatctaccaacacaccttggactgcatcatcatggggaagaagctgagcgggctgggtattccttacaggagttgtttcaccttacccggtcccaggtcagccagcagagagctctggcgctgcatgtgctcgcccaggtgatttcccgtgctcaggcgggcgaattcggagaccggctcgcaggaagcgtgctgtccctcctcctggatgcgggcttcctgtttcttctgcgtttttctctcgacgatagggtggatggggtgattgcgactgctattagggccctgcgcgccctcctcgttgcccccggagatgaggagctcctggactctaccttctcctggtaccatggagcactcacattccccctcatgccctctcaggaggacaaggaggatgaggacgaagatgaagagtgccctgcgggaaaggccaaacgcaaatctccagaagaagagagccgcccgcctcctgatctggcgaggcacgacgtgattaagggcctgttagccacctctttgcttcccaggctacgctacgtgctggaggtcacctatcctggacccgcagtggtgctggacatattagccgtgctgattagactcgcccgccattctctggagtctgctacacgggtattagagtgtcccagactcatcgaaacgattgttagagagtttctgcccacatcctggagtccggtgggagccggacctacaccatcactttacaaggtgccatgcgctactgcgatgaagttactgagagtgcttgccagtgccggaaggaacattgccgcgcgcctgttgagctcatttgatttacgaagccgcttgtgccgcataattgccgaggcaccacaggaacttgctttgcccccggaggaggcagaaatgttaagcacggaggctctgaggctgtgggcggtagccgcttcctatggccagggtgggtacctatatagagaactatatccagtcctaatgagagcactgcaggttgtccccagagagctgtccactcacccgcctcagccactctccatgcagagaattgcttctctgctcacactgctgacacaacttacgttggccgccggcagcaccccagctgagactatttccgacagcgctgaggcgtctctctcagcaacacctagcctggtaacctggacacaagtcagtgggctccagccattggttgaaccatgcctgaggcaaacattaaaactgttgtctaggcccgagatgtggcgagcagtgggaccggtgccagtagcatgtctcctgttcttaggggcgtactatcaggcttggagccaacagccttcgagctgccccgaggactggttacaagatatgcaacgcctgagtgaggaactgctgctccctctgctcagccagcctacactgggttcactctgggattcactacggcactgtagcttattgtgtaatcctttgagctgtgtccccgcactggaggccccacctagtctagtaagcctgggctgtagcggcgggtgtcctagactgtctctggccggttccgcctctccattcccttttttgacagcacttctctcactcctcaatacattggcccagatccataaaggactgtgtggacaacttgcagcaatcctggcggcccctggcctgcagaattatttccttcagtgtgttgcaccaggcgcggctccacacctgacccctttctctgcctgggccttgagacatgagtatcatctccagtacctcgctctggctctggctcagaaggctgctgctctgcaacccctgcccgcgactcacgcggcactctaccacggaatggcattggctctactgagtcgcctgctgcctggcagcgaatacctaacccatgaactgctccttagttgcgtttttaggctggaatttctgcccgagaggacatccggcggcccagaagccgccgattttagtgaccagctgagcttgggaagttcccgggtccccagatgcggtcagggcacacttcttgcccaggcgtgccaggacctaccatctattagaaattgttacctgactcactgtagcccagctagagcgtccttactagcgtctcaagccctccatagaggggagttgcagagggtgcctactttgcttctgcccatgccgaccgagccactactgcccacagactggcccttcttgcctctgatccgcctttaccacagggctagcgatactccgagtggcctgtcaccaacggatacgatgggcactgcaatgagagtcttgcagtgggtactcgtactggagtcatggcgtcctcaggccctgtgggccgtgccccctgcggccaggctggcccgcttgatgtgcgtgttcctggtggactccgagctgttcagggagtctcccgtccaacaccttgtcgccgctcttctggcccagctgtgccagccacaagtgcttccgaacttgaacctcgactgccgccttcctgggctgaccagcttccccgatctctacgctaacttcctcgaccacttcgaggccgtttctttcggcgaccacctgtttggggccctggtgcttctgccattgcagagacggttcagcgtcacactgcgcctcgctttattcggagagcacgttggggctctgcgcgccttgagcctaccgttgactcagctgccggtctccttggagtgctacactgtcccccctgaagataatctggcattattgcagctatacttcaggacgctggtgacgggcgccctgcgaccgcgttggtgtcctgtgctttatgcggtggccgtggcgcacgtcaactccttcattttctcgcaagacccacaatcatcagatgaagtaaaggctgccaggcgttccatgctccagaaaacttggctcctcgccgatgagggcttacggcagcacctgcttcactacaagctgccgaactccaccctgccggagggcttcgaactctatagccaactgccgcccctgcggcagcattatctgcagaggctcaccagtacagtgctgcaaaacggggtatccgagacgtag

SEQ ID NO: 187235 - DNA, 4182 bp, Artificial Sequence
  derived and/or modified sequence
atgctgagccggcccaagccaggagagagcgaggtggacctgctgcacttccagagccagttcctggccgccggggccgccccagctgtgcagctggtgaagaagggcaacagaggaggaggagatgccaacagcgaccggccccccctgcaggaccacagagatgtggtgatgctggacaacctgcctgacctgcccccagccctggtgcccagcccccccaagagggcccggcccagccctggccactgcctgcctgaagatgaagatcctgaggagcggctgcggagacatgaccagcacatcacagctgtgctgaccaagatcatcgagcgggacaccagctctgtggccgtgaacctgcctgtgcccagcggcgtggccttccctgctgtgttcctgcggagccgggacacccagggcaagagcgccaccagcggcaagaggagcatctttgcccaggagattgctgccaggagaattgctgaggccaagggccccagcgtgggggaggtggtgcccaacgtgggccccccagagggcgctgtgacctgtgagacccccaccccaagaaaccagggctgccagctgcccggcagcagccacagcttccagggccccaacctggtgacaggcaagggcctgcgggaccaggaggccgagcaggaggcccagaccatccacgaggagaacatcgcccggctgcaggccatggcccctgaggagatcctgcaggagcagcagaggctgctggcccagctggaccccagcctggtggccttcctgcggagccacagccacacccaggagcagacaggagaaacagccagcgaggagcagaggcctgggggccccagcgccaacgtgaccaaggaggagcccctgatgtctgcctttgccagcgagcccaggaagagggacaagctggagcctgaggccccagccctggccctgcctgtgaccccccagaaggagtggctgcacatggacacagtggagctggagaagctgcactggacccaggacctgccccctgtgcggcggcagcagacccaggagaggatgcaggcccgcttcagcctgcagggcgagctgctggccccagatgtggacctgcccacccacctgggcctgcaccaccacggggaggaggccgagcgggccggctacagcctgcaggagctgttccacctgaccaggagccaggtgtcccagcagagggccctggccctgcacgtgctggcccaggtgatcagccgggcccaggccggggagtttggagaccggctggccggctctgtgctgagcctgctgctggatgctggcttcctgttcctgctgcgcttcagcctggatgacagagtggatggagtgattgccacagccatccgggccctgcgggccctgctggtggcccctggagatgaggagctgctggacagcaccttctcctggtaccatggagccctgaccttccccctgatgcccagccaggaggacaaggaggatgaagatgaagatgaagaatgtcctgctgggaaggccaagaggaagagccctgaggaggagagccggcccccaccagacctggcccggcatgatgtgatcaagggcctgctggccaccagcctgctgccccggctgcgctacgtgctggaggtgacctacccaggccctgctgtggtgctggacatcctggccgtgctgatccggctggcccggcacagcctggagagcgccaccagggtgctggagtgccccaggctcatcgagaccatcgtgcgggagttcctgcccacctcctggagccctgtgggcgccggccccacccccagcctgtacaaggtgccctgtgccacagccatgaagctgctgcgggtgctggccagcgctggaagaaatattgctgcccggctgctgagcagctttgacctgcggagccggctgtgccgcatcatcgccgaggccccccaggagctggccctgcccccagaggaggccgagatgctgagcacagaggccctgcggctgtgggccgtggccgccagctatggccagggcggctacctgtaccgggagctgtaccctgtgctgatgagggccctgcaggtggtgccccgggagctgagcacccaccccccccagcccctgtccatgcagagaattgccagcctgctgaccctgctgacccagctgaccctggccgccggcagcaccccagctgagaccatcagtgacagcgctgaggccagcctgagcgccacccccagcctggtgacctggacccaggtgtctggcctgcagcccctggtggagccctgcctgcggcagaccctgaagctgctgagcaggcctgagatgtggagggctgtgggccctgtgcctgtggcctgcctgctcttcctgggcgcctactaccaggcctggagccagcagcccagcagctgcccagaggactggctgcaggacatgcagaggctgtctgaggagctgctgctgcccctgctgagccagcccaccctgggcagcctgtgggacagcctgcggcactgcagcctgctgtgcaaccccctgagctgtgtgcctgccctggaggccccacccagcctggtgtccctgggctgcagcggcggctgcccccggctgagcctggccggcagcgccagccccttccccttcctgacagccctgctgagcctgctgaacaccctggcccagatccacaagggcctgtgtggccagctggccgccatcctggccgcccctggcctgcagaactacttcctgcagtgtgtggcccctggggccgccccccacctgacccccttcagcgcctgggccctgcggcatgagtaccacctgcagtacctggccctggccctggcccagaaggccgccgccctgcagcccctgcctgccacccacgccgccctgtaccacggcatggccctggccctgctgagccggctgctgcccggcagcgagtacctgacccatgagctgctgctgagctgtgtgttccggctggagttcctgcctgagaggaccagcggcggccctgaggccgctgacttcagtgaccagctgagcctgggcagcagccgggtgccccgctgtggccagggcaccctgctggcccaggcctgccaggacctgcccagcatccggaactgctacctgacccactgcagccctgcccgggccagcctgctggccagccaggccctgcacagaggagagctgcagagggtgcccaccctgctgctgcccatgcccacagagcccctgctgcccacagactggcccttcctgcccctcatccggctgtaccaccgggccagtgacacccccagcggcctgagccccacagacaccatgggcacagccatgagggtgctgcagtgggtgctggtgctggagagctggaggccccaggccctgtgggccgtgcccccagctgcccggctggcccggctgatgtgtgtgttcctggtggacagcgagctgttccgggagagccctgtgcagcacctggtggccgccctgctggcccagctgtgccagccccaggtgctgcccaacctgaacctggactgccgcctgcccggcctgaccagcttcccagacctgtatgccaacttcctggaccactttgaggccgtgtcctttggagaccacctgtttggagccctggtgctgctgcccctgcagaggcgcttctctgtgaccctgcggctggccctgtttggagagcacgtgggcgccctgcgggccctgagcctgcccctgacccagctgcctgtgtccctggagtgctacacagtgcccccagaggacaacctggccctgctgcagctgtacttccgcaccctggtgactggagccctgcggccccgctggtgccctgtgctgtatgctgtggccgtggcccacgtgaacagcttcatcttcagccaggacccccagagcagtgatgaggtgaaggccgcccggcgctccatgctgcagaagacctggctgctggctgatgagggcctgcggcagcacctgctgcactacaagctgcccaacagcaccctgcctgagggctttgagctgtacagccagctgccccccctgcggcagcactacctgcagaggctgaccagcacagtgctgcagaatggagtgtctgagacctag

SEQ ID NO: 187236 - DNA, 4182 bp, Artificial Sequence
  derived and/or modified sequence
atgctgagccggcccaagcccggcgagagcgaggtggacctgctgcatttccagagccagtttctggcggcgggcgcggctcctgcagtccagctcgttaaaaaaggcaaccgggggggcggggatgctaactcagacaggccacccttgcaagatcaccgggatgtggtgatgttggacaatttacctgacctgccacccgccctggtgccttcccctcctaagcgggcccggccaagccctggccactgtctgcccgaggacgaggatccagaggaacggttgcgccgccacgatcagcacattacagcagtactgacaaagatcattgagagagatacaagttcagtagcagtgaacctacccgtgccttcaggtgtggcctttcccgccgtgttcctgcgatccagggacacccagggcaaatccgccacatccggtaagagatccatcttcgcccaggagattgctgcccgacgtattgctgaggccaagggcccctccgtgggcgaggtcgtcccaaatgtcggcccgcccgagggcgctgtgacctgcgagacccccactccccgtaaccaaggctgtcagttgccgggatcctcacattctttccaagggcctaacctcgtcaccggcaagggacttagagaccaggaagccgagcaggaggctcagacaattcacgaggagaatatcgccaggctacaggcaatggcccccgaggaaatcctgcaggagcagcagagactcttggcccagctggatccttctctcgtagcctttttaaggtcgcatagccatactcaggaacaaacgggagaaactgcctcagaggagcagaggcccggaggaccgagtgctaacgtcacaaaggaggagcccctgatgagtgcttttgcgtcagaaccgaggaagcgtgataagcttgaacccgaggccccggcactggcattacccgtgacgcctcagaaagagtggctacatatggataccgtggagctcgagaagcttcactggacacaggatttaccacctgtgcgaaggcagcaaacacaggagcgcatgcaggcccgtttcagcctgcagggtgagttgctggccccagacgtggaccttcctacccacttgggacttcaccaccatggggaagaagccgaacgggccggctactccctgcaggagctgtttcatctgacacggagtcaggtgagccagcagagggccctggcactgcatgtattggctcaagtgatttcccgggcacaggcaggggagtttggcgaccgccttgcaggatcagtactctctctgctgctagatgctggcttcctgtttctcttaagattctccctggacgacagagtggacggagtgatcgctacagccatccgggcccttagagccctgctggtggccccaggcgatgaggagctcctggattccacttttagctggtatcatggagccctgacgttcccgctcatgccttctcaggaagataaagaagatgaagatgaggatgaggagtgccccgccggaaaagccaagcggaaatcccccgaggaggagagccgaccaccaccagatttggccagacacgatgtcataaagggattacttgctacctccttactgccaagactgaggtacgtgctcgaagtgacataccctgggcccgctgttgttctcgacatattggcggttctgatacgcctagctcgtcattccttggagtctgctacaagagttctggagtgtcccagactcatcgaaaccattgttcgcgagttcctgccaacaagctggagcccagtcggcgcagggcctacaccctctctgtacaaggtaccatgcgctactgccatgaaactgttaagagttctggcttccgccggacggaatatcgcagccagattactctcatcctttgaccttcggagtcggctatgtcggatcattgccgaagccccgcaggagctggccttgccacctgaggaagccgaaatgctaagtactgaggctctgagactgtgggcagtggctgcctcatacggccaaggggggtatctttaccgggagctctatcctgtgttgatgagagctctgcaagtggtgccgagggaactgtccacccatccacctcagccactgagtatgcagaggatagcctctctgttaacattattgacacagctgacgctcgccgcgggctccactcctgcagaaaccatctccgattccgcagaggcgagtctgagtgccacgccttctttagtgacatggactcaagtgtcgggattgcagccactggtggaaccatgccttagacaaaccctgaagcttctcagcaggccggagatgtggagagctgtagggcctgtgcccgtggcctgcttactctttctaggtgcttattaccaggcctggtcacagcagcccagctcttgtcctgaggattggttgcaggacatgcagcgtctatcagaagagctcttgttgccccttctgtcccagcccacactgggaagtctgtgggactcactgcggcactgcagcctgctatgcaatcctctcagctgcgtgcccgctctggaagcacccccttcccttgtcagcctgggatgttctggaggttgtccccgacttagcctggccggatcagcgtcaccgtttcccttcctcacggcactgctgtctctgctcaatacactggcacaaatccacaaggggttgtgtgggcagcttgccgccattctggcagcccccggacttcagaactattttctacaatgcgtggcccccggtgccgcccctcaccttacaccattttcagcctgggcgctgcgccacgaataccatctccagtatctggcgcttgctctcgcacagaaggccgccgcactacaaccattgccagccactcatgcagctctgtaccacggaatggctttggccctgctgtcccgcctactaccaggaagcgagtaccttacacatgagttactcttatcctgtgtcttcagactggagtttctgcctgagcgcacctctgggggacctgaagcggcggatttctctgatcagctcagtctggggtcttcccgcgtcccccgatgtgggcagggaacactccttgcacaagcctgccaggatctcccgtcgatccgtaactgttacctaactcactgttctccagcacgcgccagcttgttggcgtcccaggctctgcatagaggggagctccaaagggtccccaccctcttactgccaatgccaactgaacctctgcttcccacagactggccttttttgccgctcattcggctgtaccatagggcctctgacacgccctcagggctgtctcctaccgacaccatgggtaccgcaatgcgcgttctgcaatgggtgcttgtcctggagtcatggcggccacaggcactttgggccgtgccccctgccgcccggctggcacggttgatgtgcgtgtttctggttgatagcgaactgttcagagagagccccgtgcagcacctagttgcggccttactggcccaactttgtcagccacaagtcctgccaaatctgaaccttgattgtaggcttcctggcctcacttcattcccagacctgtacgctaacttccttgatcattttgaagcagtgtcattcggagatcatctatttggcgccttggtgctgctgcccctacagaggaggttttcagtaacactaagactcgccttgtttggggagcacgtgggggcactgcgcgctctgtcgctgcccctcactcaattgcccgtcagtctagaatgctacaccgttcccccagaagataacctggccttactgcagctgtactttcgaacactcgtgacaggcgcactccgcccccggtggtgccctgtgttatatgccgtggccgtcgcccatgttaatagcttcattttctctcaggacccccaaagctctgatgaagtcaaggccgcccggagaagcatgctccagaaaacctggctccttgccgacgaaggcttaaggcaacacctgttacactacaaacttccaaattccacattacctgagggtttcgaactttactcacaactgcccccgctgcggcagcattatctgcaacgcctgacgtctaccgtgctccaaaacggcgtgagcgaaacatag

SEQ ID NO: 187237 - DNA, 4182 bp, Artificial Sequence
  derived and/or modified sequence
atgttgagccgcccaaagcctggcgagagtgaggtggatctgctgcactttcagtcgcaatttctggcagctggagcagctcccgctgtacagctcgtaaaaaagggcaaccgcggtgggggtgacgctaacagtgaccggcctccacttcaggaccatagagatgtggtgatgctggacaatctgcccgacctccctcccgctctggtcccatcccctcctaagagggcaaggccgtcacctgggcactgcctcccagaagatgaggaccccgaagaaaggctgcgccgtcatgatcagcacatcaccgccgtgctcactaaaattatcgaacgggacactagtagcgtggcggtgaacctccccgtcccatcgggggtggccttccctgcggttttccttcgttccagggatacccagggcaagtctgcaacaagcgggaagcgttctatctttgcacaggagattgcagcgagacgaatagcagaagcaaaggggccatcggtgggagaggtggtgccaaacgttggaccacccgagggtgcagttacctgtgaaacacccacccccaggaaccaaggctgccagctacctggaagttctcactcatttcaaggccctaacctggtgaccgggaagggattacgtgatcaagaggccgaacaggaggcccagacaatacatgaagaaaacattgccagactccaggccatggcccctgaggagatcttgcaggaacagcagcgtctgctggctcaactcgacccaagcttagtggcattcctgagatcccactcacacacacaggagcaaaccggcgagaccgcttctgaagaacaacgtccaggaggcccaagtgcaaacgtaaccaaagaggagcccctgatgtccgcctttgcatccgagcccagaaagcgcgacaaactcgaacctgaagcccctgcattggctctcccagtcaccccccagaaggagtggcttcatatggacaccgtggagctcgagaagctccactggacgcaagatctgccgccagtacgtcggcaacagacgcaggagagaatgcaggctagatttagtttacagggggaacttctggcccctgatgtagacctgccaactcaccttggtttgcaccatcatggggaggaagctgaacgggcaggctactcattacaagaactgtttcatctcactcggagccaggtgtctcagcagagagccttggcattacatgtattagcccaggtcatctcacgcgctcaggctggtgaattcggtgacagattagccggaagtgtgctaagtctgctgcttgacgccggattcttgttcctcctgaggttttctttagatgacagagttgacggggtcatcgccacagccattagagcacttcgggctctcctcgtggcccctggagatgaggaactgctggattccaccttctcctggtaccatggagccctgacgttccccctaatgccatcccaagaggacaaggaggatgaggatgaggatgaagaatgcccagctgggaaggcaaagagaaagagcccggaagaagaatcacgccctcctcctgacttagcaagacacgacgttattaaagggctgctggccacttctctactcccaaggctcagatacgtacttgaggtgacctacccaggtccagcagtggtgctcgatattttggctgtgctcatccgtttggcccgacattcgcttgaatccgccacccgcgtgctcgagtgtcctagattgatcgaaacaattgtcagagaatttcttccaacctcttggagcccagtcggcgctgggccaaccccgagcctctacaaagttccctgcgccaccgcaatgaagctccttagagtcctcgcgagcgccggtagaaacatagcggcacggttgctaagtagttttgaccttaggtctaggctctgtagaatcattgctgaggcaccccaggagctggctttgccccctgaagaagctgaaatgctctctaccgaggccctacgtctttgggccgtggctgcaagctacggtcaaggaggatatctgtatcgagagctgtatccagtcttaatgagagctctgcaggtcgtgccacgagagctcagcacccatccacctcagccgttatccatgcagcgcatagccagtctgttgactctgcttacacagctgacgttggccgctggttccactccagccgagacaattagcgacagtgccgaggcttccctgtcagctactccaagccttgtgacttggacacaggtgagcggacttcagcctctggtcgagccatgcttgaggcaaacacttaagttattatcaagaccagagatgtggcgggcagtggggcctgtccccgtggcctgcctgttgtttttaggtgcttattatcaggcttggtctcagcaaccctctagttgtcccgaggattggctgcaggatatgcagaggctctccgaagaactcctgctgccacttctaagccagcccacgctgggttcactgtgggatagtctgaggcattgctccttgctgtgcaatcctctgagctgcgtccccgcacttgaggcaccgccttcactggtgtcgctgggctgttccgggggttgcccgaggttgagtcttgcgggatctgcttctccctttccttttttgactgccctgcttagcctgctgaataccctggcccagatacataaaggattgtgtgggcaactggctgcgatcttggctgcccctggcttacagaattattttctccaatgtgtggctcctggggcagccccacaccttactccctttagtgcctgggcgctgcgccatgagtaccatttgcagtatttggcactggcactggcccaaaaagcagctgcactgcagccactgcccgcaacccacgcggcactgtaccatggtatggcccttgcgcttctaagcagattgctccctggttccgaatatttgacgcacgaacttctgctctcttgtgtgtttcgattggagttcttgcccgagcgcacatctggcggacccgaggcggctgacttcagtgatcagcttagtctcgggagttctcgcgtgcccaggtgtggacagggaaccctgcttgcacaggcgtgccaggatttgccatcaatccggaattgttatctaactcattgcagtccagcgcgtgcaagcctactggcttcgcaggcccttcatcgaggtgaactgcaaagagtgccaacattactgcttcctatgcccaccgaaccattgttgccgaccgattggccattcctccctttgattaggttgtatcaccgagccagtgacacaccatccggactcagtcccactgacacaatgggcacagctatgcgcgtgctgcaatgggtgcttgtgctggaatcctggcggccacaggctttgtgggccgtacccccagccgctagactggctagacttatgtgcgtgtttcttgtggactctgagctcttcagagagtctccagtgcagcacttagtggccgctctgctggctcagctgtgccagcctcaggtattgcccaacctgaatttagactgtcgactccctggtttgacttcattcccagacctatatgccaatttcctggaccattttgaggccgtctctttcggcgatcacctgttcggcgctcttgtgcttctcccgctccagcgacgctttagtgtaactttgagactggcactgttcggtgaacacgtgggagcactgcgggctctgtctcttcccctcacgcagctgccagtctcactggaatgttatactgtgcccccagaagataatttagcgctgctacaactgtacttcaggactctggttaccggcgctcttaggcctcgatggtgccccgtgctttatgccgtggcagttgctcacgtcaactctttcatctttagccaggacccacagtcatccgacgaggtcaaagccgcaaggcgttctatgctgcagaagacttggctactcgcagacgaaggactacgtcagcatctgctccattacaagttgccaaattcgacactgccagagggattcgagctgtatagccagttgcccccactaagacaacactacttgcagcgcttgacatcaaccgtcctacagaacggagtaagcgagacatag

SEQ ID NO: 187238 - DNA, 4672 bp, Artificial Sequence
  derived and/or modified sequence
gcgatctctgcggggcaagatggcggcgcccagacaggcctggagcacggatgaataagagggaacccccacacggagacactgctggagagagtcgtactggggaggcagctggagcagcaagatgctgtcgagaccgaagccaggggagtccgaggtggacctgctgcacttccagagtcagtttctcgcagctggtgcagccccagcagtgcagttggtgaagaaaggaaataggggcggtggtgatgccaactcagaccggcctccgctccaggaccatcgggatgtggtgatgttggacaatctcccagatttgcccccagctttggtcccttctcctccaaagagagccaggcccagccctggccactgcctgcctgaggatgaggacccagaagagaggctgaggaggcatgatcagcacatcactgctgtcttgactaagattattgaacgagatacaagttcagtggccgtgaatctgcctgtgcccagtggtgttgctttccctgctgtgttccttcgctcgcgggacacacaggggaaatcagcaacatctggtaagagaagcatctttgcccaggaaattgcggcaaggaggatagctgaagccaagggcccatcagttggggaagttgtgcccaacgtgggcccaccagagggtgccgtgacctgtgagacacccactcctaggaaccagggctgccagcttcctgggagcagccacagctttcagggacccaatctggtcacagggaaggggctcagggatcaagaagctgagcaggaagcccagactatccatgaagagaacatagcaagactgcaggccatggctcctgaggagatcctgcaggaacagcagcggttgctggcccagcttgaccccagcttggttgctttcttgagatctcacagccacacgcaagagcaaacaggagagacagcctctgaggagcagaggccaggaggaccctctgctaatgtcaccaaggaggaacccctcatgtcagcttttgccagtgagcccaggaagagagacaagctggagccagaagccccagctctggcattgcccgtgacccctcagaaagaatggctgcacatggacactgtcgagctggagaagctccactggacccaggacttgccccctgtccggcggcagcagacacaggagaggatgcaggctcgattcagtcttcagggagaactactggcccctgacgtggacctgcccacccacctgggtctgcaccaccatggagaggaggcagagagagcggggtattccctacaggagctgttccacctgacccgcagccaggtttcccagcagagagcactggcactgcatgtgttagcccaggtcatcagcagggcccaggctggtgagtttggggaccggctagcaggcagtgtcttaagcctccttttggatgctggtttcctcttcctactgcgcttctccttggatgacagagtggatggggtcattgcaaccgccatccgtgctcttcgggctctgctggtggctcctggagatgaggagctcctcgacagcaccttctcttggtaccatggagctttgacgttccctctgatgcccagccaggaggacaaggaggatgaggacgaggatgaagaatgcccagcaggaaaagcaaaaaggaaaagccctgaagaagaaagccggcctccacctgacctggcccgacatgatgtcatcaaggggctcctggctaccagcctgctgcctcggctgcgctacgtgctggaggtgacatacccaggacctgcggtggtccttgacatcctggctgtgctcatccgcctggcccggcattccctggaatcagccacaagggtcctggagtgccctcggctgatagagactatagttcgagagttcttgcccaccagttggtctcctgtgggggcagggcctacccctagtctatacaaagtaccctgtgctactgccatgaaactacttcgtgtcctggcctcagctgggaggaatattgctgcccggctgttgagcagctttgatctccggagccgcctgtgccgcatcatagctgaggctccccaagaactggccttgcccccagaggaagctgagatgctgagcaccgaggccctccgtctgtgggctgtggctgcctcctatggccagggcggttacctttacagggagctctacccagtgctgatgcgggccttgcaggtggtgccgcgggagctcagcacccacccacctcaacccctgtccatgcagcggatagcctcactgctcactctcctcacccagctaaccctggcagccggcagtacccctgctgaaaccatcagtgattctgctgaggccagcctctcggccaccccttccttagtcacttggacacaggtgtctgggctccagcctcttgttgagccgtgtctaaggcagaccttgaagttgctgtccagacctgagatgtggagagccgtgggcccagtgcccgttgcctgcctgttgttcctgggagcctactaccaggcctggagccagcaaccaagctcatgcccggaggattggctccaggacatgcagcgcctgtcagaggagctgctgctgccactgctgagtcagcccacactgggcagcctgtgggattcccttaggcactgctcccttctctgcaacccgctgtcctgtgtgccagcccttgaagctccccccagcctcgtgtcactgggctgctcgggaggctgcccccgtctcagtctggctggctcagcctcacccttcccattcctcactgccctcctctctcttcttaataccctggcccagatccacaaggggctgtgtggccagctggctgccatattggctgccccgggactccagaattacttcctccagtgtgtggctcctggggctgccccacacctcacacctttctctgcatgggccctgcgccatgagtaccacctgcagtacctggcactcgctctggcccagaaagcggcagcgctgcagccactgccagccacccatgctgccctctatcatggtatggccttggccctgctgagccggctgctgcccggaagtgagtacctcacccatgagctgctgctgagctgtgtattccggctggagttcctcccggaaagaacatcagggggtccagaggcagccgacttctctgaccagctgtcgttaggaagcagcagggtccctcggtgtgggcaagggactctgctggctcaggcctgccaggacctccccagcatccgcaactgctacctgactcattgctcgccagcccgagccagtctgctggcctcccaggctctgcaccgaggggagctacagcgagtcccaaccctgctactgcccatgcctacggagccgctgctgcccaccgactggcccttcctgccactgattcgcctctaccaccgggcttcagacaccccctcgggactctctcccacagacaccatgggcacagccatgcgggtcctgcagtgggtgctagttttggagagctggcgcccccaggctctctgggctgtgccccctgctgcccgcctggcacggctcatgtgtgtgttcctggtggacagtgagctgttccgggagtccccagtacagcatctggtggcagccctcctcgcccagctctgtcagcctcaagtcttgccaaacctcaacctggactgccgactccctggcctgacgtctttccctgacctctatgccaacttcctggatcattttgaggctgtctcttttggggaccacctctttggggccctggtcctcctgcccctgcagcgtcggttcagtgtcaccttgcgccttgccctctttggggaacacgtgggagccttgcgagctctgagcctgcctctgacccagttgcctgtgtccctggagtgttacacagtgcctcctgaagacaacctggccctccttcagctctacttccggaccctggttactggtgcgctccgcccacgttggtgccccgtgctctatgctgtggctgtggctcatgtcaatagcttcatcttctctcaggacccacagagctcagatgaggtcaaagctgcccgcaggagtatgctgcagaaaacatggctgctggcagatgagggtctccggcagcacctcctgcactataagcttcccaattccacgctcccagagggctttgagctctattctcagttgccccctctgcgtcagcactacctccagagactgacttcaacagtgctccaaaatggggtatcagagacctaggatagttgatatagatggaaagatgggtacgttgtcctgtatccagcctttcaacagatgtctggccagacgaagaacattgtgtcctaatggtaggcaggagaccaaggagcagaaggcttgccttcctgggagcaggttgtttgagctgttttagagcagtgagccctaccattacatcctgatatctggggcttctgaaggtctgtactgggagtgaagagtggcttagctatttacccgctctttggggacagggcaaactaaatgcatcccttcttacctaactcccaacccctgccctgggctgaggcatatgaatgctatagttgtgcattaaaataaatgttttttatctcctggaaa

SEQ ID NO: 187239 - DNA, 4182 bp, Artificial Sequence
  derived and/or modified sequence
atgctgagcagacccaagcccggcgagagcgaggtggacctgctgcacttccagagccagttcctggccgccggcgccgcccccgccgtgcagctggtgaagaagggcaacagaggcggcggcgacgccaacagcgacagaccccccctgcaggaccacagagacgtggtgatgctggacaacctgcccgacctgccccccgccctggtgcccagcccccccaagagagccagacccagccccggccactgcctgcccgaggacgaggaccccgaggagagactgagaagacacgaccagcacatcaccgccgtgctgaccaagatcatcgagagagacaccagcagcgtggccgtgaacctgcccgtgcccagcggcgtggccttccccgccgtgttcctgagaagcagagacacccagggcaagagcgccaccagcggcaagagaagcatcttcgcccaggagatcgccgccagaagaatcgccgaggccaagggccccagcgtgggcgaggtggtgcccaacgtgggcccccccgagggcgccgtgacctgcgagacccccacccccagaaaccagggctgccagctgcccggcagcagccacagcttccagggccccaacctggtgaccggcaagggcctgagagaccaggaggccgagcaggaggcccagaccatccacgaggagaacatcgccagactgcaggccatggcccccgaggagatcctgcaggagcagcagagactgctggcccagctggaccccagcctggtggccttcctgagaagccacagccacacccaggagcagaccggcgagaccgccagcgaggagcagagacccggcggccccagcgccaacgtgaccaaggaggagcccctgatgagcgccttcgccagcgagcccagaaagagagacaagctggagcccgaggcccccgccctggccctgcccgtgaccccccagaaggagtggctgcacatggacaccgtggagctggagaagctgcactggacccaggacctgccccccgtgagaagacagcagacccaggagagaatgcaggccagattcagcctgcagggcgagctgctggcccccgacgtggacctgcccacccacctgggcctgcaccaccacggcgaggaggccgagagagccggctacagcctgcaggagctgttccacctgaccagaagccaggtgagccagcagagagccctggccctgcacgtgctggcccaggtgatcagcagagcccaggccggcgagttcggcgacagactggccggcagcgtgctgagcctgctgctggacgccggcttcctgttcctgctgagattcagcctggacgacagagtggacggcgtgatcgccaccgccatcagagccctgagagccctgctggtggcccccggcgacgaggagctgctggacagcaccttcagctggtaccacggcgccctgaccttccccctgatgcccagccaggaggacaaggaggacgaggacgaggacgaggagtgccccgccggcaaggccaagagaaagagccccgaggaggagagcagacccccccccgacctggccagacacgacgtgatcaagggcctgctggccaccagcctgctgcccagactgagatacgtgctggaggtgacctaccccggccccgccgtggtgctggacatcctggccgtgctgatcagactggccagacacagcctggagagcgccaccagagtgctggagtgccccagactgatcgagaccatcgtgagagagttcctgcccaccagctggagccccgtgggcgccggccccacccccagcctgtacaaggtgccctgcgccaccgccatgaagctgctgagagtgctggccagcgccggcagaaacatcgccgccagactgctgagcagcttcgacctgagaagcagactgtgcagaatcatcgccgaggccccccaggagctggccctgccccccgaggaggccgagatgctgagcaccgaggccctgagactgtgggccgtggccgccagctacggccagggcggctacctgtacagagagctgtaccccgtgctgatgagagccctgcaggtggtgcccagagagctgagcacccaccccccccagcccctgagcatgcagagaatcgccagcctgctgaccctgctgacccagctgaccctggccgccggcagcacccccgccgagaccatcagcgacagcgccgaggccagcctgagcgccacccccagcctggtgacctggacccaggtgagcggcctgcagcccctggtggagccctgcctgagacagaccctgaagctgctgagcagacccgagatgtggagagccgtgggccccgtgcccgtggcctgcctgctgttcctgggcgcctactaccaggcctggagccagcagcccagcagctgccccgaggactggctgcaggacatgcagagactgagcgaggagctgctgctgcccctgctgagccagcccaccctgggcagcctgtgggacagcctgagacactgcagcctgctgtgcaaccccctgagctgcgtgcccgccctggaggccccccccagcctggtgagcctgggctgcagcggcggctgccccagactgagcctggccggcagcgccagccccttccccttcctgaccgccctgctgagcctgctgaacaccctggcccagatccacaagggcctgtgcggccagctggccgccatcctggccgcccccggcctgcagaactacttcctgcagtgcgtggcccccggcgccgccccccacctgacccccttcagcgcctgggccctgagacacgagtaccacctgcagtacctggccctggccctggcccagaaggccgccgccctgcagcccctgcccgccacccacgccgccctgtaccacggcatggccctggccctgctgagcagactgctgcccggcagcgagtacctgacccacgagctgctgctgagctgcgtgttcagactggagttcctgcccgagagaaccagcggcggccccgaggccgccgacttcagcgaccagctgagcctgggcagcagcagagtgcccagatgcggccagggcaccctgctggcccaggcctgccaggacctgcccagcatcagaaactgctacctgacccactgcagccccgccagagccagcctgctggccagccaggccctgcacagaggcgagctgcagagagtgcccaccctgctgctgcccatgcccaccgagcccctgctgcccaccgactggcccttcctgcccctgatcagactgtaccacagagccagcgacacccccagcggcctgagccccaccgacaccatgggcaccgccatgagagtgctgcagtgggtgctggtgctggagagctggagaccccaggccctgtgggccgtgccccccgccgccagactggccagactgatgtgcgtgttcctggtggacagcgagctgttcagagagagccccgtgcagcacctggtggccgccctgctggcccagctgtgccagccccaggtgctgcccaacctgaacctggactgcagactgcccggcctgaccagcttccccgacctgtacgccaacttcctggaccacttcgaggccgtgagcttcggcgaccacctgttcggcgccctggtgctgctgcccctgcagagaagattcagcgtgaccctgagactggccctgttcggcgagcacgtgggcgccctgagagccctgagcctgcccctgacccagctgcccgtgagcctggagtgctacaccgtgccccccgaggacaacctggccctgctgcagctgtacttcagaaccctggtgaccggcgccctgagacccagatggtgccccgtgctgtacgccgtggccgtggcccacgtgaacagcttcatcttcagccaggacccccagagcagcgacgaggtgaaggccgccagaagaagcatgctgcagaagacctggctgctggccgacgagggcctgagacagcacctgctgcactacaagctgcccaacagcaccctgcccgagggcttcgagctgtacagccagctgccccccctgagacagcactacctgcagagactgaccagcaccgtgctgcagaacggcgtgagcgagacctag

SEQ ID NO: 187240 - protein, 1093 aa, Artificial Sequence
  derived and/or modified sequence
MARPVRGGLGAPRRSPCLLLLWLLLLRLEPVTAAAGPRAPCAAACTCAGDSLDCGGRGLAALPGDLPSWTRSLNLSYNKLSEIDPAGFEDLPNLQEVYLNNNELTAVPSLGAASSHVVSLFLQHNKIRSVEGSQLKAYLSLEVLDLSLNNITEVRNTCFPHGPPIKELNLAGNRIGTLELGAFDGLSRSLLTLRLSKNRITQLPVRAFKLPRLTQLDLNRNRIRLIEGLTFQGLNSLEVLKLQRNNISKLTDGAFWGLSKMHVLHLEYNSLVEVNSGSLYGLTALHQLHLSNNSIARIHRKGWSFCQKLHELVLSFNNLTRLDEESLAELSSLSVLRLSHNSISHIAEGAFKGLRSLRVLDLDHNEISGTIEDTSGAFSGLDSLSKLTLFGNKIKSVAKRAFSGLEGLEHLNLGGNAIRSVQFDAFVKMKNLKELHISSDSFLCDCQLKWLPPWLIGRMLQAFVTATCAHPESLKGQSIFSVPPESFVCDDFLKPQIITQPETTMAMVGKDIRFTCSAASSSSSPMTFAWKKDNEVLTNADMENFVHVHAQDGEVMEYTTILHLRQVTFGHEGRYQCVITNHFGSTYSHKARLTVNVLPSFTKTPHDITIRTTTMARLECAATGHPNPQIAWQKDGGTDFPAARERRMHVMPDDDVFFITDVKIDDAGVYSCTAQNSAGSISANATLTVLETPSLVVPLEDRVVSVGETVALQCKATGNPPPRITWFKGDRPLSLTERHHLTPDNQLLVVQNVVAEDAGRYTCEMSNTLGTERAHSQLSVLPAAGCRKDGTTVGIFTIAVVSSIVLTSLVWVCIIYQTRKKSEEYSVTNTDETVVPPDVPSYLSSQGTLSDRQETVVRTEGGPQANGHIESNGVCPRDASHFPEPDTHSVACRQPKLCAGSAYHKEPWKAMEKAEGTPGPHKMEHGGRVVCSDCNTEVDCYSRGQAFHPQPVSRDSAQPSAPNGPEPGGSDQEHSPHHQCSRTAAGSCPECQGSLYPSNHDRMLTAVKKKPMASLDGKGDSSWTLARLYHPDSTELQPASSLTSGSPERAEAQYLLVSNGHLPKACDASPESTPLTGQLPGKQRVPLLLAPKS

SEQ ID NO: 187241 - protein, 996 aa, Artificial Sequence
  derived and/or modified sequence
NLSYNKLSEIDPAGFEDLPNLQEVYLNNNELTAVPSLGAASSHVVSLFLQHNKIRSVEGSQLKAYLSLEVLDLSLNNITEVRNTCFPHGPPIKELNLAGNRIGTLELGAFDGLSRSLLTLRLSKNRITQLPVRAFKLPRLTQLDLNRNRIRLIEGLTFQGLNSLEVLKLQRNNISKLTDGAFWGLSKMHVLHLEYNSLVEVNSGSLYGLTALHQLHLSNNSIARIHRKGWSFCQKLHELVLSFNNLTRLDEESLAELSSLSVLRLSHNSISHIAEGAFKGLRSLRVLDLDHNEISGTIEDTSGAFSGLDSLSKLNLGGNAIRSVQFDAFVKMKNLKELHISSDSFLCDCQLKWLPPWLIGRMLQAFVTATCAHPESLKGQSIFSVPPESFVCDDFLKPQIITQPETTMAMVGKDIRFTCSAASSSSSPMTFAWKKDNEVLTNADMENFVHVHAQDGEVMEYTTILHLRQVTFGHEGRYQCVITNHFGSTYSHKARLTVNVLPSFTKTPHDITIRTTTMARLECAATGHPNPQIAWQKDGGTDFPAARERRMHVMPDDDVFFITDVKIDDAGVYSCTAQNSAGSISANATLTVLETPSLVVPLEDRVVSVGETVALQCKATGNPPPRITWFKGDRPLSLTERHHLTPDNQLLVVQNVVAEDAGRYTCEMSNTLGTERAHSQLSVLPAAGCRKDGTTVGIFTIAVVSSIVLTSLVWVCIIYQTRKKSEEYSVTNTDETVVPPDVPSYLSSQGTLSDRQETVVRTEGGPQANGHIESNGVCPRDASHFPEPDTHSVACRQPKLCAGSAYHKEPWKAMEKAEGTPGPHKMEHGGRVVCSDCNTEVDCYSRGQAFHPQPVSRDSAQPSAPNGPEPGGSDQEHSPHHQCSRTAAGSCPECQGSLYPSNHDRMLTAVKKKPMASLDGKGDSSWTLARLYHPDSTELQPASSLTSGSPERAEAQYLLVSNGHLPKACDASPESTPLTGQLPGKQRVPLLLAPKS

SEQ ID NO: 187242 - protein, 1070 aa, Artificial Sequence
  derived and/or modified sequence
MARPVRGGLGAPRRSPCLLLLWLLLLRLEPVTAAAGPRAPCAAACTCAGDSLDCGGRGLAALPGDLPSWTRSLNLSYNKLSEIDPAGFEDLPNLQEVYLNNNELTAVPSLGAASSHVVSLFLQHNKIRSVEGSQLKAYLSLEVLDLSLNNITEVRNTCFPHGPPIKELNLAGNRIGTLELGAFDGLSRSLLTLRLSKNRITQLPVRAFKLPRLTQLDLNRNRIRLIEGLTFQGLNSLEVLKLQRNNISKLTDGAFWGLSKMHVLHLEYNSLVEVNSGSLYGLTALHQLHLSNNSIARIHRKGWSFCQKLHELVLSFNNLTRLDEESLAELSSLSVLRLSHNSISHIAEGAFKGLRSLRVLDLDHNEISGTIEDTSGAFSGLDSLSKLLLLEPSQSAGCSSPSQPHMSAGGRTLFGNKIKSVAKRAFSGLEGLEHLNLGGNAIRSVQFDAFVKMKNLKELHISSDSFLCDCQLKWLPPWLIGRMLQAFVTATCAHPESLKGQSIFSVPPESFVCDDFLKPQIITQPETTMAMVGKDIRFTCSAASSSSSPMTFAWKKDNEVLTNADMENFVHVHAQDGEVMEYTTILHLRQVTFGHEGRYQCVITNHFGSTYSHKARLTVNVLPSFTKTPHDITIRTTTMARLECAATGHPNPQIAWQKDGGTDFPAAQTPSLVVPLEDRVVSVGETVALQCKATGNPPPRITWFKGDRPLSLTERHHLTPDNQLLVVQNVVAEDAGRYTCEMSNTLGTERAHSQLSVLPAAGCRKDGTTVGIFTIAVVSSIVLTSLVWVCIIYQTRKKSEEYSVTNTDETVVPPDVPSYLSSQGTLSDRQETVVRTEGGPQANGHIESNGVCPRDASHFPEPDTHSVACRQPKLCAGSAYHKEPWKAMEKAEGTPGPHKMEHGGRVVCSDCNTEVDCYSRGQAFHPQPVSRDSAQPSAPNGPEPGGSDQEHSPHHQCSRTAAGSCPECQGSLYPSNHDRMLTAVKKKPMASLDGKGDSSWTLARLYHPDSTELQPASSLTSGSPERAEAQYLLVSNGHLPKACDASPESTPLTGQLPGKQRVPLLLAPKS

SEQ ID NO: 187243 - DNA, 3282 bp, Artificial Sequence
  derived and/or modified sequence
atggcccgccccgtgagaggcggactgggagcaccccgtcggagcccttgcctgctcctgctctggcttcttcttctccgcctggagccagttactgccgctgctgggcctcgagctccatgcgctgccgcctgcacctgcgcaggcgactccctcgattgtggcggtcgggggctggcagcacttcctggcgaccttccgtcatggacaagatccctgaacctttcatacaataaactatccgaaattgaccctgctggctttgaagatcttcctaacttgcaggaggtgtatctgaacaacaacgagctgactgctgttccctcacttggagcggccagctctcacgtcgtgagtcttttcctgcaacataataagatccgcagcgtagaagggagccagcttaaggcctacttatcgcttgaggttctggatctctcactaaataatattactgaagtgaggaatacctgtttcccccatggccctcctattaaggaactgaacctggcaggcaacagaattggcacccttgagttgggcgctttcgatggtctgtcccgaagtctcctaacgctgcgcctgtccaaaaaccgaatcacacagctccccgtaagagcctttaaactcccgagattgacccagctggatctgaacaggaaccggatccgcctgatcgaaggactaactttccaaggcttgaacagcctggaagtacttaaactgcagaggaacaacatctcaaagctgacagatggagccttttggggactgagcaaaatgcatgtcctccatctggagtataattcgctagtcgaggtgaactcaggttccttgtacgggttgacagctctgcaccaactgcatttaagtaataacagcatcgccaggattcacagaaaaggctggtctttttgccagaaactgcatgaactggtcctcagctttaacaatttgacccgtctcgatgaagagtccctcgccgaactgagcagcttaagcgtcttgcgtcttagtcacaatagcatcagccacatagcagagggagcctttaaaggactgcgcagcttacgagttcttgacctggatcacaatgagattagcggaacgatagaagacacctccggcgctttctcgggcctcgattccctgagtaagctgacactcttcggaaataaaattaagtcggtcgctaaacgagctttttctggactggaggggctggagcatctcaatttaggcggaaatgccatccgttcagtccagttcgacgcattcgttaagatgaaaaatttgaaggagctgcacatttcatccgatagttttctgtgtgactgtcagttgaagtggttgccaccttggctgatcgggcggatgctgcaggcctttgtcaccgccacatgcgctcatcccgagagtctgaaaggacagtccattttctctgtgcctcccgagtcatttgtctgcgatgattttctcaagccacagatcatcactcagcctgaaactacaatggctatggtcggtaaggacattcgttttacctgctccgccgcctcctcatccagttccccaatgacttttgcgtggaagaaggacaacgaggtcctgacaaacgcggacatggaaaattttgtacatgttcatgcccaggacggggaagtaatggagtatactaccatcctgcatctccgacaggtgacattcggccatgaaggaagataccagtgtgtgataacaaatcacttcggatccacctattcccataaagctcgactgacagttaatgtcctccctagtttcactaagacaccccatgacatcactattagaaccaccacgatggccagactggagtgcgcggcgactgggcaccccaaccctcaaatagcgtggcagaaagatggcggtactgatttccccgccgcacgggagcgtaggatgcacgttatgcccgatgatgacgtcttcttcatcaccgatgttaaaatcgacgacgccggcgtctacagctgcacagcccaaaattcagccggatccatttcagcaaatgccaccctgaccgtgcttgaaacaccttctctcgtggtgccactggaggatcgggtggtcagcgtcggggaaactgttgctctccagtgtaaagctacaggaaatccaccaccaaggatcacttggttcaagggtgaccggcctctgtcactgactgaaaggcaccacctcacacctgataatcaactgttggttgtgcagaacgtggtcgccgaggatgccggccgatatacctgcgaaatgagcaataccctgggtacagagcgcgctcacagccagctgagcgtcctgcctgctgcaggctgccgcaaagacggaactactgtagggattttcacaatagcagtcgtgtccagtatagtgcttacttcacttgtctgggtttgtattatctaccaaacccgcaagaaatctgaggagtattctgtcactaacacagacgagaccgtcgttcctccagacgtgccgtcctatctgtcgtcgcagggaaccctgtccgaccgccaggaaacagtggtgcgcactgaaggcggccctcaggctaatggtcatatcgagagcaacggcgtgtgtccaagagatgcatctcatttccctgagcccgacacccactcagttgcttgcagacagccgaaactgtgcgccggttctgcataccacaaggagccttggaaagcgatggagaaggctgaaggaaccccagggcctcataagatggaacacgggggtagagtcgtatgctcggactgtaatactgaggtggactgttatagccgcggccaggcatttcacccccagccagtctcaagggattcggcccagccctccgcccccaacggtcccgagcccgggggctccgatcaagagcatagcccccaccaccaatgctctcggactgctgcggggagttgtcctgagtgtcagggcagcctgtacccctctaaccacgaccgaatgctcacagcagtcaagaaaaaacctatggcttccctggacgggaagggcgatagctcctggactttggctaggttgtatcacccagatagcacagagctccagcccgcatcaagccttacaagcgggagtcccgaaagagccgaggcccagtacctccttgtaagcaatgggcacctccctaaggcttgcgatgctagccctgaatccaccccattgaccggtcaactgcccggcaaacaacgggttccactattactggcgcctaagagctag

SEQ ID NO: 187244 - DNA, 2991 bp, Artificial Sequence
  derived and/or modified sequence
aatctgagctataacaagctgtcagagatagatcccgctggcttcgaggacctgccaaatttacaggaagtttatcttaacaataacgagctaacagccgtcccctctctgggagccgcctcaagtcatgttgtaagcctgttcttgcaacacaataagatcagaagcgtggaaggcagtcagctgaaggcctatctgagtctggaagttctggatttgtcactgaataacattaccgaggtacgcaacacctgtttcccccacgggccacctatcaaagagttgaatctggccggaaacagaataggtactcttgagcttggggcctttgatggcctgtcccgttctctcctgacactccggctgagtaagaatagaattacgcagcttccagtgagagcgtttaaactgccacggttgacccagctagacctcaacaggaataggatcagattgatcgaagggttaacattccagggcctaaacagcctcgaggtcttgaaattgcaacgcaacaatatttctaagctgaccgacggtgcattctggggactgtctaagatgcatgtgctccatttagaatacaactcgctggtcgaagtgaactcgggttctctgtacggactgaccgccctccaccagttacacttaagcaacaactccattgctagaatacatagaaaggggtggtccttttgtcagaagctccacgaactcgttctgtctttcaataaccttactcgcctggatgaggagtcgctggctgagttgtctagcttgagtgtgctcaggctgagtcataacagcatttcccacattgctgaaggcgctttcaaaggactcagatcacttagggtgctagaccttgaccataatgaaatcagcggcacaattgaggatacgagtggcgcgttttctgggctagattcactctccaaactgaacctgggcggcaacgccattaggagtgtgcaattcgacgccttcgtaaagatgaaaaatttgaaagaactgcatatatcctccgactcattcctgtgtgactgccaacttaaatggctgcccccttggctcataggcaggatgctacaggccttcgtgaccgctacgtgcgctcatcctgagtctttaaaaggacaaagtatttttagtgtgccgcctgaaagtttcgtgtgtgatgatttcctcaagccacaaatcattacacaacctgaaactacaatggcaatggtgggcaaggacatacgctttacctgcagcgccgcctctagctcatcctcccctatgacgtttgcatggaagaaagacaacgaagtcctcactaatgcagacatggagaactttgtccacgtacacgcgcaggacggagaggttatggaatacactaccattctccatcttaggcaggtgacgttcggacacgagggtcgttaccagtgtgtgatcacaaaccacttcggaagcacctacagtcacaaagcccgacttaccgtgaacgtgctcccctcttttactaagacacctcacgacataaccatccgaactaccactatggctcgcctggaatgcgcggctacaggacacccaaacccgcagatcgcctggcagaaagatggtgggaccgacttccccgccgcacgggaaagacggatgcacgtaatgccggatgacgacgtctttttcatcaccgatgtgaagatcgacgatgctggagtttattcttgcactgcccagaacagtgccgggtccatcagcgctaacgctactctaactgtcctggagaccccaagcttggtggtccccttggaagacagagtggttagtgttggggaaaccgtagccctccaatgcaaggctacagggaaccctccacccaggattacgtggtttaaaggcgaccgcccactgtcgcttaccgagcgtcaccatttgacacctgataaccagcttctggttgtccaaaatgtggttgctgaggatgccggtcgctatacttgcgaaatgagtaatacactcgggaccgagcgtgcccattcgcaactctctgttcttccagcagcgggttgcagaaaagatggcactactgtgggcatcttcactatcgccgtcgtgtccagcattgtcctcacaagcctcgtctgggtgtgcattatctatcagacccgtaagaaaagcgaagaatactctgtgactaatactgacgagaccgtggtacctccagatgtgccctcttatctgtcttctcagggtactctgagtgacaggcaggagacagttgtacggactgaaggggggccacaagcgaatggccacattgaaagcaacggcgtgtgtcctagagatgcgtctcactttccagagccagacacacattcagtcgcgtgcagacagcccaaactgtgtgcaggctccgcataccataaggagccatggaaagccatggaaaaagccgagggcactcccggtcctcacaaaatggagcacggcggccgggtggtgtgctccgattgcaacacagaggtcgactgttattctaggggacaggcttttcatcctcagccagtgtcccgagactccgcccagccttccgctcctaacggtcccgaaccaggtggctccgaccaagagcatagtcctcatcaccagtgcagccggactgccgcgggttcttgcccagagtgtcagggttctctctatccatctaaccacgatcgaatgttgactgcagtgaaaaagaagccaatggcaagcctcgacggaaaaggagattcttcctggacactggcccgactgtatcatccagactctactgagctgcagccagcctcaagcttgacgagcggtagcccggaacgcgctgaagcccaatatctcctggtctctaacggccacttgcccaaagcctgtgatgcgtctcccgagtccactccacttaccggacagctccctggcaaacaacgtgtccccctcctcctcgcgcccaaaagctag

SEQ ID NO: 187245 - DNA, 3213 bp, Artificial Sequence
  derived and/or modified sequence
atggctcgccctgttagaggcgggctcggcgcaccaagaaggtcaccatgcctcttacttttgtggctgctcctgctgcgcctcgagcccgtcaccgcggccgccggccccagagctccgtgtgcggccgcctgcacatgtgcaggcgactcactggactgtggcggcagggggctggctgccctccccggcgatttaccatcctggactcgctccttgaacctttcttacaacaagctgtctgaaattgacccagctgggtttgaggacctccctaatctacaggaggtctacctgaataacaatgaacttacagcagtccctagtttgggggctgcatcatcccatgtcgtgagtctgttcttgcaacataataaaatccgctctgtggaaggcagccagttgaaggcgtacctgtccctcgaagtgttggacctatctttaaacaatattacggaggtgcgaaacacttgctttccccacggtccacccatcaaggaactgaacttggctgggaaccggattggaacactcgagcttggtgctttcgacggactgtccaggtcccttctgacactgaggctctctaaaaacaggataacacagctccccgtgagagcatttaagctaccccgcctgacacagctggacttaaacaggaataggataaggctgattgagggcttaacttttcaaggcttaaactcccttgaagtccttaaactccaaaggaacaacatttccaaactgaccgatggagctttttggggcttgtccaaaatgcacgtgctgcatctcgaatataattctctggtcgaggtgaacagtgggtcactttatggactcaccgcactgcaccaactgcacttgtccaataattcaatagctaggattcatagaaagggctggtctttctgtcagaaacttcacgagttggttctcagtttcaacaatctcactcggctggacgaggaatccctcgccgagttgagctccctatcggtactgcgcctcagccataactcaatatcccacatcgcggagggggctttcaagggcctgagaagccttagggtgttagatctggaccacaatgagatatctggcaccatagaagacacaagtggcgctttttctgggcttgacagtctcagtaagctgctcctgcttgaaccttcacaatctgccgggtgtagctcaccatcgcagcctcacatgtccgcaggtggacggacgctgttcggcaataagattaaaagtgttgcgaaacgtgctttttccgggctcgaaggcctcgaacacctcaacctcggtggtaacgcaatccgatccgtgcagttcgatgcttttgttaaaatgaagaaccttaaagaacttcacatttcttctgattcattcctgtgcgactgccagcttaagtggttgccaccatggctaattggccggatgctgcaggccttcgtgaccgctacgtgcgcccaccccgaatccctgaagggccagagtatcttctccgtgccacctgagagctttgtgtgcgacgactttctgaagccccagatcatcacacagccagaaaccactatggccatggttggaaaagatatcagattcacctgtagcgcagcttcttcctcctcatctcctatgactttcgcttggaaaaaggacaatgaggtgttgactaatgcagacatggagaatttcgtacacgtccacgcacaggatggagaagtcatggaatacacgacaatcctccacctgagacaggtcacttttgggcatgaaggacgttaccagtgtgtgattacaaaccactttggctctacttactcccataaggcccgtttgactgtcaatgtgttgccatctttcacgaaaaccccccacgatattactattaggaccaccacgatggcacgtctggagtgtgccgcgacagggcatccaaacccacagatagcttggcagaaagacggaggcactgatttccccgccgcgcagaccccaagcctggttgttcccctagaggaccgagtggtatcagtgggggagacagtggcactacaatgcaaggctaccggaaatcccccccccagaataacgtggttcaaaggcgatcggccactctctcttacagagcgccatcacctcacccccgacaaccagctcctggtggtacagaacgtcgtggccgaggacgccgggagatacacttgtgagatgagtaacaccctgggaaccgaacgggctcattctcaactgtcagtgcttcccgccgccggatgtcggaaggacggtaccactgtggggatattcacaatcgcagtcgtgtcatcaatcgtactgacgagcctcgtctgggtgtgtattatataccagacccgtaaaaaatctgaggaatatagcgtaactaacaccgacgaaacagttgtgccccccgacgtcccctcatatttaagttcccaagggactctgtctgatcgtcaggaaactgtcgtcagaaccgagggcggtcctcaggcaaacgggcacattgagagcaacggggtgtgcccccgagatgcatctcactttcctgagccagatacacacagtgtggcttgtcggcagcccaagctctgcgccggttcagcgtaccacaaagagccctggaaggctatggagaaagccgaaggcacaccaggtcctcataaaatggagcacggcggtagagtagtttgttctgattgcaacacagaagtggattgctatagccgcggccaggcattccaccctcagcctgtgtccagggacagtgcccagccctccgccccaaatggcccggaaccgggcgggagtgatcaggaacactctcctcaccaccagtgttcccggacagctgccgggtcctgtcccgagtgtcagggatcgttgtaccctagtaatcatgaccggatgctgacagccgtcaaaaagaaacccatggccagcctggacggaaaaggcgacagttcctggactctggcccggctgtaccacccggactctactgagcttcagcccgcaagttccctgacgtccgggagcccagagagggccgaggcccaatatctactggtgtcgaatggccaccttcctaaagcctgcgatgcctcccccgagtctacccctctaaccggacagctcccagggaagcagcgggtcccactgctgttagctcccaagtcctag

SEQ ID NO: 187246 - DNA, 3282 bp, Artificial Sequence
  derived and/or modified sequence
atggcccggcctgtgcggggcggcctgggcgcccccaggaggagcccctgcctgctgctgctgtggctgctgctgctgcggctggagcctgtgacagctgctgctggcccccgggccccctgtgccgccgcctgcacctgtgccggggacagcctggactgtggcggccggggcctggccgccctgcccggggacctgcccagctggaccaggagcctgaacctgagctacaacaagctgtctgaaattgatcctgctggctttgaggacctgcccaacctgcaggaggtgtacctgaacaacaatgagctgacagctgtgcccagcctgggcgccgccagcagccacgtggtgtccctcttcctgcagcacaacaagatccgctctgtggagggcagccagctgaaggcctacctgagcctggaggtgctggacctgagcctgaacaacatcacagaggtgaggaacacctgcttcccccacggcccccccatcaaggagctgaacctggccggcaacagaattggcaccctggagctgggcgcctttgatggcctgagccgcagcctgctgaccctgcggctgagcaagaaccgcatcacccagctgcctgtgcgggccttcaagctgccccggctgacccagctggacctgaacagaaaccgcatccgcctcatcgagggcctgaccttccagggcctgaacagcctggaggtgctgaagctgcagaggaacaacatcagcaagctgacagatggagccttctggggcctgagcaagatgcacgtgctgcacctggagtacaacagcctggtggaggtgaacagcggcagcctgtatggcctgacagccctgcaccagctgcacctgagcaacaacagcatcgcccgcatccacaggaagggctggagcttctgccagaagctgcacgagctggtgctgtccttcaacaacctgacccggctggatgaggagagcctggccgagctgagcagcctgtctgtgctgcggctgagccacaacagcatcagccacatcgccgagggcgccttcaagggcctgcggagcctgcgggtgctggacctggaccacaatgagatcagcggcaccatcgaggacaccagcggggccttcagcggcctggacagcctgagcaagctgaccctgtttggaaacaagatcaagtctgtggccaagagggccttcagcggcctggagggcctggagcacctgaacctgggcggcaatgccatccgctctgtgcagtttgatgcctttgtgaagatgaagaacctgaaggagctgcacatcagcagtgacagcttcctgtgtgactgccagctgaagtggctgcccccctggctgattggccgcatgctgcaggcctttgtgacagccacctgtgcccaccctgagagcctgaagggccagagcatcttctctgtgcccccagagagctttgtgtgtgatgacttcctgaagccccagatcatcacccagcctgagaccaccatggccatggtgggcaaggacatccgcttcacctgcagcgctgccagcagcagcagcagccccatgacctttgcctggaagaaggacaatgaggtgctgaccaatgctgacatggagaactttgtgcacgtgcacgcccaggatggagaggtgatggagtacaccaccatcctgcacctgcggcaggtgacctttggacatgagggccgctaccagtgtgtgatcaccaaccacttcggcagcacctacagccacaaggcccggctgactgtgaatgtgctgcccagcttcaccaagacccctcatgacatcaccatccgcaccaccaccatggcccggctggagtgtgccgccaccggccaccccaacccccagatcgcctggcagaaggatggcggcacagacttccctgctgcccgggagaggaggatgcacgtgatgccagatgatgatgtgttcttcatcacagatgtgaagattgatgatgctggggtgtacagctgcacagcccagaacagcgctggcagcatcagcgccaatgccaccctgactgtgctggagacccccagcctggtggtgcccctggaggacagagtggtgtctgtgggggagaccgtggccctgcagtgcaaggccactggaaaccccccaccccgcatcacctggttcaagggggaccggcccctgagcctgacagagcggcaccacctgaccccagacaaccagctgctggtggtgcagaatgtggtggccgaggatgctggccgctacacctgtgagatgagcaacaccctgggcacagagcgggcccacagccagctgtctgtgctgcctgctgctggctgcaggaaggatggcaccaccgtgggcatcttcaccatcgctgtggtgagcagcatcgtgctgaccagcctggtgtgggtgtgcatcatctaccagaccaggaagaagtctgaggagtacagcgtgaccaacacagatgaaacagtggtgcccccagatgtgcccagctacctgagcagccagggcaccctgagtgaccggcaggagaccgtggtgaggacagaaggaggcccccaggccaacggccacatcgagagcaatggagtgtgccccagagatgccagccacttccctgagccagacacccacagcgtggcctgccggcagcccaagctgtgtgccggcagcgcctaccacaaggagccctggaaggccatggagaaggccgagggcaccccaggcccccacaagatggagcacggcggccgggtggtgtgcagcgactgcaacacagaggtggactgctacagccggggccaggccttccacccccagcctgtgtcccgggacagcgcccagcccagcgccccaaatggacctgagcccggcggcagtgaccaggagcacagcccccaccaccagtgcagcaggacagctgctggcagctgcccagagtgccagggcagcctgtaccccagcaaccacgacaggatgctgacagctgtgaagaagaagcccatggccagcctggatggcaagggggacagctcctggaccctggcccggctgtaccacccagacagcacagagctgcagcctgccagcagcctgaccagcggcagccctgagcgggcagaggcccagtacctgctggtgtccaatggccacctgcccaaggcctgtgatgccagccctgagagcacccccctgaccggccagctgcccgggaagcagagggtgcccctgctgctggcccccaagagctag

SEQ ID NO: 187247 - DNA, 2991 bp, Artificial Sequence
  derived and/or modified sequence
aacctgagctacaacaagctgtctgaaattgatcctgctggctttgaggacctgcccaacctgcaggaggtgtacctgaacaacaatgagctgacagctgtgcccagcctgggcgccgccagcagccacgtggtgtccctcttcctgcagcacaacaagatccgctctgtggagggcagccagctgaaggcctacctgagcctggaggtgctggacctgagcctgaacaacatcacagaggtgaggaacacctgcttcccccacggcccccccatcaaggagctgaacctggccggcaaccgcatcggcaccctggagctgggcgcctttgatggcctgagccgcagcctgctgaccctgcggctgagcaagaaccgcatcacccagctgcctgtgcgggccttcaagctgccccggctgacccagctggacctgaacagaaaccgcatccggctgattgagggcctgaccttccagggcctgaacagcctggaggtgctgaagctgcagaggaacaacatcagcaagctgacagatggagccttctggggcctgagcaagatgcacgtgctgcacctggagtacaacagcctggtggaggtgaacagcggcagcctgtatggcctgacagccctgcaccagctgcacctgagcaacaacagcatcgcccgcatccacaggaagggctggagcttctgccagaagctgcacgagctggtgctgtccttcaacaacctgacccggctggatgaggagagcctggccgagctgagcagcctgtctgtgctgcggctgagccacaacagcatcagccacatcgccgagggcgccttcaagggcctgcggagcctgcgggtgctggacctggaccacaatgagatcagcggcaccatcgaggacaccagcggggccttcagcggcctggacagcctgagcaagctgaacctgggcggcaatgccatccgctctgtgcagtttgatgcctttgtgaagatgaagaacctgaaggagctgcacatcagcagtgacagcttcctgtgtgactgccagctgaagtggctgcccccctggctgattggaaggatgctgcaggcctttgtgacagccacctgtgcccaccctgagagcctgaagggccagagcatcttctctgtgcccccagagagctttgtgtgtgatgacttcctgaagccccagatcatcacccagcctgagaccaccatggccatggtgggcaaggacatccgcttcacctgcagcgctgccagcagcagcagcagccccatgacctttgcctggaagaaggacaatgaggtgctgaccaatgctgacatggagaactttgtgcacgtgcacgcccaggatggagaggtgatggagtacaccaccatcctgcacctgcggcaggtgaccttcggccacgagggccgctaccagtgtgtgatcaccaaccacttcggcagcacctacagccacaaggcccggctgactgtgaatgtgctgcccagcttcaccaagacccctcatgacatcaccatccgcaccaccaccatggcccggctggagtgtgccgccaccggccaccccaacccccagatcgcctggcagaaggatggcggcacagacttccctgctgcccgggagaggaggatgcacgtgatgccagatgatgatgtgttcttcatcacagatgtgaagattgatgatgctggggtgtacagctgcacagcccagaacagcgctggcagcatcagcgccaatgccaccctgactgtgctggagacccccagcctggtggtgcccctggaggacagagtggtgtctgtgggggagaccgtggccctgcagtgcaaggccaccggcaaccccccaccccgcatcacctggttcaagggggaccggcccctgagcctgacagagcggcaccacctgaccccagacaaccagctgctggtggtgcagaatgtggtggctgaagatgctggccgctacacctgtgagatgagcaacaccctgggcacagagcgggcccacagccagctgtctgtgctgcctgctgctggctgcaggaaggatggcaccaccgtgggcatcttcaccatcgctgtggtgagcagcatcgtgctgaccagcctggtgtgggtgtgcatcatctaccagaccaggaagaagtctgaggagtacagcgtgaccaacacagatgagaccgtggtgcccccagatgtgcccagctacctgagcagccagggcaccctgagtgaccggcaggagaccgtggtgaggacagagggcggcccccaggccaacggccacatcgagagcaatggagtgtgccccagagatgccagccacttccctgagccagacacccacagcgtggcctgccggcagcccaagctgtgtgccggcagcgcctaccacaaggagccctggaaggccatggagaaggccgagggcaccccaggcccccacaagatggagcacggcggccgggtggtgtgcagcgactgcaacacagaggtggactgctacagccggggccaggccttccacccccagcctgtgtcccgggacagcgcccagcccagcgcccccaacggccctgagcccggcggcagtgaccaggagcacagcccccaccaccagtgcagcaggacagctgctggcagctgcccagagtgccagggcagcctgtaccccagcaaccacgacaggatgctgacagctgtgaagaagaagcccatggccagcctggatggaaaaggagacagctcctggaccctggcccggctgtaccacccagacagcacagagctgcagcctgccagcagcctgaccagcggcagccctgagagagctgaggcccagtacctgctggtgtccaatggccacctgcccaaggcctgtgatgccagccctgagagcacccccctgaccggccagctgcccgggaagcagagggtgcccctgctgctggcccccaagagctag

SEQ ID NO: 187248 - DNA, 3213 bp, Artificial Sequence
  derived and/or modified sequence
atggcccggcctgtgcggggcggcctgggcgcccccaggaggagcccctgcctgctgctgctgtggctgctgctgctgcggctggagcctgtgacagctgctgctggcccccgggccccctgtgccgccgcctgcacctgtgccggggacagcctggactgtggcggccggggcctggccgccctgcccggggacctgcccagctggaccaggagcctgaacctgagctacaacaagctgtctgaaattgatcctgctggctttgaggacctgcccaacctgcaggaggtgtacctgaacaacaatgagctgacagctgtgcccagcctgggcgccgccagcagccacgtggtgtccctcttcctgcagcacaacaagatccgctctgtggagggcagccagctgaaggcctacctgagcctggaggtgctggacctgagcctgaacaacatcacagaggtgaggaacacctgcttcccccacggcccccccatcaaggagctgaacctggccggcaacagaattggcaccctggagctgggcgcctttgatggcctgagccgcagcctgctgaccctgcggctgagcaagaaccgcatcacccagctgcctgtgcgggccttcaagctgccccggctgacccagctggacctgaacagaaaccgcatccgcctcatcgagggcctgaccttccagggcctgaacagcctggaggtgctgaagctgcagaggaacaacatcagcaagctgacagatggagccttctggggcctgagcaagatgcacgtgctgcacctggagtacaacagcctggtggaggtgaacagcggcagcctgtatggcctgacagccctgcaccagctgcacctgagcaacaacagcatcgcccgcatccacaggaagggctggagcttctgccagaagctgcacgagctggtgctgtccttcaacaacctgacccggctggatgaggagagcctggccgagctgagcagcctgtctgtgctgcggctgagccacaacagcatcagccacatcgccgagggcgccttcaagggcctgcggagcctgcgggtgctggacctggaccacaatgagatcagcggcaccatcgaggacaccagcggggccttcagcggcctggacagcctgagcaagctgctgctgctggagcccagccagagcgctggctgcagcagccccagccagccccacatgtctgctgggggccgcaccctgtttggaaacaagatcaagtctgtggccaagagggccttcagcggcctggagggcctggagcacctgaacctgggcggcaatgccatccgctctgtgcagtttgatgcctttgtgaagatgaagaacctgaaggagctgcacatcagcagtgacagcttcctgtgtgactgccagctgaagtggctgcccccctggctgattggccgcatgctgcaggcctttgtgacagccacctgtgcccaccctgagagcctgaagggccagagcatcttctctgtgcccccagagagctttgtgtgtgatgacttcctgaagccccagatcatcacccagcctgagaccaccatggccatggtgggcaaggacatccgcttcacctgcagcgctgccagcagcagcagcagccccatgacctttgcctggaagaaggacaatgaggtgctgaccaatgctgacatggagaactttgtgcacgtgcacgcccaggatggagaggtgatggagtacaccaccatcctgcacctgcggcaggtgacctttggacatgagggccgctaccagtgtgtgatcaccaaccacttcggcagcacctacagccacaaggcccggctgactgtgaatgtgctgcccagcttcaccaagacccctcatgacatcaccatccgcaccaccaccatggcccggctggagtgtgccgccaccggccaccccaacccccagatcgcctggcagaaggatggcggcacagacttccctgctgcccagacccccagcctggtggtgcccctggaggacagagtggtgtctgtgggggagaccgtggccctgcagtgcaaggccaccggcaaccccccaccccgcatcacctggttcaagggggaccggcccctgagcctgacagagcggcaccacctgaccccagacaaccagctgctggtggtgcagaatgtggtggctgaagatgctggccgctacacctgtgagatgagcaacaccctgggcacagagcgggcccacagccagctgtctgtgctgcctgctgctggctgcaggaaggatggcaccaccgtgggcatcttcaccatcgctgtggtgagcagcatcgtgctgaccagcctggtgtgggtgtgcatcatctaccagaccaggaagaagtctgaggagtacagcgtgaccaacacagatgagaccgtggtgcccccagatgtgcccagctacctgagcagccagggcaccctgagtgaccggcaggagaccgtggtgaggacagagggcggcccccaggccaacggccacatcgagagcaatggagtgtgccccagagatgccagccacttccctgagccagacacccacagcgtggcctgccggcagcccaagctgtgtgccggcagcgcctaccacaaggagccctggaaggccatggagaaggccgagggcaccccaggcccccacaagatggagcacggcggccgggtggtgtgcagcgactgcaacacagaggtggactgctacagccggggccaggccttccacccccagcctgtgtcccgggacagcgcccagcccagcgcccccaacggccctgagcccggcggcagtgaccaggagcacagcccccaccaccagtgcagcaggacagctgctggcagctgcccagagtgccagggcagcctgtaccccagcaaccacgacaggatgctgacagctgtgaagaagaagcccatggccagcctggatggaaaaggagacagctcctggaccctggcccggctgtaccacccagacagcacagagctgcagcctgccagcagcctgaccagcggcagccctgagagagctgaggcccagtacctgctggtgtccaatggccacctgcccaaggcctgtgatgccagccctgagagcacccccctgaccggccagctgcccgggaagcagagggtgcccctgctgctggcccccaagagctag

SEQ ID NO: 187249 - DNA, 5273 bp, Artificial Sequence
  derived and/or modified sequence
gctctctggccgcggcgtggggacagcgaggcgcactggggcctcccagcgcggggccggccgcgccgtccagcccgaggtctacggctttgcgctccgagcccagaggaagatgcctgccggcaccgagctcgggctgcggggctgaacgcctgtcttccaggcgcagcggcagcactgccctcggccggtgtcggtagcggcactcggcgtgccccgggcggacgaagagcgcaggctgggtacaccttgcccgaatcggcggagttcgcagctagcgcgggcgggccggccggcccggatgggcgcggggtttgcggcccccgccgggtgctccggagcggcccgggcaccgggggcacgctgagtgccggagccgcggccgcagagagaacttggggcgggggccatgccccggtgcggagtctagagccgagcggagcgccccgcgggcccgcccgcgtctgcggccgttcgggtcctcacagtccccgcgcccggagttcgcagcgcgctccagacaagatggcgcggccggtccggggagggctcggggccccgcgccgctcgccttgccttctccttctctggctgcttttgcttcggctggagccggtgaccgccgcggccggcccgcgggcgccctgcgcggccgcctgcacttgcgctggggactcgctggactgcggtgggcgcgggctggctgcgttgcccggggacctgccctcctggacgcggagcctaaacctgagttacaacaaactctctgagattgaccctgctggttttgaggacttgccgaacctacaggaagtgtacctcaataataatgagttgacagcggtaccatccctgggcgctgcttcatcacatgtcgtctctctctttctgcagcacaacaagattcgcagcgtggaggggagccagctgaaggcctacctttccttagaagtgttagatctgagtttgaacaacatcacggaagtgcggaacacctgctttccacacggaccgcctataaaggagctcaacctggcaggcaatcggattggcaccctggagttgggagcatttgatggtctgtcacggtcgctgctaactcttcgcctgagcaaaaacaggatcacccagcttcctgtaagagcattcaagctacccaggctgacacaactggacctcaatcggaacaggattcggctgatagagggcctcaccttccaggggctcaacagcttggaggtgctgaagcttcagcgaaacaacatcagcaaactgacagatggggccttctggggactgtccaagatgcatgtgctgcacctggagtacaacagcctggtagaagtgaacagcggctcgctctacggcctcacggccctgcatcagctccacctcagcaacaattccatcgctcgcattcaccgcaagggctggagcttctgccagaagctgcatgagttggtcctgtccttcaacaacctgacacggctggacgaggagagcctggccgagctgagcagcctgagtgtcctgcgtctcagccacaattccatcagccacattgcggagggtgccttcaagggactcaggagcctgcgagtcttggatctggaccataacgagatttcgggcacaatagaggacacgagcggcgccttctcagggctcgacagcctcagcaagctgactctgtttggaaacaagatcaagtctgtggctaagagagcattctcggggctggaaggcctggagcacctgaaccttggagggaatgcgatcagatctgtccagtttgatgcctttgtgaagatgaagaatcttaaagagctccatatcagcagcgacagcttcctgtgtgactgccagctgaagtggctgcccccgtggctaattggcaggatgctgcaggcctttgtgacagccacctgtgcccacccagaatcactgaagggtcagagcattttctctgtgccaccagagagtttcgtgtgcgatgacttcctgaagccacagatcatcacccagccagaaaccaccatggctatggtgggcaaggacatccggtttacatgctcagcagccagcagcagcagctcccccatgacctttgcctggaagaaagacaatgaagtcctgaccaatgcagacatggagaactttgtccacgtccacgcgcaggacggggaagtgatggagtacaccaccatcctgcacctccgtcaggtcactttcgggcacgagggccgctaccaatgtgtcatcaccaaccactttggctccacctattcacataaggccaggctcaccgtgaatgtgttgccatcattcaccaaaacgccccacgacataaccatccggaccaccaccatggcccgcctcgaatgtgctgccacaggtcacccaaaccctcagattgcctggcagaaggatggaggcacggatttccccgctgcccgtgagcgacgcatgcatgtcatgccggatgacgacgtgtttttcatcactgatgtgaaaatagatgacgcaggggtttacagctgtactgctcagaactcagccggttctatttcagctaatgccaccctgactgtcctagagaccccatccttggtggtccccttggaagaccgtgtggtatctgtgggagaaacagtggccctccaatgcaaagccacggggaaccctccgccccgcatcacctggttcaagggggaccgcccgctgagcctcactgagcggcaccacttgacccctgacaaccagctcctggtggttcagaacgtggtggcagaggatgcgggccgatatacctgtgagatgtccaacaccctgggcacggagcgagctcacagccagctgagcgtcctgcccgcagcaggctgcaggaaggatgggaccacggtaggcatcttcaccattgctgtcgtgagcagcatcgtcctgacgtcactggtctgggtgtgcatcatctaccagaccaggaagaagagtgaagagtacagtgtcaccaacacagatgaaaccgtcgtgccaccagatgttccaagctacctctcttctcaggggaccctttctgaccgacaagaaaccgtggtcaggaccgagggtggccctcaggccaatgggcacattgagagcaatggtgtgtgtccaagagatgcaagccactttccagagcccgacactcacagcgttgcctgcaggcagccaaagctctgtgctgggtctgcgtatcacaaagagccgtggaaagcgatggagaaagctgaagggacacctgggccacataagatggaacacggtggccgggtcgtatgcagtgactgcaacaccgaagtggactgttactccaggggacaagccttccacccccagcctgtgtccagagacagcgcacagccaagtgcgccaaatggcccggagccgggtgggagtgaccaagagcattctccacatcaccagtgcagcaggactgccgctgggtcctgccccgagtgccaagggtcgctctaccccagtaaccacgatagaatgctgacggctgtgaagaaaaagccaatggcatctctagatgggaaaggggattcttcctggactttagcaaggttgtatcacccggactccacagagctacagcctgcatcttcattaacttcaggcagtccagagcgcgcggaagcccagtacttgcttgtttccaatggccacctccccaaagcatgtgacgccagtcccgagtccacgccactgacaggacagctccccgggaaacagagggtgccactgctgttggcaccaaaaagctaggttttgtctacctcagttcttgtcataccaatctctacgggaaagagaggtaggagaggctgcgaggaagcttgggttcaagcgtcactcatctgtacatagttgtaactcccatgtggagtatcagtcgctcacaggacttggatctgaagcacagtaaacgcaagaggggatttgtgtacaaaaggcaaaaaaagtatttgatatcattgtacataagagttttcagagatttcatatatatcttttacagaggctattttaatctttagtgcatggttaacagaaaaaaattatacaattttgacaatattatttttcgtatcaggttgctgtttaattttggagggggtggggaaatagttctggtgccttaacgcatggctggaatttatagaggctacaaccacatttgttcacaggagtttttggtgcggggtgggaaggatggaaggccttggatttatattgcacttcatagacccctaggctgctgtgcggtgggactccacatgcgccggaaggagcttcaggtgagcactgctcatgtgtggatgcccctgcaacaggcttccctgtctgtagagccaggggtgcaagtgccatccacacttgcagtgaatggcttttccttttaggtttaagtcctgtctgtctgtaaggcgtagaatctgtccgtctgtaaggcgtagaatgagggttgttaatccatcacaagcaaaaggtcagaacagttaaacactgcctttcctcctcctcttattttatgataaaagcaaatgtggccttctcagtatcattcgattgctatttgagacttttaaattaaggtaaaggctgctggtgttggtacctgtggatttttctatactgatgttttcgttttgccaatataatgagtattacattggccttgggggacagaaaggaggaagttctgacttttcagggctaccttatttctactaaggacccagagcaggcctgtccatgccattccttcgcacagatgaaactgagctgggactggaaaggacagcccttgacctgggttctgggtataatttgcacttttgagactggtagctaaccatcttatgagtgccaatgtgtcatttagtaaaacttaaatagaaacaaggtccttcaaatgttcctttggccaaaagctgaagggagttactgagaaaatagttaacaattactgtcaggtgtcatcactgttcaaaaggtaagcacatttagaattttgttcttgacagttaactgactaatcttacttccacaaaatatgtgaatttgctgcttctgagaggcaatgtgaaagagggagtattacttttatgtacaaagttatttatttatagaaattttggtacagtgtacattgaaaaccatgtaaaatattgaagtgtctaacaaatggcattgaagtgtctttaataaaggttcatttataaatgtca

SEQ ID NO: 187250 - DNA, 4456 bp, Artificial Sequence
  derived and/or modified sequence
aacctgagttacaacaaactctctgagattgaccctgctggttttgaggacttgccgaacctacaggaagtgtacctcaataataatgagttgacagcggtaccatccctgggcgctgcttcatcacatgtcgtctctctctttctgcagcacaacaagattcgcagcgtggaggggagccagctgaaggcctacctttccttagaagtgttagatctgagtttgaacaacatcacggaagtgcggaacacctgctttccacacggaccgcctataaaggagctcaacctggcaggcaatcggattggcaccctggagttgggagcatttgatggtctgtcacggtcgctgctaactcttcgcctgagcaaaaacaggatcacccagcttcctgtaagagcattcaagctacccaggctgacacaactggacctcaatcggaacaggattcggctgatagagggcctcaccttccaggggctcaacagcttggaggtgctgaagcttcagcgaaacaacatcagcaaactgacagatggggccttctggggactgtccaagatgcatgtgctgcacctggagtacaacagcctggtagaagtgaacagcggctcgctctacggcctcacggccctgcatcagctccacctcagcaacaattccatcgctcgcattcaccgcaagggctggagcttctgccagaagctgcatgagttggtcctgtccttcaacaacctgacacggctggacgaggagagcctggccgagctgagcagcctgagtgtcctgcgtctcagccacaattccatcagccacattgcggagggtgccttcaagggactcaggagcctgcgagtcttggatctggaccataacgagatttcgggcacaatagaggacacgagcggcgccttctcagggctcgacagcctcagcaagctgaaccttggagggaatgcgatcagatctgtccagtttgatgcctttgtgaagatgaagaatcttaaagagctccatatcagcagcgacagcttcctgtgtgactgccagctgaagtggctgcccccgtggctaattggcaggatgctgcaggcctttgtgacagccacctgtgcccacccagaatcactgaagggtcagagcattttctctgtgccaccagagagtttcgtgtgcgatgacttcctgaagccacagatcatcacccagccagaaaccaccatggctatggtgggcaaggacatccggtttacatgctcagcagccagcagcagcagctcccccatgacctttgcctggaagaaagacaatgaagtcctgaccaatgcagacatggagaactttgtccacgtccacgcgcaggacggggaagtgatggagtacaccaccatcctgcacctccgtcaggtcactttcgggcacgagggccgctaccaatgtgtcatcaccaaccactttggctccacctattcacataaggccaggctcaccgtgaatgtgttgccatcattcaccaaaacgccccacgacataaccatccggaccaccaccatggcccgcctcgaatgtgctgccacaggtcacccaaaccctcagattgcctggcagaaggatggaggcacggatttccccgctgcccgtgagcgacgcatgcatgtcatgccggatgacgacgtgtttttcatcactgatgtgaaaatagatgacgcaggggtttacagctgtactgctcagaactcagccggttctatttcagctaatgccaccctgactgtcctagagaccccatccttggtggtccccttggaagaccgtgtggtatctgtgggagaaacagtggccctccaatgcaaagccacggggaaccctccgccccgcatcacctggttcaagggggaccgcccgctgagcctcactgagcggcaccacttgacccctgacaaccagctcctggtggttcagaacgtggtggcagaggatgcgggccgatatacctgtgagatgtccaacaccctgggcacggagcgagctcacagccagctgagcgtcctgcccgcagcaggctgcaggaaggatgggaccacggtaggcatcttcaccattgctgtcgtgagcagcatcgtcctgacgtcactggtctgggtgtgcatcatctaccagaccaggaagaagagtgaagagtacagtgtcaccaacacagatgaaaccgtcgtgccaccagatgttccaagctacctctcttctcaggggaccctttctgaccgacaagaaaccgtggtcaggaccgagggtggccctcaggccaatgggcacattgagagcaatggtgtgtgtccaagagatgcaagccactttccagagcccgacactcacagcgttgcctgcaggcagccaaagctctgtgctgggtctgcgtatcacaaagagccgtggaaagcgatggagaaagctgaagggacacctgggccacataagatggaacacggtggccgggtcgtatgcagtgactgcaacaccgaagtggactgttactccaggggacaagccttccacccccagcctgtgtccagagacagcgcacagccaagtgcgccaaatggcccggagccgggtgggagtgaccaagagcattctccacatcaccagtgcagcaggactgccgctgggtcctgccccgagtgccaagggtcgctctaccccagtaaccacgatagaatgctgacggctgtgaagaaaaagccaatggcatctctagatgggaaaggggattcttcctggactttagcaaggttgtatcacccggactccacagagctacagcctgcatcttcattaacttcaggcagtccagagcgcgcggaagcccagtacttgcttgtttccaatggccacctccccaaagcatgtgacgccagtcccgagtccacgccactgacaggacagctccccgggaaacagagggtgccactgctgttggcaccaaaaagctaggttttgtctacctcagttcttgtcataccaatctctacgggaaagagaggtaggagaggctgcgaggaagcttgggttcaagcgtcactcatctgtacatagttgtaactcccatgtggagtatcagtcgctcacaggacttggatctgaagcacagtaaacgcaagaggggatttgtgtacaaaaggcaaaaaaagtatttgatatcattgtacataagagttttcagagatttcatatatatcttttacagaggctattttaatctttagtgcatggttaacagaaaaaaattatacaattttgacaatattatttttcgtatcaggttgctgtttaattttggagggggtggggaaatagttctggtgccttaacgcatggctggaatttatagaggctacaaccacatttgttcacaggagtttttggtgcggggtgggaaggatggaaggccttggatttatattgcacttcatagacccctaggctgctgtgcggtgggactccacatgcgccggaaggagcttcaggtgagcactgctcatgtgtggatgcccctgcaacaggcttccctgtctgtagagccaggggtgcaagtgccatccacacttgcagtgaatggcttttccttttaggtttaagtcctgtctgtctgtaaggcgtagaatctgtccgtctgtaaggcgtagaatgagggttgttaatccatcacaagcaaaaggtcagaacagttaaacactgcctttcctcctcctcttattttatgataaaagcaaatgtggccttctcagtatcattcgattgctatttgagacttttaaattaaggtaaaggctgctggtgttggtacctgtggatttttctatactgatgttttcgttttgccaatataatgagtattacattggccttgggggacagaaaggaggaagttctgacttttcagggctaccttatttctactaaggacccagagcaggcctgtccatgccattccttcgcacagatgaaactgagctgggactggaaaggacagcccttgacctgggttctgggtataatttgcacttttgagactggtagctaaccatcttatgagtgccaatgtgtcatttagtaaaacttaaatagaaacaaggtccttcaaatgttcctttggccaaaagctgaagggagttactgagaaaatagttaacaattactgtcaggtgtcatcactgttcaaaaggtaagcacatttagaattttgttcttgacagttaactgactaatcttacttccacaaaatatgtgaatttgctgcttctgagaggcaatgtgaaagagggagtattacttttatgtacaaagttatttatttatagaaattttggtacagtgtacattgaaaaccatgtaaaatattgaagtgtctaacaaatggcattgaagtgtctttaataaaggttcatttataaatgtc

SEQ ID NO: 187251 - DNA, 5283 bp, Artificial Sequence
  derived and/or modified sequence
gattgttcggctgcgaggtcggcgggactcttgctgcgcggaggagccgtgcggaacccgaggctgcgcgcgcgcgcgcgctctctggccgcggcgtggggacagcgaggcgcactggggcctcccagcgcggggccggccgcgccgtccagcccgaggtctacggctttgcgctccgagcccagaggaagatgcctgccggcaccgagctcgggctgcggggctgaacgcctgtcttccaggcgcagcggcagcactgccctcggccggtgtcggtagcggcactcggcgtgccccgggcggacgaagagcgcaggctgggtacaccttgcccgaatcggcggagttcgcagctagcgcgggcgggccggccggcccggatgggcgcggggtttgcggcccccgccgggtgctccggagcggcccgggcaccgggggcacgctgagtgccggagccgcggccgcagagagaacttggggcgggggccatgccccggtgcggagtctagagccgagcggagcgccccgcgggcccgcccgcgtctgcggccgttcgggtcctcacagtccccgcgcccggagttcgcagcgcgctccagacaagatggcgcggccggtccggggagggctcggggccccgcgccgctcgccttgccttctccttctctggctgcttttgcttcggctggagccggtgaccgccgcggccggcccgcgggcgccctgcgcggccgcctgcacttgcgctggggactcgctggactgcggtgggcgcgggctggctgcgttgcccggggacctgccctcctggacgcggagcctaaacctgagttacaacaaactctctgagattgaccctgctggttttgaggacttgccgaacctacaggaagtgtacctcaataataatgagttgacagcggtaccatccctgggcgctgcttcatcacatgtcgtctctctctttctgcagcacaacaagattcgcagcgtggaggggagccagctgaaggcctacctttccttagaagtgttagatctgagtttgaacaacatcacggaagtgcggaacacctgctttccacacggaccgcctataaaggagctcaacctggcaggcaatcggattggcaccctggagttgggagcatttgatggtctgtcacggtcgctgctaactcttcgcctgagcaaaaacaggatcacccagcttcctgtaagagcattcaagctacccaggctgacacaactggacctcaatcggaacaggattcggctgatagagggcctcaccttccaggggctcaacagcttggaggtgctgaagcttcagcgaaacaacatcagcaaactgacagatggggccttctggggactgtccaagatgcatgtgctgcacctggagtacaacagcctggtagaagtgaacagcggctcgctctacggcctcacggccctgcatcagctccacctcagcaacaattccatcgctcgcattcaccgcaagggctggagcttctgccagaagctgcatgagttggtcctgtccttcaacaacctgacacggctggacgaggagagcctggccgagctgagcagcctgagtgtcctgcgtctcagccacaattccatcagccacattgcggagggtgccttcaagggactcaggagcctgcgagtcttggatctggaccataacgagatttcgggcacaatagaggacacgagcggcgccttctcagggctcgacagcctcagcaagctccttttattagagccatcccagtctgctggctgcagctccccgtcccagccccatatgtctgctgggggaaggactctgtttggaaacaagatcaagtctgtggctaagagagcattctcggggctggaaggcctggagcacctgaaccttggagggaatgcgatcagatctgtccagtttgatgcctttgtgaagatgaagaatcttaaagagctccatatcagcagcgacagcttcctgtgtgactgccagctgaagtggctgcccccgtggctaattggcaggatgctgcaggcctttgtgacagccacctgtgcccacccagaatcactgaagggtcagagcattttctctgtgccaccagagagtttcgtgtgcgatgacttcctgaagccacagatcatcacccagccagaaaccaccatggctatggtgggcaaggacatccggtttacatgctcagcagccagcagcagcagctcccccatgacctttgcctggaagaaagacaatgaagtcctgaccaatgcagacatggagaactttgtccacgtccacgcgcaggacggggaagtgatggagtacaccaccatcctgcacctccgtcaggtcactttcgggcacgagggccgctaccaatgtgtcatcaccaaccactttggctccacctattcacataaggccaggctcaccgtgaatgtgttgccatcattcaccaaaacgccccacgacataaccatccggaccaccaccatggcccgcctcgaatgtgctgccacaggtcacccaaaccctcagattgcctggcagaaggatggaggcacggatttccccgctgcccagaccccatccttggtggtccccttggaagaccgtgtggtatctgtgggagaaacagtggccctccaatgcaaagccacggggaaccctccgccccgcatcacctggttcaagggggaccgcccgctgagcctcactgagcggcaccacttgacccctgacaaccagctcctggtggttcagaacgtggtggcagaggatgcgggccgatatacctgtgagatgtccaacaccctgggcacggagcgagctcacagccagctgagcgtcctgcccgcagcaggctgcaggaaggatgggaccacggtaggcatcttcaccattgctgtcgtgagcagcatcgtcctgacgtcactggtctgggtgtgcatcatctaccagaccaggaagaagagtgaagagtacagtgtcaccaacacagatgaaaccgtcgtgccaccagatgttccaagctacctctcttctcaggggaccctttctgaccgacaagaaaccgtggtcaggaccgagggtggccctcaggccaatgggcacattgagagcaatggtgtgtgtccaagagatgcaagccactttccagagcccgacactcacagcgttgcctgcaggcagccaaagctctgtgctgggtctgcgtatcacaaagagccgtggaaagcgatggagaaagctgaagggacacctgggccacataagatggaacacggtggccgggtcgtatgcagtgactgcaacaccgaagtggactgttactccaggggacaagccttccacccccagcctgtgtccagagacagcgcacagccaagtgcgccaaatggcccggagccgggtgggagtgaccaagagcattctccacatcaccagtgcagcaggactgccgctgggtcctgccccgagtgccaagggtcgctctaccccagtaaccacgatagaatgctgacggctgtgaagaaaaagccaatggcatctctagatgggaaaggggattcttcctggactttagcaaggttgtatcacccggactccacagagctacagcctgcatcttcattaacttcaggcagtccagagcgcgcggaagcccagtacttgcttgtttccaatggccacctccccaaagcatgtgacgccagtcccgagtccacgccactgacaggacagctccccgggaaacagagggtgccactgctgttggcaccaaaaagctaggttttgtctacctcagttcttgtcataccaatctctacgggaaagagaggtaggagaggctgcgaggaagcttgggttcaagcgtcactcatctgtacatagttgtaactcccatgtggagtatcagtcgctcacaggacttggatctgaagcacagtaaacgcaagaggggatttgtgtacaaaaggcaaaaaaagtatttgatatcattgtacataagagttttcagagatttcatatatatcttttacagaggctattttaatctttagtgcatggttaacagaaaaaaattatacaattttgacaatattatttttcgtatcaggttgctgtttaattttggagggggtggggaaatagttctggtgccttaacgcatggctggaatttatagaggctacaaccacatttgttcacaggagtttttggtgcggggtgggaaggatggaaggccttggatttatattgcacttcatagacccctaggctgctgtgcggtgggactccacatgcgccggaaggagcttcaggtgagcactgctcatgtgtggatgcccctgcaacaggcttccctgtctgtagagccaggggtgcaagtgccatccacacttgcagtgaatggcttttccttttaggtttaagtcctgtctgtctgtaaggcgtagaatctgtccgtctgtaaggcgtagaatgagggttgttaatccatcacaagcaaaaggtcagaacagttaaacactgcctttcctcctcctcttattttatgataaaagcaaatgtggccttctcagtatcattcgattgctatttgagacttttaaattaaggtaaaggctgctggtgttggtacctgtggatttttctatactgatgttttcgttttgccaatataatgagtattacattggccttgggggacagaaaggaggaagttctgacttttcagggctaccttatttctactaaggacccagagcaggcctgtccatgccattccttcgcacagatgaaactgagctgggactggaaaggacagcccttgacctgggttctgggtataatttgcacttttgagactggtagctaaccatcttatgagtgccaatgtgtcatttagtaaaacttaaatagaaacaaggtccttcaaatgttcctttggccaaaagctgaagggagttactgagaaaatagttaacaattactgtcaggtgtcatcactgttcaaaaggtaagcacatttagaattttgttcttgacagttaactgactaatcttacttccacaaaatatgtgaatttgctgcttctgagaggcaatgtgaaagagggagtattacttttatgtacaaagttatttatttatagaaattttggtacagtgtacattgaaaaccatgtaaaatattgaagtgtctaacaaatggcattgaagtgtctttaataaaggttcatttataaatgtca

SEQ ID NO: 187252 - DNA, 3282 bp, Artificial Sequence
  derived and/or modified sequence
atggcccggcccgtgcggggcggcctgggcgccccccggcggagcccatgcctgctattattgtggctgttgctgcttaggctggaacctgtcaccgccgcagctggtccacgcgccccttgcgctgctgcatgcacctgcgccggggatagcctcgactgcggtggcagaggactggctgcgctgcccggcgacctaccctcttggacccgcagtttgaatctgagctataataaactgtctgaaatcgatccagcggggtttgaggacttgcctaatctgcaggaggtctacctgaacaacaacgagctgacagccgtgccctcattgggggcggctagcagccatgtcgtcagcttgttcctacaacataacaagatcaggagtgtcgaggggagccagctgaaagcttacctgagcttagaagttctggatttgagtctcaataacattacagaggtacgcaacacttgttttcctcacgggcccccgatcaaagagctcaatttggccggaaatcggattggcactctggaacttggagcgttcgacgggctgtcgaggtctctcctgaccctaaggctctctaagaatcggataactcagctcccagttagggcattcaagctgccccgactgacacagctggacctgaatcgaaatagaattaggcttattgagggattaaccttccagggcctcaatagcctcgaggtcctgaaactgcagcgcaacaacatttctaaacttacagatggggctttctggggactgtccaagatgcacgtgctgcacctagaatataactccctggtggaggtgaattccgggtccctttatggcctgaccgccctgcaccagctgcatctttctaacaatagtattgctcgaatccatagaaagggctggtcattttgccagaaattgcatgagcttgtcctgtcgttcaataatctgactcggctggatgaagagagtctggctgaactgagcagtttgagcgtgctgaggctgagtcacaacagcatttctcatatcgctgaaggcgcttttaaaggcctccggtcattgcgggtgttggacctggaccataatgagatttcagggactattgaagacacatctggtgctttctccggactcgactccctaagcaagctgaccctctttgggaacaaaatcaaaagtgtggcgaagagggctttttcaggtttggaaggccttgaacacctcaatctcggaggcaacgctatacgctccgtgcagttcgatgcattcgttaaaatgaagaacctaaaggagttacacatttccagtgatagcttcctgtgtgattgtcagctcaagtggttaccgccgtggctgatcggtcggatgttacaggccttcgttactgccacctgcgctcaccccgagtcacttaagggccagtcaatcttctccgtaccacccgaaagtttcgtttgtgacgattttctaaagcctcagattattacacagccagaaaccacgatggcaatggttgggaaagacatcagattcacatgttccgccgcatcttcttcctcgtcacctatgaccttcgcatggaagaaggataacgaagtattgacaaacgctgacatggagaactttgtgcacgtgcacgcccaagatggcgaggtcatggagtatactaccattcttcaccttcgccaggtgactttcggtcatgagggccggtatcagtgcgtcattaccaatcattttggctctacctatagccacaaagccaggttgacagtgaatgtgctgccctctttcaccaagactccgcatgacataaccatccggacaactactatggcccggcttgaatgtgcagctaccggacatcccaacccgcagattgcttggcagaaagacggtggaacagatttccccgcagccagggagcggcgcatgcatgtgatgccagacgatgacgttttctttattacggatgtgaaaatcgatgacgccggagtgtacagctgcacagcccaaaactctgcgggtagcatcagtgccaatgctacactgactgttcttgaaacccccagcctggtggtgcccttggaggacagggtagtgtccgtgggcgagactgtcgccctccagtgcaaagccacaggcaatccaccgccaaggatcacttggttcaagggcgatcgcccactaagcctgaccgagcgacaccatctcacacctgacaaccaactgctggttgtccagaatgttgttgcagaggacgcgggacggtacacctgcgagatgtccaacactcttgggactgagcgagcacacagccagttgtccgttttgcctgctgctgggtgtcgcaaggatggaacaactgtcggcatctttactattgccgtggtgagtagtatcgtgctcacaagcctggtctgggtatgtattatctaccagaccaggaagaagtcggaagaatacagtgtgactaatacagatgagaccgttgtgcctccggacgtgccctcctatctctcctcacagggaacactgagcgacaggcaggagactgttgtgcgcacggaaggcggcccccaggccaacgggcacatcgaaagtaatggtgtttgtcctcgcgacgcctcccacttcccagaacccgatacccattccgtggcctgcaggcagccgaagctttgtgcgggctctgcctaccacaaagagccttggaaagcaatggaaaaagcggagggcaccccaggaccgcataagatggagcacggaggcagggtggtgtgttcagactgtaataccgaagttgattgctattcgaggggccaggcctttcatcctcagcctgtgtcacgtgattctgctcagccatctgctcctaacggccccgagccaggaggctccgaccaggagcacagccctcatcatcaatgcagccggactgccgcagggagctgtccggagtgccagggaagtctgtatcccagcaaccatgaccggatgttaacggctgtgaaaaagaagccgatggcctctctcgacggaaaaggcgatagtagctggactctcgctcgtttatatcaccccgactcgacggagctgcagccagcatctagcctgacctccggaagccctgagagggcagaagctcagtatctgctcgtctccaatggacatctgccaaaggcatgcgatgcctcccccgagtcaacgcccctgactgggcagttacccggcaagcagcgcgttccactccttttggctcccaaatcttag

SEQ ID NO: 187253 - DNA, 2991 bp, Artificial Sequence
  derived and/or modified sequence
aacctgagctacaacaagctgagcgagatcgaccccgccggcttcgaagatctgcctaatctgcaggaggtgtatcttaacaacaatgagctaacggccgtgccaagccttggagccgccagtagccacgttgtgtccctgttcctgcagcacaataaaatccgctcagttgagggcagtcagcttaaagcgtacctctctctggaggtgctagatttgtctctgaacaatatcacagaggtacgaaatacatgcttccctcatggaccgcctattaaggaacttaacctcgctgggaaccgtattggtaccctggagctgggcgcttttgatggcctgagccggtctctgcttaccttgaggttgtctaagaatcgtattacccagcttccggtacgggctttcaaactgcccaggctcacacaactagacttgaacaggaaccgcatccggcttatcgaagggctgacatttcaggggcttaacagtctggaagttcttaagctgcaaagaaacaacatttccaagcttaccgacggagccttctggggcctgtcgaagatgcacgtgttgcatctggaatacaactcccttgttgaggtgaacagcgggtctttgtatgggcttactgccctccaccagttacacttgtcgaataactccatcgcacgcatacacaggaaaggatggtccttctgccagaagctccatgaactggtgctgtcctttaataacctcacccgactcgacgaggagtctttagcagaattgagcagtttgagtgttctgaggctgtcacacaattctattagccacatagccgagggcgcttttaaaggactgcgcagtttacgggtgctggacctggatcacaatgagataagcgggacgattgaggacacaagcggcgcatttagcggccttgattcacttagcaagctaaatttaggaggcaatgccattcggagcgttcagttcgacgcgtttgtgaaaatgaagaatctcaaggagctgcacatctcctccgattccttcctgtgcgattgtcagcttaagtggctgcccccgtggttgatcgggagaatgctccaggcatttgtaactgctacatgcgcccaccccgagagcctgaaaggtcagagcattttctcggtacctcctgagtcattcgtctgcgatgatttcctgaagccgcagatcattacccagccagaaaccaccatggctatggtcgggaaagacatccgctttacatgttctgcagcatcttcaagcagctcgccaatgactttcgcatggaaaaaagataatgaggttctcacaaacgccgacatggaaaattttgtacatgtgcacgcccaagatggtgaagtgatggagtataccacaatattacaccttagacaggtaaccttcgggcatgaaggcaggtatcagtgtgtgattaccaaccacttcgggtctacatactcgcacaaggctagattgacagtcaacgtgcttccaagcttcaccaagactcctcatgacataacaatccgcaccacgacaatggcccgccttgaatgtgccgccaccggccatcccaaccctcagattgcttggcaaaaagatggcggcaccgatttccctgctgcgcgcgagaggcggatgcacgtgatgccagatgatgacgttttcttcatcacagacgttaagattgacgacgcaggtgtttactcctgtacagcccagaatagtgcagggtccatttcagctaacgctaccctgacagtcctcgagacacctagcctggtggtgcccctggaggaccgagtggtatcggttggagagactgtagccctgcaatgtaaggcaactggcaatccaccaccacgcatcacttggttcaagggcgatagaccactgtctctgactgaaagacatcaccttacacccgacaatcagctcctggtcgtccagaacgtcgtcgcagaggacgccggcagatatacctgcgagatgtccaacaccttggggacagagcgagcccacagccagttgtctgtcctgcccgccgctgggtgtaggaaagatggtacgacagtaggaatattcacaatagccgtcgtgtcatctattgttttaacgagcctggtatgggtctgcatcatctatcaaacccgcaaaaagagcgaggagtatagcgtaacaaataccgatgaaacggtggtgccccccgacgtgcctagctacctgagtagccagggaactctttccgaccgccaggaaacagtggtccgcacagaaggtgggccccaggccaacgggcatatagagtccaacggtgtgtgcccacgcgacgcatcgcactttcccgagccagatacgcattcagtggcctgccgacagccaaagctgtgcgctggcagtgcgtaccacaaggagccttggaaggccatggagaaagcggagggtacaccagggccgcataaaatggaacatggcggccgggtggtctgttccgactgcaatactgaagtggattgttactcaagagggcaggccttccacccacagccggtaagtagagactcagctcaacctagcgcacctaatggtcctgagccaggaggctcagaccaggaacacagccctcatcaccagtgtagtcgcacagccgccggtagttgtccagaatgtcaggggtctctgtaccctagcaaccacgatcgcatgcttaccgctgtaaagaaaaaacccatggcctcactggacggtaagggcgattcctcatggaccctggccaggctgtaccatcctgattcaacggagcttcagcccgcttcttcgctaacatctggcagtcctgaacgggccgaggcacagtacctgcttgtatcgaatgggcacttgcctaaggcatgtgacgcatctccagagtcaacaccgctcactggacagttgcccggcaaacagagggtaccactgctcttggctcccaagagctag

SEQ ID NO: 187254 - DNA, 3213 bp, Artificial Sequence
  derived and/or modified sequence
atggcccggcccgtgcggggcggcctgggcgccccccggcggagcccatgtttattactcctttggctgctcctgttgaggctggagcctgtgactgccgccgccggacctcgagcgccgtgcgctgccgcctgtacatgtgccggcgattctctagattgcggcggacggggactggcagccctgccgggtgatcttcctagctggacacgcagcttgaacttgtcctataataagctgtctgaaatcgaccccgccggcttcgaagatctccccaacctgcaagaagtgtatctcaacaacaatgagcttactgcggtgccatccttgggggccgcctcctcacatgtggtcagcctcttcctacagcacaacaagatcaggtccgtcgagggcagccagctgaaagcttacctctcacttgaggtacttgacctgtcattgaataatatcacagaggtaagaaacacctgttttccccacggtccccccatcaaggaacttaacctcgctgggaataggattggcaccttagagttgggtgcctttgatgggttgtcacgatctctactcacactcagattaagcaaaaacagaatcacccagttaccagttcgcgcttttaagctgccaagacttacccaattggacttgaatcgaaatcggataaggttaatcgaaggtctgactttccagggactcaattccctagaggtgctcaagcttcagaggaataacatttccaaactgaccgacggcgccttctggggtctgtccaaaatgcacgtgctgcacctcgagtataactcgctggtggaagtaaatagcgggtccctgtacgggctcaccgctctgcatcaactccacctctcaaataatagcattgctaggatccatagaaagggctggagcttttgtcaaaaactacacgaactggtgctatcctttaacaacctgaccagactggacgaggaatccttggcagagttgtcatccttatctgtgctgaggctttctcacaacagcatcagccatatcgccgaaggggcctttaagggattaaggtccctgcgtgtgctggatctggaccataacgaaataagtggcacaatagaggatacatcaggcgcattctcaggcttagactccctaagcaagctgctactgctggagccttcacagtcagctggttgttcaagcccctctcagccacacatgtcagctggaggccgaactcttttcggaaataaaatcaaatctgtagctaagcgcgccttctctggactggagggcctggagcatctcaatctaggcggcaatgccattagaagcgtgcaatttgacgcctttgtcaagatgaaaaatctgaaagagctgcatatcagttctgacagcttcttatgtgactgccagcttaagtggctgccaccgtggctgattgggcggatgctgcaagccttcgtcacagcaacttgcgctcaccccgagagtttgaagggtcagtccattttttctgttccgccggaaagctttgtatgcgatgacttcttaaaacctcagatcataactcagcccgagactactatggctatggttggaaaggacattcgctttacatgttccgctgcatcaagctcgagcagccccatgacgttcgcttggaaaaaggacaacgaggtcttaactaacgcagatatggagaactttgtacacgtccacgctcaggacggagaggtcatggaatatacgaccatccttcacctacgacaagtgaccttcggacacgaaggcagataccagtgtgtcatcaccaaccactttggctcgacgtatagccataaggcccggctgactgttaacgtgttgcctagtttcacaaagactccacacgacattactatccgtaccaccactatggctcggctggagtgcgctgccaccggccaccccaaccctcagattgcatggcagaaggacggcgggactgactttccagctgctcagacacccagccttgtagtccccctggaagacagggtggtgagcgtgggagagaccgtggcgctgcagtgcaaggcaacgggtaacccgccccctcgaatcacttggtttaagggggataggcccctgtctctgactgagagacaccacctgactcccgataatcagctgctcgtggtgcagaatgtggtggccgaggacgctggcagatacacttgcgagatgtcaaataccctcggcacagagcgcgctcattcccagctaagcgttctacctgccgccggatgtagaaaggatgggacaacagtcggcatcttcaccatcgccgtggtcagctccatagttctgaccagtctggtatgggtgtgcatcatctaccagacccgcaaaaagtcggaggagtactccgtgactaacaccgacgagacagtggtcccaccggatgtcccctcatacctgtcctcacagggaacgctgtccgatcggcaggagactgtggtgaggacagagggcggcccacaggcgaacggtcatatagaaagtaatggggtgtgtcccagggatgcctctcactttcccgagcccgatacccattccgtagcatgtagacagcccaaactctgcgccggcagcgcttaccataaagagccttggaaagctatggaaaaggcggaaggcactccaggcccgcataagatggagcacggcggacgtgtggtgtgcagcgactgtaacacagaagttgactgctattccagaggccaggcattccatccgcagcccgtgagccgggatagtgcgcagccttcagctccaaatggcccagaacctggaggatcggaccaggagcattcgccacatcaccagtgtagccgaaccgccgctggttcttgccctgagtgccagggttctctgtatccttctaatcacgatagaatgctgacagctgtcaagaaaaaaccgatggccagtttggacggaaagggtgattcgtcatggacgttagccagactgtaccatccagacagcaccgaactccagcccgcttcctcgctaacttccggaagcccagagcgcgcagaagcccagtatctgctggtctccaatggccatctgcccaaagcttgtgacgcatcgcccgagagcacgcctctgaccgggcaacttccgggtaaacagagagttcccctgctactggctcctaagtcctag

SEQ ID NO: 187255 - DNA, 3282 bp, Artificial Sequence
  derived and/or modified sequence
atggctaggcctgtccgagggggtctaggcgctccaagacgcagcccctgcttgctgctattatggcttctgctcttgagattggagcctgtgaccgctgccgcaggccctagggctccctgtgctgctgcctgcacttgcgccggtgatagcctcgattgcgggggtaggggtctggctgctttacccggtgacctccccagctggacccggagcctgaatctcagctacaataagctgtcagagattgatcctgcaggcttcgaagatctgcctaatttgcaggaggtctacctcaataacaacgagctcacggccgttccaagcctcggcgctgcgtcttcgcacgtggttagcctctttctccaacataacaagattcggtccgtggaggggagtcagctgaaagcttacttgtccctggaggtactggacctcagcctcaataatattacagaagtgcggaacacctgcttcccccatggccctcccatcaaagagctgaatcttgcgggtaaccggattggaacgctggaacttggcgctttcgacgggctgtctagatcactgctcacactgcggttgagtaagaacaggatcacccagctcccagtccgagccttcaagctgcccagactgacacagctcgatctgaatcgtaacagaatccgtctgattgagggtcttacatttcaaggactgaactctctcgaggtgctgaaactccagcggaacaatatatctaagctgacagatggtgcattttggggcctaagcaagatgcatgtgctccatttggaatacaactccctagtcgaggtgaactcaggttccctctacggcctgacagcactccaccagctgcacctgtcaaataactccatcgctcgtatccaccgcaaaggctggagtttctgccagaagctgcacgaactcgtgctttcgttcaacaacctgacacgattggatgaagagtccctggccgagctgtctagcctctctgtgttacggctgtctcacaactcaatttcccatattgctgaaggcgcattcaaaggtctgagatctttgcgagtgctggacctcgatcataatgagatatcgggcacgatcgaggatacatccggggcattctcaggactcgatagcctgtcaaagctaacattgttcggcaacaagattaagtcagtggccaagcgggctttttcagggcttgagggtctagagcatctgaatctgggtggtaacgccattcgctctgttcagttcgatgccttcgtcaagatgaagaacctgaaggaactgcatatcagcagtgacagcttcttgtgtgactgtcagctgaagtggttacccccatggcttataggtagaatgttacaagctttcgtaaccgccacctgcgctcatcccgaatccttgaaaggccagtctatcttcagtgtccccccagaatccttcgtgtgcgatgactttctgaagcctcaaatcattacccaaccagaaactactatggctatggtcgggaaagacatacgctttacctgctcagcagcctcttcatcttcctctcctatgacgtttgcatggaaaaaggacaatgaggtccttacgaacgcggacatggagaattttgttcacgtccacgctcaggacggagaggttatggaatatactaccatcctccacctcaggcaggtcacattcggccacgaggggagataccagtgcgtcatcaccaatcacttcggctctacttattctcacaaagctcgactgaccgttaatgtcctgccaagtttcactaaaaccccgcatgacattactataaggacgacgacgatggccagacttgaatgcgctgccaccgggcacccgaatccccagattgcctggcagaaggatggcggaaccgattttcctgccgctagagaaagacgaatgcacgtgatgccagatgacgacgttttcttcattacagacgtaaaaatcgacgatgcgggagtgtacagttgtaccgctcaaaacagcgccggttcaatcagcgctaacgcaactctgactgttcttgagacgccctctttggtcgtgcccctggaggacagggtggtttctgttggggagacagttgctttgcagtgcaaggccactggtaatcccccacctaggatcacatggtttaagggtgatcgccctttaagtttaaccgagaggcaccaccttacaccagacaaccagttgctagtagtgcagaatgttgtggcagaagatgctgggcgatatacttgcgaaatgagtaataccctgggaactgaaagggcccactcccagctgtcggtcttacccgcagctgggtgccgaaaggacggaaccaccgtcggaatatttactatagcggtcgtgtcatctatagttttgactagcctcgtttgggtgtgtattatctaccagaccaggaaaaagagcgaggaatactcagtgacaaacactgacgaaaccgtcgttcccccagacgttccttcctacctgtctagccaggggactcttagcgacaggcaggaaacagttgtacgcacagaaggtggtccccaagccaatggtcatatcgagagcaatggcgtttgtccgagagatgcctcacatttccccgagcctgatacccactcagtggcctgtagacagcctaagctgtgcgccggttccgcatatcacaaggagccctggaaagctatggagaaggccgagggcaccccaggaccacataagatggagcatggcggtcgagtcgtgtgctctgactgcaacaccgaggtggactgctacagtcggggacaagctttccaccctcagcccgtgagtagagattcagctcagccttctgcaccaaatggtccagagcctggcggttcggaccaggagcactccccacaccatcagtgctccagaacggccgcaggctcatgcccagaatgccaggggtccctgtatccctccaaccacgatcggatgctcacagcggtgaagaagaagcctatggcttccttggatggaaaaggagactctagctggaccttggcgcgattatatcaccctgacagcaccgaattgcaaccagcttcgtcccttacatcgggaagcccagagcgtgcggaagcccaatacctgctcgtatccaacggacatcttccaaaggcgtgtgacgccagtccagagagtacaccactcacagggcagcttcccggaaaacagcgcgtgcctctcttgttggcacccaagagctag

SEQ ID NO: 187256 - DNA, 2991 bp, Artificial Sequence
  derived and/or modified sequence
aacctgagctacaataaactgtcagagatagaccctgccggattcgaggatctgcccaatctgcaggaagtgtatctgaacaataacgagctaaccgccgttcccagcctcggcgcagctagttcacatgtggtaagccttttcctgcagcacaacaaaattcgctctgtggaaggaagccagcttaaagcgtacttgagcctggaagtactggacctttctttaaacaacataactgaagtacgcaatacctgttttcctcacggacctcctataaaggagttgaatcttgcgggaaatcgaatcggtactctggagcttggagccttcgacggactttcacggtcactgctcacactacggctgtcaaagaatcgtataactcagttgcccgtgcgggctttcaaactacctagactgacacagctcgatctcaatcgaaatcgaatccgccttattgaaggcctaacgttccagggcctgaattcactcgaggttctgaaactgcagcgaaacaacatcagcaaactcaccgacggcgctttttggggcctgagcaaaatgcacgtgctccacctcgagtacaacagcctggttgaggtgaatagcggctcgttatacggtctcacagctctgcatcaactacacctttcgaacaattctatagcaaggatccatcgcaaagggtggagcttctgccagaagctccatgaacttgtgctaagttttaataacctcacccgactagatgaagagtccctggcagagctgtcgtccctcagcgtgctgcggctgagtcataattccatctctcatatagccgagggcgcttttaaaggtctccgttccctgcgagtgcttgacttggaccacaacgaaatctccgggacgatcgaagatacaagtggggctttctcaggattagacagcttaagtaaacttaacctcgggggtaacgctatacgcagtgtccagttcgacgcctttgtgaagatgaagaacttaaaagaactccacataagttcagattctttcctatgcgattgtcagctgaagtggctgccaccatggcttatcgggaggatgctgcaggctttcgtgaccgcaacctgtgcacatcctgagtctctaaagggtcaatccatcttctctgtcccgcctgaatcattcgtctgtgacgactttttaaagcctcagatcattactcaacccgaaaccaccatggctatggttggcaaagacattcggtttacctgttccgcagccagcagttcctcctctccaatgacatttgcttggaagaaggataacgaggttctgacgaatgctgatatggagaactttgtccacgtccacgcgcaggatggggaggtcatggagtataccaccatcctgcatttgaggcaggtcaccttcgggcatgaaggccgataccagtgtgtaatcactaatcactttgggagtacgtacagtcacaaggcaaggctaactgtgaatgtgctcccatcattcactaagaccccccacgatattacaattcggaccacaacgatggctaggctggaatgtgctgccaccggccaccccaatccccagatcgcatggcagaaagacggcggaaccgatttccctgcggcacgggagaggaggatgcatgtaatgcccgatgatgacgtgttttttatcactgacgtcaagattgacgacgcgggtgtgtacagctgcaccgcgcaaaattccgcaggcagcattagtgccaatgcgacgttgactgtcttggagacacctagtctggtggtgccacttgaggacagggtcgtatccgtgggcgaaacagtggccctgcagtgcaaggccacaggcaacccacccccacgaatcacttggtttaaaggcgacaggcccctgagtcttacagaacgacaccatctgacccctgataatcaactgcttgtggtgcaaaatgtggtggcggaggatgcaggacgctacacatgtgaaatgtccaataccctgggaactgagcgggctcacagccagctgtctgtgcttccagcagcgggatgcagaaaggatggcaccacggttggcatatttacaatcgccgtcgtcagcagtatcgtgctgaccagcttggtctgggtgtgtattatttaccagacgaggaaaaagtctgaggaatattccgtcacaaatactgatgagactgtcgttcccccagacgtaccaagctatctctcttcccaggggacgctaagcgacaggcaggagaccgtcgtgcggactgagggaggcccacaagctaatggccacattgaatccaatggagtgtgtcctcgggacgcttcccactttccagagccagatacacatagtgtcgcgtgtaggcagcccaagctgtgtgccggatccgcctatcacaaagaaccatggaaggccatggaaaaggccgaggggacacctggacctcacaagatggagcacggaggcagagtggtgtgcagcgattgcaacactgaggtggactgttatagccggggacaggcctttcacccgcagccagtgagtagagactcagcacagcccagtgcaccaaatggaccggaacccggaggtagtgaccaggagcactccccacatcatcagtgctcaagaaccgcagccggttcctgtccagagtgtcaaggttcactttaccctagcaatcacgatcgcatgctcaccgccgtcaagaaaaaacctatggccagtctggatgggaaaggagacagttcatggacccttgcccgactataccaccccgatagcactgagctacagcccgcttccagcttgacaagcggatctccagaaagagcggaggctcaataccttctcgtatcaaacgggcatctgccgaaggcatgcgatgcaagccccgagtccactcccttgacgggccaattgcccggaaagcagcgagtgccgctcctgcttgccccaaaatcatag

SEQ ID NO: 187257 - DNA, 3213 bp, Artificial Sequence
  derived and/or modified sequence
atggcccgacccgtcagaggaggtctcggggctcctaggagaagtccctgcctgttgctcctctggctgcttctcctacggttggagcctgtgactgcagccgcaggccctcgcgctccttgtgccgctgcctgcacttgtgcgggtgattccctggattgtggaggtcgcggtttagccgcactgccaggtgatctgccaagttggacacgtagccttaacctcagctataacaaactgagcgagattgaccctgctggctttgaagatcttcctaatctgcaggaggtctatctgaataataatgagctgaccgccgtgccatccttgggcgctgcgagctctcatgttgtaagtctcttccttcagcacaacaaaattagatctgtcgagggatcacagctgaaggcctatctcagtctggaggtgcttgacctctctctcaacaatattactgaggttcgaaatacatgctttccccacgggccacccattaaagaactgaatctggctggcaacagaatcggcactctagaattgggtgcattcgatggtctgagccgatccctgctgacccttcgtctctcaaaaaatcggataacacagctgccagtccgggcattcaagcttcctcggttaacacaactggacctgaaccgcaataggatccggctcattgaggggctcacattccagggactcaattccctggaagtgctgaagctccagaggaataacatttccaaactgactgacggcgctttctggggtctcagcaagatgcacgtgctccatctggagtacaactccttggtcgaagttaattctggatcattgtacgggctgaccgccctgcaccaactacacctctctaataattctatagccaggatccaccggaaggggtggtctttttgccaaaagctgcacgaactggttctcagctttaataatctcactaggctcgacgaagaatccttggcagaactttcctcactttcggtgctccggctttcacataacagtattagccacattgctgaaggcgcatttaagggtcttaggtccttgcgagtccttgacctcgaccacaacgagataagtggaacgatcgaggatacttcaggggctttcagcggcttagactctctgtcaaaactgctgttgctcgagccatctcaaagcgccggttgctcttctccatcacagccccacatgtcagctggtggccgtacactgtttgggaacaagattaaatctgtggcgaaacgtgcattcagtggtttggaaggcttggaacatcttaatcttggtgggaatgccattcggtctgtgcagttcgatgccttcgtgaaaatgaaaaacctgaaggagctccatatctcctccgatagctttctttgcgattgtcaattaaagtggctacctccctggctgattgggcgaatgctacaagctttcgtgacagccacctgcgctcaccccgaatctctgaagggtcagtccatatttagcgttccgccagagtcctttgtatgcgatgacttcctgaaaccacagatcatcacacagccagaaaccacaatggcgatggtcgggaaggacatccgctttacgtgtagcgcagcttcttcctcaagcagtccaatgaccttcgcatggaagaaagataatgaggtgctgactaatgctgatatggaaaatttcgtgcatgtgcatgcccaggatggagaggtgatggagtacacaacaatcctccaccttagacaggtgaccttcggccacgaagggcgatatcagtgtgtcattaccaatcacttcgggtctacttacagccacaaggccagactcaccgttaacgtgttaccttcttttacaaagactccccacgatattactattcggaccaccactatggctagactggagtgcgctgcaacggggcatcccaacccgcagattgcctggcagaaggacggcggaacagattttcccgcagcgcagacgcctagccttgtggtgccactcgaagaccgggtcgtaagcgtgggcgagactgtcgctctacagtgcaaggcaaccggcaatccgcctcctagaataacatggttcaagggcgatcgccctctgtccttaacggaacgccatcacctgacacctgataaccaattgcttgtagtgcagaacgtggtcgccgaagatgccggtaggtacacctgcgaaatgtcaaacacacttggaaccgagagagcacacagtcagttaagtgtgctgcctgccgcaggctgtcggaaggacggtacaactgtcgggatattcactattgcagtggtttcaagcatcgttctgacgagcctcgtctgggtgtgtattatttatcagacccggaagaagagcgaagagtactcagttaccaatacagacgagaccgtggttccgccagatgtgccctcctacctctcaagtcaaggcaccctgagcgatcgacaggaaactgtcgtgcgaaccgaaggaggcccacaggccaatggccatatcgagagcaatggcgtttgccccagagacgcttcacacttcccagaaccagatacccattctgtggcatgccgccagcccaaactgtgcgctggctccgcttaccataaagagccatggaaggctatggaaaaagcagagggcaccccagggcctcataagatggagcacggcggacgcgtcgtgtgcagcgactgcaatactgaggtcgactgctactcgcgcggacaggctttccacccgcaacccgtttcacgcgacagtgcccaaccctctgcaccaaacggccctgaaccaggaggcagcgatcaggagcactctccccaccatcagtgcagtaggacagccgctggatcctgccctgaatgtcaaggtagcctttatcctagcaatcacgatcgcatgttgacagctgtgaaaaaaaaaccaatggcatcactggacggcaaaggagactcttcatggactctggcacgactgtatcacccagacagtacagaactgcaaccagcatcttccttgacctcagggagcccagagcgcgctgaagcccaatacctcctggtatcaaacgggcatctgcctaaggcctgtgacgcctctccagaatcaacaccgctcactgggcagctgccgggtaagcagagagtgccattacttctggccccaaagtcctag

SEQ ID NO: 187258 - DNA, 3282 bp, Artificial Sequence
  derived and/or modified sequence
atggccagacccgtgagaggcggcctgggcgcccccagaagaagcccctgcctgctgctgctgtggctgctgctgctgagactggagcccgtgaccgccgccgccggccccagagccccctgcgccgccgcctgcacctgcgccggcgacagcctggactgcggcggcagaggcctggccgccctgcccggcgacctgcccagctggaccagaagcctgaacctgagctacaacaagctgagcgagatcgaccccgccggcttcgaggacctgcccaacctgcaggaggtgtacctgaacaacaacgagctgaccgccgtgcccagcctgggcgccgccagcagccacgtggtgagcctgttcctgcagcacaacaagatcagaagcgtggagggcagccagctgaaggcctacctgagcctggaggtgctggacctgagcctgaacaacatcaccgaggtgagaaacacctgcttcccccacggcccccccatcaaggagctgaacctggccggcaacagaatcggcaccctggagctgggcgccttcgacggcctgagcagaagcctgctgaccctgagactgagcaagaacagaatcacccagctgcccgtgagagccttcaagctgcccagactgacccagctggacctgaacagaaacagaatcagactgatcgagggcctgaccttccagggcctgaacagcctggaggtgctgaagctgcagagaaacaacatcagcaagctgaccgacggcgccttctggggcctgagcaagatgcacgtgctgcacctggagtacaacagcctggtggaggtgaacagcggcagcctgtacggcctgaccgccctgcaccagctgcacctgagcaacaacagcatcgccagaatccacagaaagggctggagcttctgccagaagctgcacgagctggtgctgagcttcaacaacctgaccagactggacgaggagagcctggccgagctgagcagcctgagcgtgctgagactgagccacaacagcatcagccacatcgccgagggcgccttcaagggcctgagaagcctgagagtgctggacctggaccacaacgagatcagcggcaccatcgaggacaccagcggcgccttcagcggcctggacagcctgagcaagctgaccctgttcggcaacaagatcaagagcgtggccaagagagccttcagcggcctggagggcctggagcacctgaacctgggcggcaacgccatcagaagcgtgcagttcgacgccttcgtgaagatgaagaacctgaaggagctgcacatcagcagcgacagcttcctgtgcgactgccagctgaagtggctgcccccctggctgatcggcagaatgctgcaggccttcgtgaccgccacctgcgcccaccccgagagcctgaagggccagagcatcttcagcgtgccccccgagagcttcgtgtgcgacgacttcctgaagccccagatcatcacccagcccgagaccaccatggccatggtgggcaaggacatcagattcacctgcagcgccgccagcagcagcagcagccccatgaccttcgcctggaagaaggacaacgaggtgctgaccaacgccgacatggagaacttcgtgcacgtgcacgcccaggacggcgaggtgatggagtacaccaccatcctgcacctgagacaggtgaccttcggccacgagggcagataccagtgcgtgatcaccaaccacttcggcagcacctacagccacaaggccagactgaccgtgaacgtgctgcccagcttcaccaagaccccccacgacatcaccatcagaaccaccaccatggccagactggagtgcgccgccaccggccaccccaacccccagatcgcctggcagaaggacggcggcaccgacttccccgccgccagagagagaagaatgcacgtgatgcccgacgacgacgtgttcttcatcaccgacgtgaagatcgacgacgccggcgtgtacagctgcaccgcccagaacagcgccggcagcatcagcgccaacgccaccctgaccgtgctggagacccccagcctggtggtgcccctggaggacagagtggtgagcgtgggcgagaccgtggccctgcagtgcaaggccaccggcaaccccccccccagaatcacctggttcaagggcgacagacccctgagcctgaccgagagacaccacctgacccccgacaaccagctgctggtggtgcagaacgtggtggccgaggacgccggcagatacacctgcgagatgagcaacaccctgggcaccgagagagcccacagccagctgagcgtgctgcccgccgccggctgcagaaaggacggcaccaccgtgggcatcttcaccatcgccgtggtgagcagcatcgtgctgaccagcctggtgtgggtgtgcatcatctaccagaccagaaagaagagcgaggagtacagcgtgaccaacaccgacgagaccgtggtgccccccgacgtgcccagctacctgagcagccagggcaccctgagcgacagacaggagaccgtggtgagaaccgagggcggcccccaggccaacggccacatcgagagcaacggcgtgtgccccagagacgccagccacttccccgagcccgacacccacagcgtggcctgcagacagcccaagctgtgcgccggcagcgcctaccacaaggagccctggaaggccatggagaaggccgagggcacccccggcccccacaagatggagcacggcggcagagtggtgtgcagcgactgcaacaccgaggtggactgctacagcagaggccaggccttccacccccagcccgtgagcagagacagcgcccagcccagcgcccccaacggccccgagcccggcggcagcgaccaggagcacagcccccaccaccagtgcagcagaaccgccgccggcagctgccccgagtgccagggcagcctgtaccccagcaaccacgacagaatgctgaccgccgtgaagaagaagcccatggccagcctggacggcaagggcgacagcagctggaccctggccagactgtaccaccccgacagcaccgagctgcagcccgccagcagcctgaccagcggcagccccgagagagccgaggcccagtacctgctggtgagcaacggccacctgcccaaggcctgcgacgccagccccgagagcacccccctgaccggccagctgcccggcaagcagagagtgcccctgctgctggcccccaagagctag

SEQ ID NO: 187259 - DNA, 2991 bp, Artificial Sequence
  derived and/or modified sequence
aacctgagctacaacaagctgagcgagatcgaccccgccggcttcgaggacctgcccaacctgcaggaggtgtacctgaacaacaacgagctgaccgccgtgcccagcctgggcgccgccagcagccacgtggtgagcctgttcctgcagcacaacaagatcagaagcgtggagggcagccagctgaaggcctacctgagcctggaggtgctggacctgagcctgaacaacatcaccgaggtgagaaacacctgcttcccccacggcccccccatcaaggagctgaacctggccggcaacagaatcggcaccctggagctgggcgccttcgacggcctgagcagaagcctgctgaccctgagactgagcaagaacagaatcacccagctgcccgtgagagccttcaagctgcccagactgacccagctggacctgaacagaaacagaatcagactgatcgagggcctgaccttccagggcctgaacagcctggaggtgctgaagctgcagagaaacaacatcagcaagctgaccgacggcgccttctggggcctgagcaagatgcacgtgctgcacctggagtacaacagcctggtggaggtgaacagcggcagcctgtacggcctgaccgccctgcaccagctgcacctgagcaacaacagcatcgccagaatccacagaaagggctggagcttctgccagaagctgcacgagctggtgctgagcttcaacaacctgaccagactggacgaggagagcctggccgagctgagcagcctgagcgtgctgagactgagccacaacagcatcagccacatcgccgagggcgccttcaagggcctgagaagcctgagagtgctggacctggaccacaacgagatcagcggcaccatcgaggacaccagcggcgccttcagcggcctggacagcctgagcaagctgaacctgggcggcaacgccatcagaagcgtgcagttcgacgccttcgtgaagatgaagaacctgaaggagctgcacatcagcagcgacagcttcctgtgcgactgccagctgaagtggctgcccccctggctgatcggcagaatgctgcaggccttcgtgaccgccacctgcgcccaccccgagagcctgaagggccagagcatcttcagcgtgccccccgagagcttcgtgtgcgacgacttcctgaagccccagatcatcacccagcccgagaccaccatggccatggtgggcaaggacatcagattcacctgcagcgccgccagcagcagcagcagccccatgaccttcgcctggaagaaggacaacgaggtgctgaccaacgccgacatggagaacttcgtgcacgtgcacgcccaggacggcgaggtgatggagtacaccaccatcctgcacctgagacaggtgaccttcggccacgagggcagataccagtgcgtgatcaccaaccacttcggcagcacctacagccacaaggccagactgaccgtgaacgtgctgcccagcttcaccaagaccccccacgacatcaccatcagaaccaccaccatggccagactggagtgcgccgccaccggccaccccaacccccagatcgcctggcagaaggacggcggcaccgacttccccgccgccagagagagaagaatgcacgtgatgcccgacgacgacgtgttcttcatcaccgacgtgaagatcgacgacgccggcgtgtacagctgcaccgcccagaacagcgccggcagcatcagcgccaacgccaccctgaccgtgctggagacccccagcctggtggtgcccctggaggacagagtggtgagcgtgggcgagaccgtggccctgcagtgcaaggccaccggcaaccccccccccagaatcacctggttcaagggcgacagacccctgagcctgaccgagagacaccacctgacccccgacaaccagctgctggtggtgcagaacgtggtggccgaggacgccggcagatacacctgcgagatgagcaacaccctgggcaccgagagagcccacagccagctgagcgtgctgcccgccgccggctgcagaaaggacggcaccaccgtgggcatcttcaccatcgccgtggtgagcagcatcgtgctgaccagcctggtgtgggtgtgcatcatctaccagaccagaaagaagagcgaggagtacagcgtgaccaacaccgacgagaccgtggtgccccccgacgtgcccagctacctgagcagccagggcaccctgagcgacagacaggagaccgtggtgagaaccgagggcggcccccaggccaacggccacatcgagagcaacggcgtgtgccccagagacgccagccacttccccgagcccgacacccacagcgtggcctgcagacagcccaagctgtgcgccggcagcgcctaccacaaggagccctggaaggccatggagaaggccgagggcacccccggcccccacaagatggagcacggcggcagagtggtgtgcagcgactgcaacaccgaggtggactgctacagcagaggccaggccttccacccccagcccgtgagcagagacagcgcccagcccagcgcccccaacggccccgagcccggcggcagcgaccaggagcacagcccccaccaccagtgcagcagaaccgccgccggcagctgccccgagtgccagggcagcctgtaccccagcaaccacgacagaatgctgaccgccgtgaagaagaagcccatggccagcctggacggcaagggcgacagcagctggaccctggccagactgtaccaccccgacagcaccgagctgcagcccgccagcagcctgaccagcggcagccccgagagagccgaggcccagtacctgctggtgagcaacggccacctgcccaaggcctgcgacgccagccccgagagcacccccctgaccggccagctgcccggcaagcagagagtgcccctgctgctggcccccaagagctag

SEQ ID NO: 187260 - DNA, 3213 bp, Artificial Sequence
  derived and/or modified sequence
atggccagacccgtgagaggcggcctgggcgcccccagaagaagcccctgcctgctgctgctgtggctgctgctgctgagactggagcccgtgaccgccgccgccggccccagagccccctgcgccgccgcctgcacctgcgccggcgacagcctggactgcggcggcagaggcctggccgccctgcccggcgacctgcccagctggaccagaagcctgaacctgagctacaacaagctgagcgagatcgaccccgccggcttcgaggacctgcccaacctgcaggaggtgtacctgaacaacaacgagctgaccgccgtgcccagcctgggcgccgccagcagccacgtggtgagcctgttcctgcagcacaacaagatcagaagcgtggagggcagccagctgaaggcctacctgagcctggaggtgctggacctgagcctgaacaacatcaccgaggtgagaaacacctgcttcccccacggcccccccatcaaggagctgaacctggccggcaacagaatcggcaccctggagctgggcgccttcgacggcctgagcagaagcctgctgaccctgagactgagcaagaacagaatcacccagctgcccgtgagagccttcaagctgcccagactgacccagctggacctgaacagaaacagaatcagactgatcgagggcctgaccttccagggcctgaacagcctggaggtgctgaagctgcagagaaacaacatcagcaagctgaccgacggcgccttctggggcctgagcaagatgcacgtgctgcacctggagtacaacagcctggtggaggtgaacagcggcagcctgtacggcctgaccgccctgcaccagctgcacctgagcaacaacagcatcgccagaatccacagaaagggctggagcttctgccagaagctgcacgagctggtgctgagcttcaacaacctgaccagactggacgaggagagcctggccgagctgagcagcctgagcgtgctgagactgagccacaacagcatcagccacatcgccgagggcgccttcaagggcctgagaagcctgagagtgctggacctggaccacaacgagatcagcggcaccatcgaggacaccagcggcgccttcagcggcctggacagcctgagcaagctgctgctgctggagcccagccagagcgccggctgcagcagccccagccagccccacatgagcgccggcggcagaaccctgttcggcaacaagatcaagagcgtggccaagagagccttcagcggcctggagggcctggagcacctgaacctgggcggcaacgccatcagaagcgtgcagttcgacgccttcgtgaagatgaagaacctgaaggagctgcacatcagcagcgacagcttcctgtgcgactgccagctgaagtggctgcccccctggctgatcggcagaatgctgcaggccttcgtgaccgccacctgcgcccaccccgagagcctgaagggccagagcatcttcagcgtgccccccgagagcttcgtgtgcgacgacttcctgaagccccagatcatcacccagcccgagaccaccatggccatggtgggcaaggacatcagattcacctgcagcgccgccagcagcagcagcagccccatgaccttcgcctggaagaaggacaacgaggtgctgaccaacgccgacatggagaacttcgtgcacgtgcacgcccaggacggcgaggtgatggagtacaccaccatcctgcacctgagacaggtgaccttcggccacgagggcagataccagtgcgtgatcaccaaccacttcggcagcacctacagccacaaggccagactgaccgtgaacgtgctgcccagcttcaccaagaccccccacgacatcaccatcagaaccaccaccatggccagactggagtgcgccgccaccggccaccccaacccccagatcgcctggcagaaggacggcggcaccgacttccccgccgcccagacccccagcctggtggtgcccctggaggacagagtggtgagcgtgggcgagaccgtggccctgcagtgcaaggccaccggcaaccccccccccagaatcacctggttcaagggcgacagacccctgagcctgaccgagagacaccacctgacccccgacaaccagctgctggtggtgcagaacgtggtggccgaggacgccggcagatacacctgcgagatgagcaacaccctgggcaccgagagagcccacagccagctgagcgtgctgcccgccgccggctgcagaaaggacggcaccaccgtgggcatcttcaccatcgccgtggtgagcagcatcgtgctgaccagcctggtgtgggtgtgcatcatctaccagaccagaaagaagagcgaggagtacagcgtgaccaacaccgacgagaccgtggtgccccccgacgtgcccagctacctgagcagccagggcaccctgagcgacagacaggagaccgtggtgagaaccgagggcggcccccaggccaacggccacatcgagagcaacggcgtgtgccccagagacgccagccacttccccgagcccgacacccacagcgtggcctgcagacagcccaagctgtgcgccggcagcgcctaccacaaggagccctggaaggccatggagaaggccgagggcacccccggcccccacaagatggagcacggcggcagagtggtgtgcagcgactgcaacaccgaggtggactgctacagcagaggccaggccttccacccccagcccgtgagcagagacagcgcccagcccagcgcccccaacggccccgagcccggcggcagcgaccaggagcacagcccccaccaccagtgcagcagaaccgccgccggcagctgccccgagtgccagggcagcctgtaccccagcaaccacgacagaatgctgaccgccgtgaagaagaagcccatggccagcctggacggcaagggcgacagcagctggaccctggccagactgtaccaccccgacagcaccgagctgcagcccgccagcagcctgaccagcggcagccccgagagagccgaggcccagtacctgctggtgagcaacggccacctgcccaaggcctgcgacgccagccccgagagcacccccctgaccggccagctgcccggcaagcagagagtgcccctgctgctggcccccaagagctag

SEQ ID NO: 187261 - protein, 129 aa, Artificial Sequence
  derived and/or modified sequence
MSSMNPEYDYLFKLLLIGDSGVGKSCLLLRFADDTYTESYISTIGVDFKIRTIELDGKTIKLQIEFADSLGIPFLETSAKNATNVEQSFMTMAAEIKKRMGPGATAGGAEKSNVKIQSTPVKQSGGGCC

SEQ ID NO: 187262 - protein, 129 aa, Artificial Sequence
  derived and/or modified sequence
MSCLHPTSDYLFKLLLIGDSGVGKSCLLLRFADDTYTESYISTIGVDFKIRTIELDGKTIKLQIEFADSLGIPFLETSAKNATNVEQSFMTMAAEIKKRMGPGATAGGAEKSNVKIQSTPVKQSGGGCC

SEQ ID NO: 187263 - DNA, 390 bp, Artificial Sequence
  derived and/or modified sequence
atgagttcaatgaatcccgagtatgactacctgtttaaattactcctcataggggacagcggcgtaggaaagtcttgtctgctgctgcggttcgccgacgatacatacacagaaagctatatcagcacgataggagttgattttaagatacgcacaatcgaacttgacggtaagaccataaagttgcagatcgaatttgctgattccttgggtatacctttccttgagacttcggcaaaaaatgcgactaacgtggaacagtcttttatgaccatggccgctgagatcaagaaacgcatgggacccggagccactgctggcggagcggaaaaaagcaatgttaaaattcagtcaaccccagtgaaacagagtggggggggctgctgttag

SEQ ID NO: 187264 - DNA, 390 bp, Artificial Sequence
  derived and/or modified sequence
atgtcctgcctccatcctaccagcgactatctcttcaaactgttactcatcggagacagcggcgtcgggaagtcttgtctgttactcagattcgcagatgatacctacactgaaagctacatttcaacaatcggcgtggactttaagatccggaccattgaattagatggtaagacgatcaagctgcaaatcgagttcgcggactctcttgggattccatttctcgaaactagcgccaagaatgccacaaacgttgaacagtccttcatgacaatggctgcagagataaagaaacgtatggggcccggggccacagctggcggcgccgaaaaatccaacgtgaagattcagtctacacctgttaagcagtcggggggaggatgctgttag

SEQ ID NO: 187265 - DNA, 390 bp, Artificial Sequence
  derived and/or modified sequence
atgagctccatgaacccagaatatgactacctgttcaagctgctgctgattggagacagcggcgtgggcaagagctgcctgctgctgcgctttgctgatgacacctacacagagagctacatcagcaccatcggcgtggacttcaagatccgcaccatcgagctggatggcaagaccatcaagctgcagatcgagtttgctgacagcctgggcatccccttcctggagaccagcgccaagaatgccaccaacgtggagcagagcttcatgaccatggctgctgagatcaagaagaggatgggccctggggccacagctgggggcgctgagaagagcaatgtgaagatccagagcacccctgtgaagcagagcggcggcggctgctgctag

SEQ ID NO: 187266 - DNA, 390 bp, Artificial Sequence
  derived and/or modified sequence
atgagctgcctgcaccccaccagtgactacctgttcaagctgctgctgattggagacagcggcgtgggcaagagctgcctgctgctgcgctttgctgatgacacctacacagagagctacatcagcaccatcggcgtggacttcaagatccgcaccatcgagctggatggcaagaccatcaagctgcagatcgagtttgctgacagcctgggcatccccttcctggagaccagcgccaagaatgccaccaacgtggagcagagcttcatgaccatggctgctgagatcaagaagaggatgggccctggggccacagctgggggcgctgagaagagcaatgtgaagatccagagcacccctgtgaagcagagcggcggcggctgctgctag

SEQ ID NO: 187267 - DNA, 390 bp, Artificial Sequence
  derived and/or modified sequence
atgagcagcatgaaccccgagtacgactacctgttcaagctgctgctaataggcgacagtggcgttggcaaatcctgtctccttctacgcttcgctgacgacacatataccgagtcttatatttccactataggtgtggattttaagatcaggacaattgaactggacggtaaaacaatcaaactgcaaatcgaatttgctgactctttggggatccctttcttagagacctctgctaagaatgctaccaacgtggagcagtccttcatgaccatggcggccgaaattaaaaaaagaatggggcccggggctacagccggcggggccgagaagtcgaatgtcaagattcagagtacccccgttaaacagtctggaggtgggtgttgttag

SEQ ID NO: 187268 - DNA, 390 bp, Artificial Sequence
  derived and/or modified sequence
atgagctgcctgcaccccaccagcgactacctgttcaagctgctgttgatcggtgactcgggggtggggaagtcgtgtttacttttgagatttgccgatgacacatacactgagagttacatttctactattggagttgattttaaaatacgtacaatagagctcgacggcaagaccataaagctccagatcgagtttgccgactccctggggataccctttctagaaaccagcgccaagaacgctaccaatgtggaacagagctttatgaccatggccgcggaaatcaagaagcgtatggggcccggggctactgccggaggcgctgagaagtcaaatgtgaagattcagtcaacacccgtaaaacagtccgggggagggtgctgttag

SEQ ID NO: 187269 - DNA, 390 bp, Artificial Sequence
  derived and/or modified sequence
atgtcctcaatgaaccctgaatacgattacctgtttaaactacttctgattggggactccggcgtgggcaagtcctgcctgctgttaaggttcgcggacgacacgtacaccgaatcatatatctctactatcggcgtggacttcaaaattcgcaccatcgagcttgatgggaagaccataaagctgcagatcgaatttgcagatagtttggggattcccttcctcgaaacgagtgcaaaaaacgccaccaatgttgaacaatcatttatgaccatggctgcagaaatcaaaaaaagaatggggccaggagccactgctggcggtgcagaaaaatcgaacgtgaaaatccagagcacaccggtaaagcaatccggagggggatgttgctag

SEQ ID NO: 187270 - DNA, 390 bp, Artificial Sequence
  derived and/or modified sequence
atgtcttgcctgcaccctacctcagactatctcttcaagctcctgcttatcggcgacagtggtgttggcaagtcttgcctgctgctgagatttgccgacgacacctacaccgagtcctatatttccacaattggcgtagactttaaaatccggacaatcgaactggacggtaaaaccataaagctacaaatcgaatttgccgactccctggggattccattcttggaaaccagcgcaaagaatgcaaccaatgtggagcagtcctttatgacaatggctgcggagataaaaaagcgtatggggccaggggctaccgccggtggcgcagagaagtctaacgtaaaaatccagagtaccccagtgaaacagagcggtggaggatgctgttag

SEQ ID NO: 187271 - DNA, 1198 bp, Artificial Sequence
  derived and/or modified sequence
gggtggaagcgatagctgagtggcggcggctgctgattgtgttctaggggacggagtaggggaagacgtttgctctcccggaacagcctatctcattcctttctttcgattacccgtggcgcggagagtcagggcggcggctgcggcagcaagggcggcggtggcggcggcggcagctgcagtgacatgtccagcatgaatcccgaatatgattatttattcaagttacttctgattggcgactcaggggttggaaagtcttgccttcttcttaggtttgcagatgatacatatacagaaagctacatcagcacaattggtgtggatttcaaaataagaactatagagttagacgggaaaacaatcaagcttcaaatagaatttgctgattcccttggaattccgtttttggaaaccagtgctaagaatgcaacgaatgtagaacagtctttcatgacgatggcagctgagattaaaaagcgaatgggtcccggagcaacagctggtggtgctgagaagtccaatgttaaaattcagagcactccagtcaagcagtcaggtggaggttgctgctaaaatttgcctccatccttttctcacagcaatgaatttgcaatctgaacccaagtgaaaaaacaaaattgcctgaattgtactgtatgtagctgcactacaacagattcttaccgtctccacaaaggtcagagattgtaaatggtcaatactgactttttttttattcccttgactcaagacagctaacttcattttcagaactgttttaaacctttgtgtgctggtttataaaataatgtgtgtaatccttgttgctttcctgataccagactgtttcccgtggttggttagaatatattttgttttgatgtttatattggcatgtttagatgtcaggtttagtcttctgaagatgaagttcagccattttgtatcaaacagcacaagcagtgtctgtcactttccatgcataaagtttagtgagatgttatatgtaagatctgatttgctagttcttccttgtagagttataaatggaaagattacactatctgattaatagtttcttcatactctgcatataatttgtggctgcagaatattgtaatttgttgcacactatgtaacaaaacaactgaagatatgtttaataaatattgtacttattggaagtaatatcaaa

SEQ ID NO: 187272 - DNA, 1003 bp, Artificial Sequence
  derived and/or modified sequence
atgtcttgtttacatcctaccagtgattatttattcaagttacttctgattggcgactcaggggttggaaagtcttgccttcttcttaggtttgcagatgatacatatacagaaagctacatcagcacaattggtgtggatttcaaaataagaactatagagttagacgggaaaacaatcaagcttcaaatagaatttgctgattcccttggaattccgtttttggaaaccagtgctaagaatgcaacgaatgtagaacagtctttcatgacgatggcagctgagattaaaaagcgaatgggtcccggagcaacagctggtggtgctgagaagtccaatgttaaaattcagagcactccagtcaagcagtcaggtggaggttgctgctaaaatttgcctccatccttttctcacagcaatgaatttgcaatctgaacccaagtgaaaaaacaaaattgcctgaattgtactgtatgtagctgcactacaacagattcttaccgtctccacaaaggtcagagattgtaaatggtcaatactgactttttttttattcccttgactcaagacagctaacttcattttcagaactgttttaaacctttgtgtgctggtttataaaataatgtgtgtaatccttgttgctttcctgataccagactgtttcccgtggttggttagaatatattttgttttgatgtttatattggcatgtttagatgtcaggtttagtcttctgaagatgaagttcagccattttgtatcaaacagcacaagcagtgtctgtcactttccatgcataaagtttagtgagatgttatatgtaagatctgatttgctagttcttccttgtagagttataaatggaaagattacactatctgattaatagtttcttcatactctgcatataatttgtggctgcagaatattgtaatttgttgcacactatgtaacaaaacaactgaagatatgtttaataaatattgtacttattggaagt

SEQ ID NO: 187273 - DNA, 390 bp, Artificial Sequence
  derived and/or modified sequence
atgagcagcatgaaccccgagtacgactacctgttcaagctgctgctgatcggcgacagcggcgtgggcaagagctgcctgctgctgagattcgccgacgacacctacaccgagagctacatcagcaccatcggcgtggacttcaagatcagaaccatcgagctggacggcaagaccatcaagctgcagatcgagttcgccgacagcctgggcatccccttcctggagaccagcgccaagaacgccaccaacgtggagcagagcttcatgaccatggccgccgagatcaagaagagaatgggccccggcgccaccgccggcggcgccgagaagagcaacgtgaagatccagagcacccccgtgaagcagagcggcggcggctgctgctag

SEQ ID NO: 187274 - DNA, 390 bp, Artificial Sequence
  derived and/or modified sequence
atgagctgcctgcaccccaccagcgactacctgttcaagctgctgctgatcggcgacagcggcgtgggcaagagctgcctgctgctgagattcgccgacgacacctacaccgagagctacatcagcaccatcggcgtggacttcaagatcagaaccatcgagctggacggcaagaccatcaagctgcagatcgagttcgccgacagcctgggcatccccttcctggagaccagcgccaagaacgccaccaacgtggagcagagcttcatgaccatggccgccgagatcaagaagagaatgggccccggcgccaccgccggcggcgccgagaagagcaacgtgaagatccagagcacccccgtgaagcagagcggcggcggctgctgctag

SEQ ID NO: 187275 - protein, 700 aa, Artificial Sequence
  derived and/or modified sequence
MDFVRLARLFARARPMGLFILQHLDPCRARWAGGREGLMRPMWAPFSSSSSQLPLGQERQENTGSLGSDPSHSNSTATQEEDEEEEESFGTLSDKYSSRRLFRKSAAQFHNLRFGERRDEQMEPEPKLWRGRRNTPYWYFLQCKHLIKEGKLVEALDLFERQMLKEERLQPMESNYTVLIGGCGRVGYLKKAFNLYNQMKKRDLEPSDATYTALFNVCAESPWKDSALQSALKLRQQLQAKNFELNLKTYHALLKMAAKCADLRMCLDVFKEIIHKGHVVTEETFSFLLMGCIQDKKTGFRYALQVWRLMLSLGLQPSRDSYNLLLVAARDCGLGDPQVASELLLKPREEATVLQPPVSRQRPRRTAQAKAGNLMSAMLHVEALERQLFLEPSQALGPPEPPEARVPGKAQPEVDTKAEPSHTAALTAVALKPPPVELEVNLLTPGAVPPTVVSFGTVTTPADRLALIGGLEGFLSKMAEHRQQPDIRTLTLLAEVVESGSPAESLLLALLDEHQVEADLTFFNTLVRKKSKLGDLEGAKALLPVLAKRGLVPNLQTFCNLAIGCHRPKDGLQLLTDMKKSQVTPNTHIYSALINAAIRKLNYTYLISILKDMKQNRVPVNEVVIRQLEFAAQYPPTFDRYQGKNTYLEKIDGFRAYYKQWLTVMPAEETPHPWQKFRTKPQGDQDTGKEADDGCALGGR

SEQ ID NO: 187276 - protein, 106 aa, Artificial Sequence
  derived and/or modified sequence
MDFVRLARLFARARPMGLFILQHLDPCRARWAGGREGLMRPMWAPFSSSSSQLPLGQERQENTGSLGSDPSHSNSTATQEEDEEEEESFGTLSDKYSSRRLFRKSA

SEQ ID NO: 187277 - protein, 144 aa, Artificial Sequence
  derived and/or modified sequence
MDFVRLARLFARARPMGLFILQHLDPCRARWAGGREGLMRPMWAPFSSSSSQLPLGQERQENTGSLGSDPSHSNSTATQEEDEEEEESFGTLSDKYSSRRLFRKSAAQFHNLRFGERRDEQMEPEPKLWRGRRNTPYWYFLQCK

SEQ ID NO: 187278 - protein, 164 aa, Artificial Sequence
  derived and/or modified sequence
MDFVRLARLFARARPMGLFILQHLDPCRARWAGGREGLMRPMWAPFSSSSSQLPLGQERQENTGSLGSDPSHSNSTATQEEDEEEEESFGTLSDKYSSRRLFRKSAAQFHNLRFGERRDEQMEPEPKLWRGRRNTPYWYFLQCKHLIKEGKLVEALDLFERQML

SEQ ID NO: 187279 - protein, 70 aa, Artificial Sequence
  derived and/or modified sequence
MDFVRLARLFARARPMGLFILQHLDPCRARWAGGREGLMRPMWAPFSSSSSQLPLGQERQENTGSLGSDP

SEQ ID NO: 187280 - protein, 482 aa, Artificial Sequence
  derived and/or modified sequence
RKRLVRRGDRAGLPVGVHQLQAKNFELNLKTYHALLKMAAKCADLRMCLDVFKEIIHKGHVVTEETFSFLLMGCIQDKKTGFRYALQVWRLMLSLGLQPSRDSYNLLLVAARDCGLGDPQVASELLLKPREEATVLQPPVSRQRPRRTAQAKAGNLMSAMLHVEALERQLFLEPSQALGPPEPPEARVPGKAQPEVDTKAEPSHTAALTAVALKPPPVELEVNLLTPGAVPPTVVSFGTVTTPADRLALIGGLEGFLSKMAEHRQQPDIRTLTLLAEVVESGSPAESLLLALLDEHQVEADLTFFNTLVRKKSKLGDLEGAKALLPVLAKRGLVPNLQTFCNLAIGCHRPKDGLQLLTDMKKSQVTPNTHIYSALINAAIRKLNYTYLISILKDMKQNRVPVNEVVIRQLEFAAQYPPTFDRYQGKNTYLEKIDGFRAYYKQWLTVMPAEETPHPWQKFRTKPQGDQDTGKEADDGCALGGR

SEQ ID NO: 187281 - DNA, 2103 bp, Artificial Sequence
  derived and/or modified sequence
atggacttcgtgagactggccagactgttcgccagagccagacccatgggcctgttcatcctgcagcacctggacccctgcagagccagatgggccggcggcagagagggcctgatgagacccatgtgggcccccttcagcagcagcagcagccagctgcccctgggccaggagagacaggagaacaccggcagcctgggcagcgaccccagccacagcaacagcaccgccacccaggaggaggacgaggaggaggaggagagcttcggcaccctgagcgacaagtacagcagcagaagactgttcagaaagagcgccgcccagttccacaacctgagattcggcgagagaagagacgagcagatggagcccgagcccaagctgtggagaggcagaagaaacaccccctactggtacttcctgcagtgcaagcacctgatcaaggagggcaagctggtggaggccctggacctgttcgagagacagatgctgaaggaggagagactgcagcccatggagagcaactacaccgtgctgatcggcggctgcggcagagtgggctacctgaagaaggccttcaacctgtacaaccagatgaagaagagagacctggagcccagcgacgccacctacaccgccctgttcaacgtgtgcgccgagagcccctggaaggacagcgccctgcagagcgccctgaagctgagacagcagctgcaggccaagaacttcgagctgaacctgaagacctaccacgccctgctgaagatggccgccaagtgcgccgacctgagaatgtgcctggacgtgttcaaggagatcatccacaagggccacgtggtgaccgaggagaccttcagcttcctgctgatgggctgcatccaggacaagaagaccggcttcagatacgccctgcaggtgtggagactgatgctgagcctgggcctgcagcccagcagagacagctacaacctgctgctggtggccgccagagactgcggcctgggcgacccccaggtggccagcgagctgctgctgaagcccagagaggaggccaccgtgctgcagccccccgtgagcagacagagacccagaagaaccgcccaggccaaggccggcaacctgatgagcgccatgctgcacgtggaggccctggagagacagctgttcctggagcccagccaggccctgggcccccccgagccccccgaggccagagtgcccggcaaggcccagcccgaggtggacaccaaggccgagcccagccacaccgccgccctgaccgccgtggccctgaagcccccccccgtggagctggaggtgaacctgctgacccccggcgccgtgccccccaccgtggtgagcttcggcaccgtgaccacccccgccgacagactggccctgatcggcggcctggagggcttcctgagcaagatggccgagcacagacagcagcccgacatcagaaccctgaccctgctggccgaggtggtggagagcggcagccccgccgagagcctgctgctggccctgctggacgagcaccaggtggaggccgacctgaccttcttcaacaccctggtgagaaagaagagcaagctgggcgacctggagggcgccaaggccctgctgcccgtgctggccaagagaggcctggtgcccaacctgcagaccttctgcaacctggccatcggctgccacagacccaaggacggcctgcagctgctgaccgacatgaagaagagccaggtgacccccaacacccacatctacagcgccctgatcaacgccgccatcagaaagctgaactacacctacctgatcagcatcctgaaggacatgaagcagaacagagtgcccgtgaacgaggtggtgatcagacagctggagttcgccgcccagtacccccccaccttcgacagataccagggcaagaacacctacctggagaagatcgacggcttcagagcctactacaagcagtggctgaccgtgatgcccgccgaggagaccccccacccctggcagaagttcagaaccaagccccagggcgaccaggacaccggcaaggaggccgacgacggctgcgccctgggcggcagatag

SEQ ID NO: 187282 - DNA, 321 bp, Artificial Sequence
  derived and/or modified sequence
atggacttcgtgagactggccagactgttcgccagagccagacccatgggcctgttcatcctgcagcacctggacccctgcagagccagatgggccggcggcagagagggcctgatgagacccatgtgggcccccttcagcagcagcagcagccagctgcccctgggccaggagagacaggagaacaccggcagcctgggcagcgaccccagccacagcaacagcaccgccacccaggaggaggacgaggaggaggaggagagcttcggcaccctgagcgacaagtacagcagcagaagactgttcagaaagagcgcctag

SEQ ID NO: 187283 - DNA, 435 bp, Artificial Sequence
  derived and/or modified sequence
atggacttcgtgagactggccagactgttcgccagagccagacccatgggcctgttcatcctgcagcacctggacccctgcagagccagatgggccggcggcagagagggcctgatgagacccatgtgggcccccttcagcagcagcagcagccagctgcccctgggccaggagagacaggagaacaccggcagcctgggcagcgaccccagccacagcaacagcaccgccacccaggaggaggacgaggaggaggaggagagcttcggcaccctgagcgacaagtacagcagcagaagactgttcagaaagagcgccgcccagttccacaacctgagattcggcgagagaagagacgagcagatggagcccgagcccaagctgtggagaggcagaagaaacaccccctactggtacttcctgcagtgcaagtag

SEQ ID NO: 187284 - DNA, 495 bp, Artificial Sequence
  derived and/or modified sequence
atggacttcgtgagactggccagactgttcgccagagccagacccatgggcctgttcatcctgcagcacctggacccctgcagagccagatgggccggcggcagagagggcctgatgagacccatgtgggcccccttcagcagcagcagcagccagctgcccctgggccaggagagacaggagaacaccggcagcctgggcagcgaccccagccacagcaacagcaccgccacccaggaggaggacgaggaggaggaggagagcttcggcaccctgagcgacaagtacagcagcagaagactgttcagaaagagcgccgcccagttccacaacctgagattcggcgagagaagagacgagcagatggagcccgagcccaagctgtggagaggcagaagaaacaccccctactggtacttcctgcagtgcaagcacctgatcaaggagggcaagctggtggaggccctggacctgttcgagagacagatgctgtag

SEQ ID NO: 187285 - DNA, 213 bp, Artificial Sequence
  derived and/or modified sequence
atggacttcgtgagactggccagactgttcgccagagccagacccatgggcctgttcatcctgcagcacctggacccctgcagagccagatgggccggcggcagagagggcctgatgagacccatgtgggcccccttcagcagcagcagcagccagctgcccctgggccaggagagacaggagaacaccggcagcctgggcagcgacccctag

SEQ ID NO: 187286 - DNA, 1449 bp, Artificial Sequence
  derived and/or modified sequence
agaaagagactggtgagaagaggcgacagagccggcctgcccgtgggcgtgcaccagctgcaggccaagaacttcgagctgaacctgaagacctaccacgccctgctgaagatggccgccaagtgcgccgacctgagaatgtgcctggacgtgttcaaggagatcatccacaagggccacgtggtgaccgaggagaccttcagcttcctgctgatgggctgcatccaggacaagaagaccggcttcagatacgccctgcaggtgtggagactgatgctgagcctgggcctgcagcccagcagagacagctacaacctgctgctggtggccgccagagactgcggcctgggcgacccccaggtggccagcgagctgctgctgaagcccagagaggaggccaccgtgctgcagccccccgtgagcagacagagacccagaagaaccgcccaggccaaggccggcaacctgatgagcgccatgctgcacgtggaggccctggagagacagctgttcctggagcccagccaggccctgggcccccccgagccccccgaggccagagtgcccggcaaggcccagcccgaggtggacaccaaggccgagcccagccacaccgccgccctgaccgccgtggccctgaagcccccccccgtggagctggaggtgaacctgctgacccccggcgccgtgccccccaccgtggtgagcttcggcaccgtgaccacccccgccgacagactggccctgatcggcggcctggagggcttcctgagcaagatggccgagcacagacagcagcccgacatcagaaccctgaccctgctggccgaggtggtggagagcggcagccccgccgagagcctgctgctggccctgctggacgagcaccaggtggaggccgacctgaccttcttcaacaccctggtgagaaagaagagcaagctgggcgacctggagggcgccaaggccctgctgcccgtgctggccaagagaggcctggtgcccaacctgcagaccttctgcaacctggccatcggctgccacagacccaaggacggcctgcagctgctgaccgacatgaagaagagccaggtgacccccaacacccacatctacagcgccctgatcaacgccgccatcagaaagctgaactacacctacctgatcagcatcctgaaggacatgaagcagaacagagtgcccgtgaacgaggtggtgatcagacagctggagttcgccgcccagtacccccccaccttcgacagataccagggcaagaacacctacctggagaagatcgacggcttcagagcctactacaagcagtggctgaccgtgatgcccgccgaggagaccccccacccctggcagaagttcagaaccaagccccagggcgaccaggacaccggcaaggaggccgacgacggctgcgccctgggcggcagatag

SEQ ID NO: 187287 - DNA, 2103 bp, Artificial Sequence
  derived and/or modified sequence
atggacttcgtcagacttgcaaggctgtttgccagggccaggccaatggggctgtttatcttgcagcatttggatccatgtcgagctcgctgggccggcggacgtgaagggctaatgagaccaatgtgggcaccattctctagctcctctagtcagctcccactgggccaagagagacaagaaaataccggtagtctcggctctgacccaagccattccaacagcaccgccacccaggaggaagatgaggaggaggaggaatcctttggcacacttagtgataaatattcttcccgtcgtctattccgcaaaagtgcagcccaatttcacaatctgcgcttcggggaacgccgcgacgagcagatggaaccagaacctaaattgtggaggggcaggcgaaataccccttattggtatttcctccagtgcaagcaccttatcaaggagggcaagcttgtagaggcgctggacctattcgaacggcagatgctgaaggaggaacgcctacagcccatggaatctaactataccgtgctgattgggggatgtggtcgggttggctatctgaaaaaagctttcaacttgtataaccagatgaaaaagcgtgacctggaaccttctgacgcgacttacaccgcgttatttaatgtatgtgccgaatccccctggaaagacagtgccctgcaaagcgctttaaaactgcgacagcaactccaggcaaagaatttcgaactgaacctgaaaacttaccatgcgctcctaaagatggcagccaagtgcgcagacctcagaatgtgccttgacgtatttaaagaaatcatccacaaaggacacgtagtcaccgaggaaaccttttccttcctgctgatggggtgtattcaggacaagaagactggattcagatatgcgttacaggtgtggcgtctaatgctgtccctcgggctgcagccctctagggattcctacaatctgctgttggtcgccgccagggattgtgggctgggcgacccacaagttgcgtccgagctcctgctcaagccccgtgaggaggcaacagtactacagccacccgtatccaggcagcgcccaaggcgcaccgcacaagctaaggcagggaacctaatgtcagcaatgctgcatgttgaagccttggaacgacagctcttcctggaacccagccaggcattgggcccgcctgagcctcctgaggcaagggtccccggtaaggcacaacctgaggttgacactaaggctgaacctagccatacagccgccctgacagcagtggccctcaagccacccccggtcgaacttgaggtgaaccttctgacccccggagcggtccccccaaccgtggtaagttttggcacagtcacgacacccgcggataggctggctctcataggcggactggaggggtttctgtcaaagatggccgaacatagacagcagcctgacattagaactcttacactgcttgctgaagtagtggagagcggatcaccagccgagtccttacttctggccctcttagacgaacaccaggtggaggcggacctgacctttttcaacaccctcgtcaggaagaagtctaagctgggcgatcttgaaggagccaaggcactgctgcccgtgctcgccaaacgcggcctggtgccgaacctccagaccttttgcaatctcgctattggctgccacaggcctaaggatggcttgcagcttcttaccgacatgaaaaagtcgcaggtgaccccaaacacccatatatactcagcccttataaatgctgctattagaaagttgaactatacgtacttaataagtattctgaaggacatgaagcaaaatagggttccggtgaacgaggtagtgatccggcagcttgagtttgctgcgcagtaccccccaacttttgacagataccagggcaagaacacctatctggaaaaaattgacggttttagagcttactacaagcagtggctgaccgtgatgcctgctgaggagacacctcatccatggcaaaaatttcggaccaagccacaaggagaccaagacacagggaaggaagcagatgatggctgtgccttgggcggcagatag

SEQ ID NO: 187288 - DNA, 321 bp, Artificial Sequence
  derived and/or modified sequence
atggatttcgttcggttggcccggctcttcgctagggcccgccccatgggcctgtttatactacaacatctggacccctgtcgtgcacgttgggctgggggaagagagggactgatgaggcccatgtgggctccattctcctcaagtagcagccagctgccattaggacaggagagacaagaaaacacagggtccctcgggtccgacccaagccactccaactcaaccgccactcaagaagaggacgaagaggaagaggagtcttttggcaccctgtctgacaaatattcctctcggagactttttcggaagagtgcatag

SEQ ID NO: 187289 - DNA, 435 bp, Artificial Sequence
  derived and/or modified sequence
atggattttgtgcggctcgctagactcttcgccagggctaggcccatgggcctgttcatactgcagcatttggatccatgtcgagcacgctgggcaggaggcagagaaggtctaatgaggccaatgtgggcaccattctcatcctcatcctcacagttacccttgggccaagagagacaggagaatacgggaagtttgggttcagatccatcccatagcaattccactgccacacaggaagaagatgaggaggaagaggaatcgttcggcaccctgagcgataagtactccagtagacggctttttcgaaaaagtgccgcacagtttcacaacctgcgattcggggaacgaagagacgaacagatggaacccgaacccaagctgtggcgcggcaggcgtaatacaccatactggtatttcctccagtgcaagtag

SEQ ID NO: 187290 - DNA, 495 bp, Artificial Sequence
  derived and/or modified sequence
atggactttgtccgattagcacggcttttcgccagagctcgcccaatgggactgttcattctgcagcatctagacccctgccgtgcccgttgggcaggggggcgtgaagggctcatgcggcccatgtgggcacctttctcttccagtagcagccagcttcccctgggacaggagagacaggagaacaccggttccctgggctcagaccccagccatagtaactctacagccacacaggaagaagacgaggaggaagaggaatcctttggtaccctttctgataagtactctagccgtcggctgttccgtaaatccgccgcacagttccataacctgaggtttggggagaggcgggacgaacagatggagcccgagcctaaactctggagaggtcgtcgtaacaccccctactggtattttctgcaatgcaaacaccttattaaggagggcaaactggtagaggcactggatctttttgaaagacagatgctttag

SEQ ID NO: 187291 - DNA, 213 bp, Artificial Sequence
  derived and/or modified sequence
atggatttcgtaaggctggcaagattatttgccagagcacgcccaatgggactatttatactgcagcacctcgacccatgtcgcgcacggtgggctggagggagagagggcctaatgagaccgatgtgggcgcctttctccagttcgtctagccaactccctctgggccaggagcgtcaggaaaacacaggatcgttgggaagcgatccctag

SEQ ID NO: 187292 - DNA, 1449 bp, Artificial Sequence
  derived and/or modified sequence
cggaagcgcctggtgcggagaggggatagggctggactccccgtcggagtgcaccagctgcaggctaagaattttgaactaaatctgaaaacttaccatgccctgctgaagatggcagccaaatgcgcagacctccgtatgtgcttagatgtgttcaaggagataatccacaaaggacacgtggtgaccgaagagacattttcgttcttgttgatgggatgcattcaagacaaaaagactggctttcgctacgcgctgcaggtgtggagattgatgctctctctgggtctccagccctctagggattcatataatctcctgctggtggccgccagagactgtgggttaggggacccacaggtcgcatccgaactgctgctgaagcccagggaggaagcgaccgtactgcagcccccggtgtctaggcagagaccaagaagaacagctcaggctaaggcagggaaccttatgagtgccatgctccacgttgaagccctggaaaggcaattatttctggaacccagtcaggctctgggtcccccggagccgccagaagcaagagtgccaggaaaagcccagcctgaggttgacaccaaagcagagcccagtcacacagcggcactcactgcagtcgctctgaagccgcctccagttgagcttgaggttaatctgctgacacccggagccgtgcctcccacggttgtaagcttcggcactgttaccactcccgccgacagacttgcactgattggcggactggaaggatttctgagcaagatggccgagcataggcagcagccagatattcggacactcacactcttagcagaagtggttgaaagtggctctcccgcggagtcactcttgctggctctactggatgaacatcaggtggaagcagatctgactttctttaacacgctggtccgcaagaaaagcaagctcggggaccttgagggcgctaaagctctgttgcccgtgttagccaagagaggcctggtgcctaacctgcagactttttgcaatttagctattggctgccacaggccaaaggatggcctccagttattaaccgatatgaagaaaagccaagtgacaccaaacactcacatttattccgcgctgattaatgctgcgatccggaagctcaattacacctatctcatctctattctgaaggacatgaaacagaatagagttcctgtcaacgaggtcgtgatccgccaactcgagtttgccgctcagtatccacccactttcgatcgataccagggcaagaacacctatctcgaaaaaatcgatgggtttagggcctattataaacagtggttgactgttatgccagctgaagagacacctcatccctggcaaaaattccggacaaagccacagggggatcaagacactgggaaggaggcagatgacggatgcgccctgggcggtcgctag

SEQ ID NO: 187293 - DNA, 2103 bp, Artificial Sequence
  derived and/or modified sequence
atggactttgtgcggctggcccggctgtttgcccgggcccggcccatgggcctcttcatcctgcagcacctggacccctgccgggcccgctgggccggcggccgggagggcctgatgaggcccatgtgggcccccttcagcagcagcagcagccagctgcccctgggccaggagcggcaggagaacacaggcagcctgggcagtgaccccagccacagcaacagcacagccacccaggaggaggatgaggaggaggaggagagctttggcaccctgagtgacaagtacagcagcagaagactcttcaggaagtctgctgcccagttccacaacctgcgctttggagagaggagagatgagcagatggagcctgagcccaagctgtggagaggaagaagaaacaccccctactggtacttcctgcagtgcaagcacctgatcaaggagggcaagctggtggaggccctggacctgtttgagcggcagatgctgaaggaggagcggctgcagcccatggagagcaactacacagtgctgattggaggctgcggccgggtgggctacctgaagaaggccttcaacctgtacaaccagatgaagaagagggacctggagcccagtgatgccacctacacagccctcttcaacgtgtgtgccgagagcccctggaaggacagcgccctgcagagcgccctgaagctgcggcagcagctgcaggccaagaactttgagctgaacctgaagacctaccacgccctgctgaagatggccgccaagtgtgccgacctgaggatgtgcctggatgtgttcaaggagatcatccacaagggccacgtggtgacagaggagaccttctccttcctgctgatgggctgcatccaggacaagaagacaggcttccgctatgccctgcaggtgtggaggctgatgctgagcctgggcctgcagcccagccgggacagctacaacctgctgctggtggccgcccgggactgtggcctgggggacccccaggtggccagcgagctgctgctgaagccccgggaggaggccaccgtgctgcagccccctgtgtcccggcagaggcccaggagaacagcccaggccaaggccggcaacctgatgtctgccatgctgcacgtggaggccctggagcggcagctgttcctggagcccagccaggccctgggccccccagagcccccagaggcccgggtgcctgggaaggcccagcctgaggtggacaccaaggccgagcccagccacacagctgccctgacagctgtggccctgaagcccccacctgtggagctggaggtgaacctgctgaccccaggagctgtgcccccaacagtggtgtcctttggaacagtgaccaccccagctgaccggctggccctgattggaggcctggagggcttcctgagcaagatggccgagcaccggcagcagcctgacatccgcaccctgaccctgctggccgaggtggtggagagcggcagccctgctgagagcctgctgctggccctgctggatgagcaccaggtggaggccgacctgaccttcttcaacaccctggtgaggaagaagagcaagctgggggacctggagggcgccaaggccctgctgcctgtgctggccaagaggggcctggtgcccaacctgcagaccttctgcaacctggccatcggctgccaccggcccaaggatggcctgcagctgctgacagacatgaagaagagccaggtgacccccaacacccacatctacagcgccctgatcaatgctgccatcaggaagctgaactacacctacctgatcagcatcctgaaggacatgaagcagaacagagtgcctgtgaatgaggtggtgatccggcagctggagtttgctgcccagtacccacccacctttgaccgctaccagggcaagaacacctacctggagaagattgatggcttccgggcctactacaagcagtggctgactgtgatgcctgctgaggagaccccccacccctggcagaagttccgcaccaagccccagggcgaccaggacaccgggaaggaggctgatgatggctgtgccctgggcggccgctag

SEQ ID NO: 187294 - DNA, 321 bp, Artificial Sequence
  derived and/or modified sequence
atggactttgtgcggctggcccggctgtttgcccgggcccggcccatgggcctcttcatcctgcagcacctggacccctgccgggcccgctgggccggcggccgggagggcctgatgaggcccatgtgggcccccttcagcagcagcagcagccagctgcccctgggccaggagcggcaggagaacacaggcagcctgggcagtgaccccagccacagcaacagcacagccacccaggaggaggatgaggaggaggaggagagctttggcaccctgagtgacaagtacagcagcagaagactcttcaggaagagcgcctag

SEQ ID NO: 187295 - DNA, 435 bp, Artificial Sequence
  derived and/or modified sequence
atggactttgtgcggctggcccggctgtttgcccgggcccggcccatgggcctcttcatcctgcagcacctggacccctgccgggcccgctgggccggcggccgggagggcctgatgaggcccatgtgggcccccttcagcagcagcagcagccagctgcccctgggccaggagcggcaggagaacacaggcagcctgggcagtgaccccagccacagcaacagcacagccacccaggaggaggatgaggaggaggaggagagctttggcaccctgagtgacaagtacagcagcagaagactcttcaggaagtctgctgcccagttccacaacctgcgctttggagagaggagagatgagcagatggagcctgagcccaagctgtggagaggaagaagaaacaccccctactggtacttcctgcagtgcaagtag

SEQ ID NO: 187296 - DNA, 495 bp, Artificial Sequence
  derived and/or modified sequence
atggactttgtgcggctggcccggctgtttgcccgggcccggcccatgggcctcttcatcctgcagcacctggacccctgccgggcccgctgggccggcggccgggagggcctgatgaggcccatgtgggcccccttcagcagcagcagcagccagctgcccctgggccaggagcggcaggagaacacaggcagcctgggcagtgaccccagccacagcaacagcacagccacccaggaggaggatgaggaggaggaggagagctttggcaccctgagtgacaagtacagcagcagaagactcttcaggaagtctgctgcccagttccacaacctgcgctttggagagaggagagatgagcagatggagcctgagcccaagctgtggagaggaagaagaaacaccccctactggtacttcctgcagtgcaagcacctgatcaaggagggcaagctggtggaggccctggacctgtttgagcggcagatgctgtag

SEQ ID NO: 187297 - DNA, 213 bp, Artificial Sequence
  derived and/or modified sequence
atggactttgtgcggctggcccggctgtttgcccgggcccggcccatgggcctcttcatcctgcagcacctggacccctgccgggcccgctgggccggcggccgggagggcctgatgaggcccatgtgggcccccttcagcagcagcagcagccagctgcccctgggccaggagcggcaggagaacacaggcagcctgggcagtgacccctag

SEQ ID NO: 187298 - DNA, 1449 bp, Artificial Sequence
  derived and/or modified sequence
aggaagaggctggtgcggcggggggacagagctggcctgcctgtgggcgtgcaccagctgcaggccaagaactttgagctgaacctgaagacctaccacgccctgctgaagatggccgccaagtgtgccgacctgaggatgtgcctggatgtgttcaaggagatcatccacaagggccacgtggtgacagaggagaccttctccttcctgctgatgggctgcatccaggacaagaagacaggcttccgctatgccctgcaggtgtggaggctgatgctgagcctgggcctgcagcccagccgggacagctacaacctgctgctggtggccgcccgggactgtggcctgggggacccccaggtggccagcgagctgctgctgaagccccgggaggaggccaccgtgctgcagccccctgtgtcccggcagaggcccaggagaacagcccaggccaaggccggcaacctgatgtctgccatgctgcacgtggaggccctggagcggcagctgttcctggagcccagccaggccctgggccccccagagcccccagaggcccgggtgcctgggaaggcccagcctgaggtggacaccaaggccgagcccagccacacagctgccctgacagctgtggccctgaagcccccacctgtggagctggaggtgaacctgctgaccccaggagctgtgcccccaacagtggtgtcctttggaacagtgaccaccccagctgaccggctggccctgattggaggcctggagggcttcctgagcaagatggccgagcaccggcagcagcctgacatccgcaccctgaccctgctggccgaggtggtggagagcggcagccctgctgagagcctgctgctggccctgctggatgagcaccaggtggaggccgacctgaccttcttcaacaccctggtgaggaagaagagcaagctgggggacctggagggcgccaaggccctgctgcctgtgctggccaagaggggcctggtgcccaacctgcagaccttctgcaacctggccatcggctgccaccggcccaaggatggcctgcagctgctgacagacatgaagaagagccaggtgacccccaacacccacatctacagcgccctgatcaatgctgccatcaggaagctgaactacacctacctgatcagcatcctgaaggacatgaagcagaacagagtgcctgtgaatgaggtggtgatccggcagctggagtttgctgcccagtacccacccacctttgaccgctaccagggcaagaacacctacctggagaagattgatggcttccgggcctactacaagcagtggctgactgtgatgcctgctgaggagaccccccacccctggcagaagttccgcaccaagccccagggcgaccaggacaccgggaaggaggctgatgatggctgtgccctgggcggccgctag

SEQ ID NO: 187299 - DNA, 2103 bp, Artificial Sequence
  derived and/or modified sequence
atggacttcgtgcggctggcccggctgttcgcccgggcccggcccatgggcctgttcatcctccagcacctagatccttgccgagcaaggtgggccgggggacgagaggggctgatgcgcccgatgtgggcccctttttcatcctcatccagccaactgcctcttggccaggagcgccaagaaaacacgggatcgctcggatcggacccttctcatagcaatagtaccgccacccaggaagaagacgaggaagaagaagagtctttcggcacactgagtgacaagtattcttccaggcggttgttcaggaagtccgccgctcagttccacaatttgagatttggagagcgtagagatgagcagatggagcctgagccaaaactgtggaggggcagacgaaataccccatactggtacttcttgcagtgcaaacatttgattaaggagggtaagttagtggaggcactagatctgttcgagcgacagatgcttaaggaggagagactgcagcccatggagtctaattatacagtgttgatcggtggatgcggcagggtagggtacttgaagaaggctttcaatctgtataaccagatgaagaagcgcgatctggaacccagcgatgctacatacacagcactgttcaatgtttgtgcggaaagcccttggaaagatagcgcactccagagtgccctcaaattacggcagcaactgcaggctaagaacttcgagttaaacctcaaaacgtaccacgctctcctcaagatggctgctaagtgtgctgacctccgcatgtgcttggacgtcttcaaggagattatccacaaagggcacgtggtcactgaggaaacttttagctttctactgatgggctgcatccaggacaagaagacaggatttcgatatgccctgcaggtgtggcggctgatgctgtccctaggactccagccatcccgcgactcatacaatcttctactcgtggccgcccgagactgcgggcttggagacccccaagttgccagtgaactcctccttaagccgagggaggaggctaccgtcttgcagccccctgtgtctagacagcgccctcggcgcacggcccaggcgaaggcaggaaacttaatgtctgccatgctgcacgtggaggccctagaaaggcaattgtttttagagcctagccaggccctcggacctccggagccgcccgaagcccgggtccccggcaaggcccaacccgaggtggacacaaaggccgagccaagccacactgccgccttgacagctgtggctctcaagcctcctccggtggagctcgaggtgaatctcctaacccccggagccgtgccacctactgtcgtcagttttggcacagtgaccacacctgctgatcggttagctctaatcggcggactcgagggctttctatcaaagatggccgagcatcggcagcagccggacattcgcacactgactctgctggccgaggtggtcgaaagcggaagtcccgccgaaagccttttgctcgcactcctggatgaacaccaggtcgaggcggacctgacttttttcaatactctagttcgcaagaagtccaaactaggggacctggaaggagctaaagcacttctacccgtcctggcaaagagaggactcgtgcctaacttgcagaccttctgtaatcttgcgataggatgccacaggcccaaggatgggttacaactcctcacagatatgaagaaaagccaagtgaccccaaatacacacatttacagcgcattaatcaacgcagcgattagaaaattgaattacacgtatctgatctctattctgaaagatatgaagcagaacagggtccccgtcaatgaggtggtcatacgacaacttgagttcgctgcacagtacccccctacctttgaccgatatcaaggcaaaaatacatatctggagaaaattgatggcttccgagcttactataagcagtggcttacagtcatgcccgccgaagagactccgcatccctggcaaaagtttcgaactaaaccacagggtgaccaggatactgggaaagaagccgacgacggatgtgcactgggcggccgctag

SEQ ID NO: 187300 - DNA, 321 bp, Artificial Sequence
  derived and/or modified sequence
atggacttcgtgcggctggcccggctgttcgcccgggcccggcccatgggtttattcatattgcagcaccttgacccatgccgcgcacgatgggccggtgggcgcgagggacttatgcgccctatgtgggcacctttctcctcttcaagtagccaattacctctcggtcaggagaggcaggaaaacacagggagcctgggctctgatccttctcactccaactccaccgccactcaagaggaagatgaagaagaggaggaaagttttggtaccctatccgataagtatagctcaaggcgtttatttcgtaagagtgcttag

SEQ ID NO: 187301 - DNA, 435 bp, Artificial Sequence
  derived and/or modified sequence
atggacttcgtgcggctggcccggctgttcgcccgggcccggcccatggggttgtttatcctgcaacacctcgatccttgtcgcgcaaggtgggctggcggtagggagggattgatgcggcctatgtgggcaccattctccagcagttcttcccaactgcctttgggacaggaacgacaagagaacacaggtagtttgggcagcgatccttcccactctaactctaccgccacacaggaggaagacgaggaagaggaggagtccttcggaaccctgtcagataaatactccagccggcggctcttccgcaaatctgcagctcagtttcacaatttgagattcggagagcgccgcgacgaacagatggagccagagccgaagttatggcggggccgacggaataccccatactggtattttttgcaatgcaaatag

SEQ ID NO: 187302 - DNA, 495 bp, Artificial Sequence
  derived and/or modified sequence
atggacttcgtgcggctggcccggctgttcgcccgggcccggcccatggggctgttcattttgcagcacctggatccatgtcgcgctaggtgggccggagggcgagaaggcctcatgaggccgatgtgggcaccattctcatccagctccagccaactgcctctcggacaggagcgccaagaaaacaccggatcactggggagtgatcctagccattcaaatagtaccgcaacacaggaagaagatgaggaagaggaggaatctttcgggaccctgtctgacaaatacagtagtcggcgcctgttccgcaagagcgccgcacaatttcacaacctgcggttcggagagcggcgcgacgaacagatggagcctgagccaaagctgtggcgaggtaggcgtaatacgccatactggtactttttacagtgcaagcatctgatcaaggaggggaagctcgtcgaggctttggatctgtttgagcgccagatgttatag

SEQ ID NO: 187303 - DNA, 213 bp, Artificial Sequence
  derived and/or modified sequence
atggacttcgtgcggctggcccggctgttcgcccgggcccggcccatggggctttttatcctccagcaccttgatccttgcagagcacgctgggccggcggccgcgaggggctgatgaggccaatgtgggcccccttcagcagtagctcatcacagttgccattaggtcaggagcggcaggaaaacaccggatctttaggctctgatccatag

SEQ ID NO: 187304 - DNA, 1449 bp, Artificial Sequence
  derived and/or modified sequence
cggaagcggctggtgcggcggggcgaccgggccggcctgcccgtgggcgtccaccagttgcaggcaaagaactttgaactgaatctgaagacttaccacgctctgctcaaaatggccgctaaatgtgcagatttgcgcatgtgtttagatgtctttaaggagatcatacacaagggccacgtcgtcacagaggagacattctcttttcttttgatgggctgcatacaggacaaaaaaacgggtttccgctacgccctgcaagtctggcgactgatgctcagtctaggtcttcagccttccagggattcctataaccttctgctggtggctgccagagactgtggcttgggggatccccaggtggccagtgagcttttactcaaaccgcgtgaagaagctaccgtgctccagccgcccgtttcccggcagagaccacggaggaccgcccaggcaaaagctggtaatctgatgagcgccatgcttcacgtggaagcactcgaaagacagctgtttcttgagccatcccaggctctcggacccccagagcctccggaagcgcgggtcccggggaaggcacagccagaggttgatacaaaggccgaacccagccacacagctgccctgactgccgtggcactgaaacccccaccagtcgaactggaagtgaacttgctcactcccggcgcggtaccccccaccgtcgtgtcatttggcactgtaactaccccagctgatagactggccctgataggcggcttagaaggctttctcagcaagatggccgagcatagacagcagcccgatataagaaccctaactctcttagcagaagttgtggagtcaggctcccctgccgaatccttgcttctcgcactgctcgatgagcatcaagtggaagcagacctgacattcttcaacacacttgtcaggaagaagtccaaattgggcgatctcgagggcgcaaaggccctgctgccagtcctcgccaaacgtgggcttgtgcccaaccttcagactttttgtaacctcgctatcggatgtcacaggcctaaggacgggctccagctgttaacagacatgaagaagtctcaggtaacaccaaacacccatatctacagcgccctcattaatgctgccatcaggaagctaaattacacctatctcataagcatcctgaaggatatgaagcaaaacagggttcctgtgaacgaggtggttattcgtcaactggaatttgccgctcaataccccccaacatttgaccgctaccaaggtaaaaacacatacttggagaaaatcgacggattcagggcctactacaagcagtggctcaccgtgatgcctgccgaagagacaccacacccttggcagaagtttagaacaaagcctcagggagaccaagacacgggcaaagaggctgacgatggctgcgcattgggcggccggtag

SEQ ID NO: 187305 - DNA, 2282 bp, Artificial Sequence
  derived and/or modified sequence
aggaagagactggttcgccgcggggaccgggcagggctccccgtcggagtgcaccagctgcaggccaaaaacttcgagctcaacttgaaaacataccacgcgctgctgaagatggctgccaagtgcgcagaccttaggatgtgcctcgatgtgttcaaggaaatcatccacaaagggcacgtggtcacagaggagaccttcagtttcctgctcatgggctgcatccaagacaagaagacaggcttccggtacgccctccaggtgtggcggctgatgctgagtctagggctacagccgagccgggacagctacaacctgctgttggtggcagctcgggactgtggcctaggggacccccaggtggcctcagagctgcttctgaagcccagggaggaggcgactgtgcttcagcccccagtgagcaggcagcggccaaggaggacagcccaggccaaggcaggcaacctcatgtcagccatgctgcatgtggaggccctggagaggcagctgtttctggaaccttctcaggcacttgggcctccagagcctccggaagccagagtgcccggcaaggcccaaccagaggtggatactaaggcagagcccagccacacagcagccctcaccgcagtggccctgaagccacctcccgtggagctggaagtcaacctcctgacccccggggccgttccccctacagtggtctcctttggaacggtgaccaccccagctgaccggctggccttgatagggggcctggagggcttcctgagcaagatggcagagcacaggcagcagcccgacatcaggaccctcacgctactggccgaggtggtggagtccgggagtcctgcagagtccttgctgctggccctcctggatgagcaccaggtagaggccgacctgacattctttaacacgctggtgagaaagaagagcaagctgggagacctggagggggccaaggcgctgttgccggtcctggcaaagaggggcctcgtccccaacctgcagacattctgcaacctggccatcgggtgccacaggccgaaggacggtctacagcttctcacagacatgaagaagtcccaggtgacccccaacactcacatctacagtgccctcatcaacgcggccatcaggaagctgaactacacctatctcatcagcatcttgaaggacatgaagcagaacagggtcccggtgaacgaagtggtcatccgccagctggagtttgcagcccagtaccctcccacctttgaccggtaccaagggaagaacacctacctggagaagattgacggcttccgagcctattacaagcagtggctgacagtgatgcccgcagaggaaaccccgcacccctggcagaagttccggaccaagccccagggggaccaggacaccggcaaggaggctgatgacggatgtgcccttgggggcaggtgatgggagcacagctggaacaatgtgctcggcccccagtgctctgtgggagccccaggacaagtgagctggtgtcacctcctgcctgggggaagagccaggccctgaggaacagccgcagcgtgtcacaggtgttggtgaggacacacactaggcccaaggtgcctgtgctcccagcaggtccaagtgcagctccagccacctttgcgtgtcaccttcacgggacttccagctccagctacctttgtgtgtcacctcacacaccacaagggggctggggcatctggtccctggggcctgggccgccccgccgggttccataggccgatgctctgaaagaagagacgtggggctcgagagatttaaagattttatttttacaaatcacagctgatagacagcgaagccttccccatagagaccgtgctccaactcgggcctggggcactgctcgctgctcccaggaagggggtggcgtgacaggcaggaacctgcgaagtccagagtccagggtggagcgcgccagcctcagccagagcagccacgacagccacagtgtgtgcactcgatgatgcggccctgcaacggaggaggacagtgagacgatgccactgcgccacgctcgcccctgcacactcacatatgtggcaaccctcccacgaaggacctgccaccatgccatatagggacacacctcagaaacccttccttgacagctctggacagggaaaatttggctccctcatgaaggtagaaccagctgctgttgacaccgaggttacatctgtatgtctatttataatatgttctgcaaatccaacacacgtttgccaatc

SEQ ID NO: 187306 - DNA, 2103 bp, Artificial Sequence
  derived and/or modified sequence
atggatttcgttcggctggcccgtcttttcgccagagcaagacctatgggtctcttcatactgcagcacctcgatccctgcagggcgcgatgggctggagggagagaaggcctgatgcgccctatgtgggcgccattctccagcagcagcagccagctccccctgggccaggaaagacaggaaaacacaggatccctcggatccgatccttcccatagcaactctacagcaacccaagaagaagacgaagaggaagaggagagttttggtactctttccgataaatactcctcccgtagattattccgaaagtccgcagctcagttccacaacttgaggtttggcgagagaagagacgagcagatggaacctgagccaaaactctggcgcggaaggcgtaacactccttactggtattttcttcaatgcaagcacctcattaaggagggaaaattagtggaagctctagacttgtttgaaagacagatgttaaaggaagaacggctgcaacccatggagtccaactacaccgttctcattggaggttgcggtcgagtcggctacttgaaaaaagcgtttaatctttataaccaaatgaaaaagagagatctggaaccctccgatgctacctacacagcattgttcaatgtgtgtgccgaatccccgtggaaagacagcgctttacagagcgccctgaagttgcggcaacagctccaggccaagaatttcgaattgaatctaaagacctaccacgccctgttgaaaatggcagctaagtgtgccgacctccggatgtgcctggatgtttttaaggaaattatacacaaggggcacgtggtgacagaagaaacttttagcttcctgttgatgggatgcatccaggacaaaaagaccgggttccgatatgccctccaggtctggcggctgatgctttccctcgggctgcaaccatcacgagattcctataatctcctccttgtggccgctagagactgtggattaggcgaccctcaggtcgcttcagagttgctcctgaagccgagggaagaggctaccgtgctgcaaccacccgtcagcaggcagcgcccaagacggactgcccaggcaaaggcaggcaatctgatgagcgctatgctgcacgtagaagccctggaacgccagctgtttctggagccaagtcaggcactgggaccacccgagcctcccgaggcccgagttccgggtaaagcacagcccgaagtcgatacaaaggcggaaccaagccatacggccgcactgaccgccgtggccctaaaaccccctcctgtggaactggaagtcaacctgctgactccaggggctgttccacctactgttgtgtctttcggtaccgtcaccacccctgccgatcggttggccttgataggcggattggagggattcctgagcaaaatggcagaacatagacaacagccggacatcaggacccttactctcctcgcagaagtggtcgagtctggaagccccgcagagagcctactgctggccctgctcgacgaacaccaagtagaggctgacctcacattcttcaacacactggtccgcaaaaagtctaaactgggcgacctggaaggtgcaaaagctctcctgcctgtgctggcaaagcgaggactcgtgcccaacttgcagacattttgtaatctggccattggctgtcacaggccaaaagacggtttacagcttctaacggatatgaagaagagtcaggtcactcccaacacacatatttattccgcgctgatcaatgctgcaattcggaaactgaattacacatatctaataagtattctgaaagacatgaaacagaacagagttcctgtcaatgaagtggtgattcgccagttggagtttgccgctcaatatccacccacgttcgatagataccaaggaaagaacacctacctggagaagatcgatggctttcgtgcatactacaagcagtggctaaccgtgatgcccgctgaggagacgccccatccgtggcagaagttcagaacgaaaccccagggcgatcaggacaccgggaaggaggctgatgatgggtgcgccctgggtggcagatag

SEQ ID NO: 187307 - DNA, 321 bp, Artificial Sequence
  derived and/or modified sequence
atggattttgtcagactggctcgcttgttcgctagagctagacccatgggtctcttcatcctgcagcaccttgacccgtgccgggcacggtgggctggtggaagagagggcctgatgcggcctatgtgggcccctttctcgtcctcctcctcccagctgcccctaggtcaggaacgccaggagaatactggctcacttggctccgacccctcccactccaactccaccgcgactcaggaggaagatgaagaagaggaagaaagcttcgggacattgtctgataaatactctagccggagactgttccgaaagtccgcatag

SEQ ID NO: 187308 - DNA, 435 bp, Artificial Sequence
  derived and/or modified sequence
atggactttgttcgcctggcacggctttttgctcgtgccagacccatggggcttttcatattgcagcaccttgatccctgtcgagcacgctgggctggaggtcgggagggcctgatgagacccatgtgggcccctttttcctcaagttcctctcaattgccacttggacaagagaggcaggagaacaccggcagcctaggatccgatccttcccattccaactccaccgcgactcaggaagaagacgaagaagaggaagagagttttggtaccctgagcgacaagtatagcagccggcgtctcttccgaaagagtgctgcccagttccataacctcagattcggcgagagacgggatgagcagatggagccggaacctaagttgtggcgcggacggagaaacaccccctattggtactttttacagtgcaagtag

SEQ ID NO: 187309 - DNA, 495 bp, Artificial Sequence
  derived and/or modified sequence
atggatttcgttaggctggcacgactctttgctcgggctcgcccaatggggctgttcatcctccagcatctggatccatgccgcgcaagatgggccggaggtagagaaggtctcatgcgacctatgtgggcacccttctccagttcctcttcacagctaccccttggccaggagagacaagaaaatactgggtcgctgggctccgatccaagccactccaattcaacggccacccaggaggaggatgaggaagaagaggaatccttcggaacgctttccgataagtactcgagccggagattgttccgaaagtcagccgctcagtttcacaacttacggtttggcgagcgcagggacgagcagatggagcccgagcccaaactttggagaggcaggcgcaatactccatattggtatttcttgcaatgcaagcacctaatcaaagaaggcaaactggtagaggcccttgatttgtttgagcgccagatgctctag

SEQ ID NO: 187310 - DNA, 213 bp, Artificial Sequence
  derived and/or modified sequence
atggatttcgtccgattggccagactgtttgctcgcgctcgaccgatggggctattcatacttcagcaccttgatccctgtcgagctcgatgggccggtggcagagaaggccttatgcgccctatgtgggctcctttctcctcgtcttcttcacagctgcccttggggcaggagagacaagaaaataccgggtctctgggcagcgatccctag

SEQ ID NO: 187311 - DNA, 1449 bp, Artificial Sequence
  derived and/or modified sequence
cgaaagcgcctggtgagaaggggtgaccgggcaggactgccggtcggggtgcaccagttacaggcaaaaaatttcgaacttaacctcaagacttaccacgcgctactcaaaatggccgcaaaatgtgcagatttgcgaatgtgcctcgacgtgtttaaggaaatcattcataagggtcacgtggttaccgaggagaccttcagcttcctgttaatgggatgcatacaggataaaaagactgggtttagatacgcactgcaggtctggcgcctgatgctatctttgggcctgcagcctagccgagacagctacaacctgctcttggtcgcggcacgagactgtggactgggggatcctcaggtcgctagcgaactccttctgaaaccacgggaagaggcaaccgttttgcagccgccagtgagtcggcaacgaccacgtcgtacagcccaggccaaagcgggaaatctaatgtcagcgatgctccatgttgaggccctggaacgtcagctttttctcgaaccttctcaggcccttggtccgcctgagccacctgaggccagagtgcccggtaaagctcagccagaggtggataccaaggcagaaccttcacacaccgccgctctgacagcagttgccttaaagcccccaccagtggaactggaggtgaacctactgacccccggagctgtgcctccgactgtggtctctttcggaacagtaacaacacctgccgacagactggcgctcatcggcggtttagagggcttcttaagtaagatggccgaacacagacagcagccagacattcgcactctaactcttcttgctgaggtcgtggagagcggatccccggctgagtctctgctgctcgcactattagacgagcaccaggtggaggccgatctcacattttttaacactctggttaggaagaagtcaaaactgggcgacctcgaaggcgcaaaggcacttctgcctgtgctagccaaaaggggattggtcccaaacctccagactttctgcaatctggctatagggtgccacaggccaaaggatggacttcagttactgaccgacatgaagaaatcgcaggtgacaccaaacacgcacatatattctgcgttgattaacgccgcaatacggaagctcaactacacgtatctgatttctattctcaaggacatgaaacagaatagagtgccagtgaatgaggttgtgattcggcagctcgagtttgcagctcagtaccccccaacctttgatagatatcaaggaaaaaacacctacctcgagaagatagatggatttagggcctactacaagcaatggctcacagtaatgcccgcagaggagacaccgcatccgtggcagaaatttagaacaaagcctcagggcgatcaggatactggcaaggaggccgacgacggttgcgccctaggcggaaggtag

SEQ ID NO: 187312 - protein, 5171 aa, Artificial Sequence
  derived and/or modified sequence
MHSSSYSYRSSDSVFSNTTSTRTSLDSNENLLLVHCGPTLINSCISFGSESFDGHRLEMLQQIANRVQRDSVICEDKLILAGNALQSDSKRLESGVQFQNEAEIAGYILECENLLRQHVIDVQILIDGKYYQADQLVQRVAKLRDEIMALRNECSSVYSKGRILTTEQTKLMISGITQSLNSGFAQTLHPSLTSGLTQSLTPSLTSSSMTSGLSSGMTSRLTPSVTPAYTPGFPSGLVPNFSSGVEPNSLQTLKLMQIRKPLLKSSLLDQNLTEEEINMKFVQDLLNWVDEMQVQLDRTEWGSDLPSVESHLENHKNVHRAIEEFESSLKEAKISEIQMTAPLKLTYAEKLHRLESQYAKLLNTSRNQERHLDTLHNFVSRATNELIWLNEKEEEEVAYDWSERNTNIARKKDYHAELMRELDQKEENIKSVQEIAEQLLLENHPARLTIEAYRAAMQTQWSWILQLCQCVEQHIKENTAYFEFFNDAKEATDYLRNLKDAIQRKYSCDRSSSIHKLEDLVQESMEEKEELLQYKSTIANLMGKAKTIIQLKPRNSDCPLKTSIPIKAICDYRQIEITIYKDDECVLANNSHRAKWKVISPTGNEAMVPSVCFTVPPPNKEAVDLANRIEQQYQNVLTLWHESHINMKSVVSWHYLINEIDRIRASNVASIKTMLPGEHQQVLSNLQSRFEDFLEDSQESQVFSGSDITQLEKEVNVCKQYYQELLKSAEREEQEESVYNLYISEVRNIRLRLENCEDRLIRQIRTPLERDDLHESVFRITEQEKLKKELERLKDDLGTITNKCEEFFSQAAASSSVPTLRSELNVVLQNMNQVYSMSSTYIDKLKTVNLVLKNTQAAEALVKLYETKLCEEEAVIADKNNIENLISTLKQWRSEVDEKRQVFHALEDELQKAKAISDEMFKTYKERDLDFDWHKEKADQLVERWQNVHVQIDNRLRDLEGIGKSLKYYRDTYHPLDDWIQQVETTQRKIQENQPENSKTLATQLNQQKMLVSEIEMKQSKMDECQKYAEQYSATVKDYELQTMTYRAMVDSQQKSPVKRRRMQSSADLIIQEFMDLRTRYTALVTLMTQYIKFAGDSLKRLEEEEKSLEEEKKEHVEKAKELQKWVSNISKTLKDAEKAGKPPFSKQKISSEEISTKKEQLSEALQTIQLFLAKHGDKMTDEERNELEKQVKTLQESYNLLFSESLKQLQESQTSGDVKVEEKIVAERQQEYKEKLQGICDLLTQTENRLIGHQEAFMIGDGTVELKKYQSKQEELQKDMQGSAQALAEVVKNTENFLKENGEKLSQEDKALIEQKLNEAKIKCEQLNLKAEQSKKELDKVVTTAIKEETEKVAAVKQLEESKTKIENLLDWLSNVDKDSERAGTKHKQVIEQNGTHFQEGDGKSAIGEEDEVNGNLLETDVDGQVGTTQENLNQQYQKVKAQHEKIISQHQAVIIATQSAQVLLEKQGQYLSPEEKEKLQKNMKELKVHYETALAESEKKMKLTHSLQEELEKFDADYTEFEHWLQQSEQELENLEAGADDINGLMTKLKRQKSFSEDVISHKGDLRYITISGNRVLEAAKSCSKRDGGKVDTSATHREVQRKLDHATDRFRSLYSKCNVLGNNLKDLVDKYQHYEDASCGLLAGLQACEATASKHLSEPIAVDPKNLQRQLEETKALQGQISSQQVAVEKLKKTAEVLLDARGSLLPAKNDIQKTLDDIVGRYEDLSKSVNERNEKLQITLTRSLSVQDGLDEMLDWMGNVESSLKEQGQVPLNSTALQDIISKNIMLEQDIAGRQSSINAMNEKVKKFMETTDPSTASSLQAKMKDLSARFSEASHKHKETLAKMEELKTKVELFENLSEKLQTFLETKTQALTEVDVPGKDVTELSQYMQESTSEFLEHKKHLEVLHSLLKEISSHGLPSDKALVLEKTNNLSKKFKEMEDTIKEKKEAVTSCQEQLDAFQVLVKSLKSWIKETTKKVPIVQPSFGAEDLGKSLEDTKKLQEKWSLKTPEIQKVNNSGISLCNLISAVTTPAKAIAAVKSGGAVLNGEGTATNTEEFWANKGLTSIKKDMTDISHGYEDLGLLLKDKIAELNTKLSKLQKAQEESSAMMQWLQKMNKTATKWQQTPAPTDTEAVKTQVEQNKSFEAELKQNVNKVQELKDKLTELLEENPDTPEAPRWKQMLTEIDSKWQELNQLTIDRQQKLEESSNNLTQFQTVEAQLKQWLVEKELMVSVLGPLSIDPNMLNTQRQQVQILLQEFATRKPQYEQLTAAGQGILSRPGEDPSLRGIVKEQLAAVTQKWDSLTGQLSDRCDWIDQAIVKSTQYQSLLRSLSDKLSDLDNKLSSSLAVSTHPDAMNQQLETAQKMKQEIQQEKKQIKVAQALCEDLSALVKEEYLKAELSRQLEGILKSFKDVEQKAENHVQHLQSACASSHQFQQMSRDFQAWLDTKKEEQNKSHPISAKLDVLESLIKDHKDFSKTLTAQSHMYEKTIAEGENLLLKTQGSEKAALQLQLNTIKTNWDTFNKQVKERENKLKESLEKALKYKEQVETLWPWIDKCQNNLEEIKFCLDPAEGENSIAKLKSLQKEMDQHFGMVELLNNTANSLLSVCEIDKEVVTDENKSLIQKVDMVTEQLHSKKFCLENMTQKFKEFQEVSKESKRQLQCAKEQLDIHDSLGSQAYSNKYLTMLQTQQKSLQALKHQVDLAKRLAQDLVVEASDSKGTSDVLLQVETIAQEHSTLSQQVDEKCSFLETKLQGIGHFQNTIREMFSQFAEFDDELDSMAPVGRDAETLQKQKETIKAFLKKLEALMASNDNANKTCKMMLATEETSPDLVGIKRDLEALSKQCNKLLDRAQAREEQVEGTIKRLEEFYSKLKEFSILLQKAEEHEESQGPVGMETETINQQLNMFKVFQKEEIEPLQGKQQDVNWLGQGLIQSAAKSTSTQGLEHDLDDVNARWKTLNKKVAQRAAQLQEALLHCGRFQDALESLLSWMVDTEELVANQKPPSAEFKVVKAQIQEQKLLQRLLDDRKSTVEVIKREGEKIATTAEPADKVKILKQLSLLDSRWEALLNKAETRNRQLEGISVVAQQFHETLEPLNEWLTTIEKRLVNCEPIGTQASKLEEQIAQHKALEDDIINHNKHLHQAVSIGQSLKVLSSREDKDMVQSKLDFSQVWYIEIQEKSHSRSELLQQALCNAKIFGEDEVELMNWLNEVHDKLSKLSVQDYSTEGLWKQQSELRVLQEDILLRKQNVDQALLNGLELLKQTTGDEVLIIQDKLEAIKARYKDITKLSTDVAKTLEQALQLARRLHSTHEELCTWLDKVEVELLSYETQVLKGEEASQAQMRPKELKKEAKNNKALLDSLNEVSSALLELVPWRAREGLEKMVAEDNERYRLVSDTITQKVEEIDAAILRSQQFDQAADAELSWITETEKKLMSLGDIRLEQDQTSAQLQVQKTFTMEILRHKDIIDDLVKSGHKIMTACSEEEKQSMKKKLDKVLKNYDTICQINSERYLQLERAQSLVNQFWETYEELWPWLTETQSIISQLPAPALEYETLRQQQEEHRQLRELIAEHKPHIDKMNKTGPQLLELSPGEGFSIQEKYVAADTLYSQIKEDVKKRAVALDEAISQSTQFHDKIDQILESLERIVERLRQPPSISAEVEKIKEQISENKNVSVDMEKLQPLYETLKQRGEEMIARSGGTDKDISAKAVQDKLDQMVFIWENIHTLVEEREAKLLDVMELAEKFWCDHMSLIVTIKDTQDFIRDLEDPGIDPSVVKQQQEAAETIREEIDGLQEELDIVINLGSELIAACGEPDKPIVKKSIDELNSAWDSLNKAWKDRIDKLEEAMQAAVQYQDGLQAVFDWVDIAGGKLASMSPIGTDLETVKQQIEELKQFKSEAYQQQIEMERLNHQAELLLKKVTEESDKHTVQDPLMELKLIWDSLEERIINRQHKLEGALLALGQFQHALDELLAWLTHTEGLLSEQKPVGGDPKAIEIELAKHHVLQNDVLAHQSTVEAVNKAGNDLIESSAGEEASNLQNKLEVLNQRWQNVLEKTEQRKQQLDGALRQAKGFHGEIEDLQQWLTDTERHLLASKPLGGLPETAKEQLNVHMEVCAAFEAKEETYKSLMQKGQQMLARCPKSAETNIDQDINNLKEKWESVETKLNERKTKLEEALNLAMEFHNSLQDFINWLTQAEQTLNVASRPSLILDTVLFQIDEHKVFANEVNSHREQIIELDKTGTHLKYFSQKQDVVLIKNLLISVQSRWEKVVQRLVERGRSLDDARKRAKQFHEAWSKLMEWLEESEKSLDSELEIANDPDKIKTQLAQHKEFQKSLGAKHSVYDTTNRTGRSLKEKTSLADDNLKLDDMLSELRDKWDTICGKSVERQNKLEEALLFSGQFTDALQALIDWLYRVEPQLAEDQPVHGDIDLVMNLIDNHKAFQKELGKRTSSVQALKRSARELIEGSRDDSSWVKVQMQELSTRWETVCALSISKQTRLEAALRQAEEFHSVVHALLEWLAEAEQTLRFHGVLPDDEDALRTLIDQHKEFMKKLEEKRAELNKATTMGDTVLAICHPDSITTIKHWITIIRARFEEVLAWAKQHQQRLASALAGLIAKQELLEALLAWLQWAETTLTDKDKEVIPQEIEEVKALIAEHQTFMEEMTRKQPDVDKVTKTYKRRAADPSSLQSHIPVLDKGRAGRKRFPASSLYPSGSQTQIETKNPRVNLLVSKWQQVWLLALERRRKLNDALDRLEELREFANFDFDIWRKKYMRWMNHKKSRVMDFFRRIDKDQDGKITRQEFIDGILSSKFPTSRLEMSAVADIFDRDGDGYIDYYEFVAALHPNKDAYKPITDADKIEDEVTRQVAKCKCAKRFQVEQIGDNKYRFFLGNQFGDSQQLRLVRILRSTVMVRVGGGWMALDEFLVKNDPCRAKGRTNMELREKFILADGASQGMAAFRPRGRRSRPSSRGASPNRSTSVSSQAAQAASPQVPATTTPKILHPLTRNYGKPWLTNSKMSTPCKAAECSDFPVPSAEGTPIQGSKLRLPGYLSGKGFHSGEDSGLITTAAARVRTQFADSKKTPSRPGSRAGSKAGSRASSRRGSDASDFDISEIQSVCSDVETVPQTHRPTPRAGSRPSTAKPSKIPTPQRKSPASKLDKSSKR

SEQ ID NO: 187313 - protein, 255 aa, Artificial Sequence
  derived and/or modified sequence
MNKTGPQLLELSPGEGFSIQEKYVAADTLYSQIKEDVKKRAVALDEAISQSTQFHDKIDQILESLERIVERLRQPPSISAEVEKIKEQISENKNVSVDMEKLQPLYETLKQRGEEMIARSGGTDKDISAKAVQDKLDQMVFIWENIHTLVEEREAKLLDVMELAEKFWCDHMSLIVTIKDTQDFIRDLEDPGIDPSVVKQQQEAAETIREEIDGLQEELDIVINLGSELIAACGEPDKPIVKKSIDELNSMGFSK

SEQ ID NO: 187314 - DNA, 15516 bp, Artificial Sequence
  derived and/or modified sequence
atgcattcttcgagctactcctaccgctcctctgactctgtgttttccaacactacgtcaacacggaccagtctcgattctaacgaaaacctgcttctggttcactgcggtccaacgctgattaactcctgcatttcattcggatccgaaagcttcgacggacacagactggagatgctccagcagattgccaatcgtgttcagcgggacagcgtgatttgcgaagataaactcattctggcgggcaatgcactgcagtcagactcaaaacggctggaatctggggtgcagtttcaaaatgaggccgaaatcgcggggtacatcttagagtgcgagaacctcttaagacagcatgtgattgatgtgcagatcctaatcgacggcaagtactatcaagccgatcagttggtgcagcgggtggcaaagctgcgagacgagattatggcgctaaggaacgagtgttcttccgtttattccaaaggccggattcttactactgaacagaccaaattgatgatctcgggcatcacgcagtccctgaacagcgggtttgctcagaccctgcacccatcactcaccagcggcctgacgcaatccctgacgcccagcctgacctccagcagtatgaccagcgggctgtcctcaggtatgactagcagactgacacccagcgtcacacccgcctatacacctggtttccccagcgggttagtgccaaattttagtagtggtgtcgaacccaatagtctgcagactttgaaactcatgcagattagaaagcccctactgaaatccagcctcctagaccagaatctgacagaggaggagatcaatatgaagttcgtccaggaccttttgaactgggtggacgagatgcaggttcagctcgaccggactgagtggggcagcgacctgccatccgtggaaagtcatctcgagaatcacaaaaacgtgcaccgggcaatagaggaattcgaatcaagtttgaaagaggccaaaatctccgaaattcagatgactgccccactcaaattgacttacgcggagaaactccatcggttggagtcccagtatgctaagcttctaaataccagtagaaatcaggagaggcacctggacaccctccataatttcgtgagccgagctacgaacgaactgatctggcttaacgagaaggaagaagaggaggttgcgtacgactggagcgagaggaatacgaatattgctagaaaaaaggattaccacgcagagctgatgcgcgagcttgaccagaaagaggagaacatcaaatcagtccaggagattgccgagcagctgctcctggagaaccacccagcgcgactgacaatcgaagcctaccgggccgccatgcagacacaatggagctggattttacagctatgccagtgcgttgaacagcacattaaggagaacactgcatacttcgagttcttcaacgacgccaaggaggcgaccgactacctgcggaacttgaaagacgctatccagcggaaatatagctgcgacagatctagctcaatacataaactagaagatctggttcaggagtcgatggaagagaaagaggagcttctacagtacaagagcactatcgcgaatctcatggggaaggccaagacaatcatccagttgaagccccggaacagtgattgtcccctgaagacttcaatccctattaaagccatatgtgattatcgccagatcgagattacaatctacaaagacgatgagtgcgtgctggcaaataacagccaccgtgcaaagtggaaagtgatctctcctacaggaaatgaggctatggtgccatctgtgtgctttacagtccctcctcccaacaaggaggcagtggatctagctaaccgcattgagcagcaatatcagaacgttctcacactctggcacgaatctcatattaacatgaaatcagttgtgtcttggcattatctgattaacgaaatcgacagaattagggcgagtaacgtggcatctatcaagaccatgctgcccggcgaacatcagcaggtgctctcaaacctgcaatctaggttcgaggacttcctggaggattcacaggagtctcaggttttctcagggtccgacatcactcagctggaaaaggaggtcaacgtgtgcaaacaatactatcaagagctgctgaaaagtgctgagagagaggagcaagaagaatctgtgtacaacctgtacattagtgaggtgcgtaacatccggctccggcttgagaactgcgaggatcgcctcatcaggcagatccggaccccactagagagagacgacttacatgaaagtgtgtttagaattaccgagcaagagaaacttaagaaggaactggaacgcctaaaggacgacctggggacgattactaacaagtgcgaggaatttttctcccaggcggccgccagctcttccgtgcccaccctgagatctgagctgaatgtagttctgcaaaacatgaatcaagtgtattcaatgagcagcacatacatcgataagctgaaaactgtcaacctcgtgcttaagaatacccaggctgctgaggccttggttaagctgtatgagacaaagctgtgcgaagaggaagcagttatcgccgataaaaataacattgagaatctaatctccacgctgaaacagtggcggagtgaggtcgatgagaagcgccaggtgtttcacgctctcgaagatgaactccagaaggcaaaggcaatatccgatgagatgtttaaaacttacaaagagagggacctggacttcgattggcataaggagaaggcagatcaactggttgaacgttggcagaacgttcatgtacagatcgataacagactcagagacctggaaggaatcggtaaaagtcttaagtactatcgggatacttaccacccattggatgattggatccagcaggtggaaacaacccagaggaagatacaggagaaccaacccgagaactctaagaccctcgccacccagttgaaccaacagaagatgttggtgagcgaaatcgagatgaagcagtccaaaatggacgagtgccaaaaatatgcggaacaatactccgctaccgtgaaggactacgagctccagacaatgacctatagagcgatggtggacagccaacagaaatctcctgttaagaggcgacgaatgcagtcgtcggccgatcttattatacaagagttcatggacctgcgcacccgttacaccgcccttgtcacactgatgacgcagtacatcaagtttgctggtgattcactgaagagattagaagaggaggagaaatctttggaagaagaaaaaaaagagcatgtggaaaaggccaaagaactccagaagtgggtgtccaatattagcaagacccttaaggacgctgaaaaagccgggaagccccccttctcaaaacagaaaatctctagtgaggagatttccaccaaaaaggagcagctttccgaagctcttcaaaccatccaactctttctcgccaaacatggcgacaagatgaccgacgaggaacggaatgagctggaaaagcaggtgaagaccctgcaagagtcctacaatctgctcttttccgaatccctcaaacagctgcaagagtctcagacttcgggagatgtgaaagtcgaggagaagatcgtggccgagcgtcagcaggagtataaggaaaaattgcaaggaatatgtgatttactgactcagactgaaaacaggctgattggccaccaagaggcctttatgatcggcgatggcacggtagaacttaagaagtatcaatcaaagcaagaagaacttcagaaggacatgcagggttccgctcaagccttggccgaagtggttaaaaataccgagaatttcttaaaggaaaacggtgagaaactgtcccaagaggataaggccttgattgaacagaagcttaatgaggccaagatcaagtgcgaacagttgaacttaaaagccgagcaatccaaaaaggagctagacaaagtcgtgaccaccgcaatcaaagaagagactgagaaggtggccgccgtaaaacagctggaagagtcgaaaacaaagatcgagaatctcttggattggctgtccaatgtcgataaagattcggagcgggctggaacgaagcacaagcaggtcattgaacagaacggcactcactttcaggaaggcgatggcaagtctgccattggcgaggaggacgaagtaaacgggaatctgctggaaaccgacgtggatggacaggtagggacgacacaagaaaacctgaaccagcaataccaaaaagtaaaagcacagcacgagaaaatcatttcacagcaccaggctgtaattattgccacacagagcgcacaagtgctcctcgagaaacaggggcagtacctaagtcctgaggagaaagagaagctgcagaagaatatgaaggagttgaaagtccattacgagacagcattggctgaatccgagaaaaaaatgaaactgacacattctcttcaggaagaattggagaagtttgacgccgactataccgaattcgagcattggctccagcagagcgagcaggagctcgagaacctcgaagccggagcggacgatatcaacggcctcatgaccaagcttaagcgccagaaatctttttctgaagacgtcatctcccacaaaggcgatctgagatacatcactatatctggcaacagagtgctggaagcagctaaaagctgctctaagagggacgggggcaaggtggacacttctgccactcaccgggaagtacagcgaaagctggatcatgccaccgacagatttaggagtctttatagcaagtgcaatgtgcttgggaataacctaaaggaccttgtggacaagtatcagcattacgaagatgcctcgtgcggtttattagctgggttacaggcctgtgaagccactgcatcaaagcatctgtctgaaccgattgctgtagatcctaaaaatctgcagagacaacttgaagagaccaaagctctgcaggggcaaatttcatcccagcaggtggccgtcgaaaagctcaaaaagacagcagaggttttgctcgacgccagagggagtctgctgccagcaaagaacgacattcagaaaaccctggacgacatcgtgggcagatacgaagatttgtccaaaagcgtgaacgaacgtaacgagaagcttcaaatcacacttactcggtctttatccgtgcaggacggcctggacgagatgttagactggatggggaacgtagaaagcagcctgaaggagcaagggcaggtgcctctgaacagtactgctttgcaggatatcatttccaagaacattatgctggagcaggatattgccggcaggcagtcctccatcaatgctatgaatgaaaaagtgaagaaatttatggaaaccaccgaccccagtactgcaagctccctgcaggccaaaatgaaggatctcagtgcccgtttttctgaggcatcccacaaacacaaggagaccctcgccaaaatggaagagctgaaaacaaaggtcgaactgtttgaaaacctctccgagaaactacagactttccttgaaacaaaaactcaggctctgacagaggtggatgtacccgggaaagatgtgaccgaattaagtcagtatatgcaggagagtaccagcgagttcctggagcataagaagcacctggaggttctgcatagcctcttaaaggaaataagcagccacggtcttccttcagataaggccctggtgctagaaaaaacgaataacctgtctaagaagttcaaggaaatggaagacaccataaaggagaagaaggaagcagtaactagttgccaggagcaactggatgccttccaggttctggtgaaatctctaaagagctggatcaaagagaccacaaagaaagttccgatagtccagccctcatttggcgcagaggatcttggtaaatccctggaggacaccaaaaaactgcaggaaaagtggagcctgaaaacccccgagatccagaaagttaataatagtggcatttcactgtgcaatctcatcagcgctgttaccactcccgccaaggcgatcgccgctgtgaaatccggcggcgcggtgctcaatggcgaagggactgccacaaacactgaggagttctgggccaacaaaggtctgactagcattaagaaagatatgacagatatcagtcacggctacgaggatctggggctgctcctgaaggacaaaattgctgaattgaatacaaaacttagcaagctgcaaaaggctcaggaggaatccagtgccatgatgcagtggcttcagaaaatgaacaaaacggcaacgaaatggcagcagacacccgcacccaccgacaccgaagccgttaaaacacaggtggaacagaataagtctttcgaggcagaactgaaacagaatgttaataaagttcaggaactgaaggataagcttaccgaattgctagaggagaaccctgacactccagaagctcctaggtggaagcagatgctgacagaaattgattccaagtggcaagaacttaaccagctcaccatcgatagacagcagaagttggaggaatcttcaaataacctcacacagttccagactgtggaagcccagctcaagcaatggttggtagagaaagagctgatggtctccgtactgggcccactctcaatagaccccaacatgctgaacacacagcgccaacaggtgcagattttgttgcaggagttcgccacacgtaagccgcagtacgagcagttaacagcagctggccagggcatcctgagccgccctggcgaggacccctccctccgcggaattgtcaaggagcagctcgctgctgtcacccagaaatgggatagcctgaccggccaactgagtgatcggtgtgactggattgaccaagcgatcgtcaaatcaacgcaatatcagagtttgcttagaagtttaagtgataaactatccgatctggacaacaagctgagtagctcgctggccgtgagcacccacccagatgccatgaatcagcagttggagaccgcacaaaaaatgaagcaggagattcagcaggaaaagaagcagataaaggtggcccaggccctgtgcgaggatctgagcgctctcgtcaaggaagagtatttaaaggctgagctgagccgccagttggaggggatcttgaaaagtttcaaggatgtggaacagaaggccgaaaaccacgtgcaacatctgcagtccgcttgtgcgtcctctcatcagttccagcagatgtcgagagattttcaagcttggctggacactaagaaggaagaacagaataagtctcatccaatttccgccaaacttgatgtcttagagagcctgatcaaagaccacaaggatttctcaaagaccctgacagcccaaagccacatgtatgagaagacaattgccgaaggagagaacctgctcctgaagacccagggaagtgagaaggcagccctccagttgcaactaaataccatcaaaactaattgggacacattcaataagcaggtgaaagagagggagaacaagttgaaggagagcctggagaaggctctcaagtataaggagcaagtcgaaaccctttggccatggatagataaatgccagaacaatttggaggagattaaattctgcctggaccctgccgagggcgaaaatagcattgcgaaactgaaatccctccagaaggaaatggatcaacactttggcatggtggaactccttaataacactgcaaattcactgctgtccgtctgtgagatcgataaggaggtggtgacagatgagaataagagcctgattcagaaagttgatatggtgacagaacaactgcatagtaagaagttttgcctggagaacatgacccagaagtttaaagaattccaggaagtttcgaaagagtcaaagcggcagctgcagtgtgccaaggagcagctcgacattcacgactcactgggtagtcaggcatactctaataaatatttgacgatgcttcagactcagcagaaaagtcttcaagctctaaagcaccaggtagatctcgccaagaggttagctcaggacttggtggttgaagcatccgattccaaggggacctcagacgtactattacaggtcgaaacgattgcacaggaacactccacgctgagccaacaagtggatgagaaatgttcctttcttgaaaccaaattacagggcatcggacactttcagaacacaatcagggaaatgttctctcaattcgccgagtttgatgatgagttggatagcatggctccagttgggcgtgatgcggagacacttcagaaacagaaggagactatcaaagctttcctaaaaaaattggaggcgttgatggcctctaatgataacgcaaacaagacatgtaagatgatgcttgccacagaagaaaccagccccgatctggtcggcattaagagagatctggaggctctgtcaaaacagtgcaataaattgctcgatcgggcacaagcccgtgaggaacaggtggaaggaacgatcaagcgactggaggagttctacagtaagctgaaggagttttcaatcctgctgcagaaggcggaagaacacgaggagagccaaggcccagtggggatggaaaccgagacgattaatcagcagctgaatatgtttaaggtcttccaaaaggaggagatagagccactacagggcaagcaacaggacgtcaattggcttggacagggcctcatccagtctgccgctaaaagcacttcaacccagggtctggagcatgacttagacgatgtcaacgctagatggaagactctgaataaaaaagtagctcagagagctgcgcagctgcaggaagccctgctgcactgcggccggttccaggatgcactggaaagcctcctgtcctggatggtcgataccgaggaactggttgcaaaccagaagcccccgagtgcagagtttaaagttgtcaaagcccagattcaggaacagaaactcctgcagagattactggacgatagaaaaagcacggtcgaggtgataaagcgggagggggagaagatcgcaacaaccgctgaacccgcggacaaagtgaaaattcttaaacagctgtccctgctggacagcagatgggaagcactgctgaataaggcagaaaccaggaatcgacagcttgaggggataagcgtcgtagcccagcagtttcacgaaacactcgaaccactcaacgagtggctgactaccattgaaaagagactcgtcaattgtgagccgatcggcacccaggcatccaagttagaggagcagatagcacagcacaaggctttggaagatgatattataaatcacaataagcatctgcaccaggccgtttcaattgggcagagcctgaaagtcctgtcatctcgcgaagacaaggatatggtacagtctaagctggactttagccaggtatggtacatcgagatccaggaaaagtctcacagtcgatctgaactgctccagcaggcactctgcaatgccaaaatatttggcgaggacgaagtggaactcatgaattggctgaacgaggtgcacgacaagttgtccaaactctcagtccaggactacagtactgaaggcctgtggaagcaacagagtgaactcagggttctccaggaagatattttgcttcgaaagcagaatgtcgatcaagccttgttgaacggtctggagctgctgaaacaaacgactggggacgaagtgctgattatccaggataagcttgaggccatcaaagcacgctacaaagacataactaaattgagcactgacgtagccaagacccttgagcaggctttgcagcttgcacggaggctgcactccacccacgaagaactctgcacttggctagataaggtggaggttgaacttctcagctacgaaacccaggttctgaagggcgaggaggcctctcaggcacagatgagacccaaagaactcaagaaagaggcaaaaaataataaggccctgctggatagcctgaatgaagtgtcctcagctctcctagagcttgtaccatggcgggcacgggagggcctggaaaagatggtcgctgaagacaacgaaaggtacaggctggtcagcgatacaatcacccagaaagtcgaagagattgacgccgctatcctccgctctcagcagtttgatcaagcggccgacgctgaactgtcctggatcaccgaaacagagaagaagctcatgagcctcggtgacattagattggagcaggaccaaaccagcgcgcaactgcaagtacagaagaccttcaccatggagatactgaggcacaaggacatcatcgacgatcttgtaaaaagcggccacaaaatcatgactgcttgtagtgaggaagagaagcagtcaatgaaaaaaaagctggacaaggtcctgaagaactatgacacaatatgccagattaactccgaacgttatctccagctggagcgagcccagtccctggtaaatcagttctgggagacctacgaggaactgtggccttggctcaccgagacacaaagcataatctcgcagctgccagctcctgccctcgagtacgaaactctcaggcagcaacaagaagagcacaggcaactacgggagctgatagcggagcacaagcctcacattgacaagatgaacaagacaggcccacagctgttggaactctcccccggcgaagggttctctatacaagagaaatatgtcgcagccgataccctctactcgcagattaaggaggacgttaagaagagggccgtggccttggacgaggcaatttcacagtcaactcagtttcacgataagattgaccagatcctggaaagcctggagaggattgtagaaagactcagacagcctccttctatctcggccgaagtggagaagataaaagaacagatttccgaaaataagaacgtgagcgtagacatggagaagctccagccactgtacgaaacgttgaaacagagaggggaggaaatgatagcacggtccggtggtaccgataaggatatcagcgccaaagccgtgcaggacaaactggatcaaatggtcttcatttgggagaatatacacactctagtggaagaacgagaagccaaactgcttgacgtcatggagcttgcagaaaagttctggtgtgatcatatgtctcttatcgtcaccattaaagatacccaggacttcattcgtgacctggaggatcctggaatcgacccttcagtggtgaagcagcagcaggaggccgcagagacaattagagaggagatcgatggcttgcaggaggagttggatattgtaatcaatctcggctccgaactgattgcagcatgtggagagcctgataagcctatagtcaagaaaagcattgatgaactgaatagcgcatgggactcattgaacaaagcatggaaggaccgaatagataaacttgaggaggcaatgcaggctgctgtgcagtaccaggatggtctgcaggccgtgtttgactgggtggatattgccggcggaaagctggcctctatgtctcccatcggaacagacctggagaccgtgaagcagcagattgaggaactcaaacagttcaagtcagaagcctaccagcagcagattgaaatggagagactgaaccaccaagcggagctcttgctgaaaaaggtaacagaagaatctgacaaacatactgtacaggatcctttaatggaattgaaactcatttgggatagcttagaggaaagaataataaatcgacaacataagctggagggggccctgttagccctaggccagttccagcatgccttggacgaattgctggcttggcttacacacactgaaggtctgctgagtgaacaaaagcctgttgggggagatcctaaagcaatagaaatcgaactcgcaaaacatcacgtgctccaaaatgatgtccttgcccatcagagcaccgtggaggccgtcaataaagccggaaatgacctgattgaaagttccgcaggggaagaggcctccaacttacaaaataagctcgaggtgctgaatcagaggtggcaaaacgttctggaaaagaccgagcaacgcaaacaacaactcgatggcgccctgcgccaagcaaaggggttccatggcgaaatcgaggatctgcagcagtggctcactgacactgaacgacatctgctcgccagcaaaccattgggtgggttgccggaaacagccaaggagcaacttaacgtgcacatggaggtgtgtgctgcctttgaggcgaaagaggaaacgtacaaatccctcatgcagaaagggcagcagatgctggcgcgttgtcccaaaagtgcagagactaatattgaccaggatatcaacaacttaaaggagaagtgggaaagcgttgagacgaagctgaatgagaggaagaccaaactggaagaggcactgaaccttgctatggagtttcacaacagcttgcaagacttcatcaattggcttacgcaggccgagcagaccctcaatgtggcatcccggccttcactgattcttgatacagttctgttccagattgacgagcataaagtgtttgccaatgaggtaaattctcaccgcgagcagattatagagctcgacaagacgggaacccatcttaaatacttctcccaaaagcaggatgtcgtcctgataaagaatttgttgatctctgtgcagtcccggtgggagaaagtggtccagcgcctagtagaacgggggcgatcactagatgacgctcgcaaaagggcaaaacagttccacgaggcttggtcgaaactgatggagtggctggaagaatcagagaaaagtctcgatagcgagctggagatagctaacgaccccgacaagattaagacccaactggcacagcacaaggaatttcagaaatcgttaggtgccaagcactccgtctatgacaccaccaatagaactgggcgctcactcaaggaaaaaactagcctggccgacgataatcttaagcttgatgatatgttatctgaactcagagataagtgggacaccatttgcgggaaatcagtggaacgacagaataagcttgaggaagcattgctgttttctggccaattcaccgacgctttgcaggctcttatcgattggctgtacagagttgagccgcagcttgctgaggatcagcccgtgcatggagacattgatctcgtgatgaacctcattgataatcacaaggcgtttcagaaggagttaggtaagagaacaagtagcgtgcaggcgttgaagaggtctgctcgtgagctgatcgaggggagccgcgacgacagctcatgggtgaaagtgcagatgcaggagttgtcgacccgctgggagaccgtctgcgctctgtctatttccaaacaaactcggctagaagcagcacttcggcaggccgaagagttccattctgtggttcatgcgctgctggaatggcttgccgaggccgagcagaccctgaggttccacggcgttctgccagatgatgaggatgccttgcgaaccctgatagaccagcataaggagttcatgaagaagctggaagagaagcgggcagaacttaacaaggcaaccacaatgggcgatacagttctggctatttgccaccctgattccatcactaccattaagcactggattactatcataagagcgcgctttgaagaggttctggcctgggctaaacagcaccagcagaggttggcatcagcccttgcagggctaattgccaaacaggagctgcttgaggccctcctggcgtggctccagtgggctgaaacgaccctcactgataaggataaagaggtgattccacaagagatcgaggaggtaaaggcactgatcgccgagcatcaaacgtttatggaggaaatgacccggaagcaacccgacgtggataaagtgaccaagacctacaaacggcgggcagcagatcctagctcccttcagtcgcatatccctgtactcgacaagggtcgtgccggccgcaagcggtttccagcaagttccctttatccgtccggcagccagactcaaatcgaaaccaagaatccacgggtgaaccttcttgtttccaagtggcagcaggtgtggctactcgccctggaacgacgccgaaagctgaacgatgctctggacagactcgaggagctgcgagagttcgctaatttcgactttgacatttggcgcaagaagtacatgagatggatgaaccataaaaagagccgggtcatggatttttttcggcgaatcgacaaggatcaagatggcaagataacaaggcaggagttcatagacggtattctgagtagcaagtttccaacctctcggcttgagatgtccgccgtggcggatatattcgatagggatggagacggctatatcgactactacgagttcgttgctgcccttcatcctaataaagatgcttataagcctatcaccgatgctgataaaatcgaggatgaggtcacccgacaagtggccaaatgtaagtgcgctaagaggttccaggtcgagcagatcggggacaacaaatatagattcttcctggggaatcaattcggcgattcccagcagctgagattggtgcgcatcctccgctcaaccgtgatggtgcgagtggggggcggctggatggctctggacgaattccttgtgaaaaatgacccatgtcgtgcgaaaggtcggaccaatatggaactcagagagaaattcattctggccgacggggcctcccagggaatggcggcctttagacccaggggaaggcgtagtagaccttcctctcgaggcgcttctcctaacagaagtacgagcgtgtctagtcaggccgcccaagctgcctccccccaggtgcccgccaccacaacacctaagatcctccacccccttacccgaaactatggtaagccgtggctgacaaactccaagatgtccacaccttgcaaagcagctgaatgttcggactttccagtgccatccgccgagggtacacccattcaagggtccaagctccgtttacccgggtacttgagtgggaagggattccactcaggtgaggacagcggcctaatcaccaccgccgccgctcgagtgcgcacacagtttgcagacagcaaaaaaacaccaagtaggccaggctcacgcgcagggagcaaagccggctcgcgcgcctcaagcagaagaggcagtgacgctagcgacttcgacattagcgaaatacagagcgtttgttccgacgttgagaccgtgccacagacccatcgccccacaccaagggcagggagcagacctagcacagctaagccttccaagattcccaccccccagagaaaatcaccagcgtctaaactggacaagagcagtaaacgttag

SEQ ID NO: 187315 - DNA, 15516 bp, Artificial Sequence
  derived and/or modified sequence
atgcacagcagcagctacagctaccgcagcagtgacagcgtcttcagcaacaccaccagcaccaggaccagcctggacagcaatgaaaacctgctgctggtgcactgcggccccaccctcatcaacagctgcatcagctttggaagtgagagctttgatggccaccggctggagatgctgcagcagatcgccaacagagtgcagagggacagcgtcatctgtgaggacaagctgatcctggccggaaatgccctgcagagcgacagcaagaggctggagagcggcgtgcagttccagaatgaggccgagattgctggctacatcctggagtgtgagaacctgctgcggcagcacgtgattgatgtgcagatcctgattgatggcaagtactaccaggccgaccagctggtgcagagggtggccaagctgagagatgagatcatggccctgagaaatgaatgttcttctgtgtacagcaagggccgcatcctgaccacagagcagaccaagctgatgatcagcggcatcacccagagcctgaacagcggctttgcccagaccctgcaccccagcctgaccagcggcctgacccagagcctgacccccagcctgaccagcagctccatgaccagcggcctgagcagcggcatgaccagccggctgacccccagcgtgaccccagcctacaccccaggcttccccagcggcctggtgcccaacttcagcagtggagtggagcccaacagcctgcagaccctgaagctgatgcagatcaggaagcccctgctgaagagcagcctgctggaccagaacctgacagaggaggagatcaacatgaagtttgtgcaggacctgctgaactgggtggatgagatgcaggtgcagctggacagaacagagtggggcagtgacctgcccagcgtggagagccacctggagaaccacaagaatgtgcaccgggccatcgaggagtttgagagcagcctgaaggaggccaagatcagcgagatccagatgacagcccccctgaagctgacctacgccgagaagctgcaccggctggagagccagtatgccaagctgctgaacaccagcaggaaccaggagcggcacctggacaccctgcacaactttgtgtcccgggccaccaatgagctgatctggctgaatgagaaggaggaggaggaggtggcctatgactggagcgagaggaacaccaacatcgccaggaagaaggactaccacgccgagctgatgagggagctggaccagaaggaggagaacatcaagtctgtgcaggagattgctgagcagctgctgctggagaaccacccagcccggctgaccatcgaggcctacagagctgccatgcagacccagtggagctggatcctgcagctgtgccagtgtgtggagcagcacatcaaggaaaatacagcctactttgagttcttcaatgatgccaaggaggccacagactacctgaggaacctgaaggatgccatccagaggaagtacagctgtgacaggagcagcagcatccacaagctggaggacctggtgcaggagagcatggaggagaaggaggagctgctgcagtacaagagcaccatcgccaacctgatgggcaaggccaagaccatcatccagctgaagcccaggaacagcgactgccccctgaagaccagcatccccatcaaggccatctgtgactaccggcagatcgagatcaccatctacaaggatgatgaatgtgtgctggccaacaacagccaccgggccaagtggaaggtgatcagccccactggaaatgaggccatggtgcccagcgtgtgcttcaccgtgcccccacccaacaaggaggccgtggacctggccaacagaattgagcagcagtaccagaatgtgctgaccctgtggcatgagagccacatcaacatgaagtctgtggtgtcctggcactacctgatcaatgaaattgaccgcatccgggccagcaatgtggccagcatcaagaccatgctgcccggggagcaccagcaggtgctgagcaacctgcagagcagatttgaggacttcctggaggacagccaggagagccaggtgttcagcggcagtgacatcacccagctggagaaggaggtgaatgtgtgcaagcagtactaccaggagctgctgaagtctgctgagcgggaggagcaggaggagagcgtgtacaacctgtacatcagcgaggtgaggaacatccggctgcggctggagaactgtgaagatagactcatccggcagatccgcacccccctggagagagatgacctgcacgagagcgtcttccgcatcacagagcaggagaagctgaagaaggagctggagcggctgaaggatgacctgggcaccatcaccaacaagtgtgaggagttcttcagccaggccgccgccagcagctctgtgcccaccctgcggtctgagctgaatgtggtgctgcagaacatgaaccaggtgtacagcatgagcagcacctacatcgacaagctgaagacagtgaacctggtgctgaagaacacccaggccgctgaggccctggtgaagctgtatgagaccaagctgtgtgaggaggaggccgtgattgctgacaagaacaacattgaaaatctcatcagcaccctgaagcagtggaggtctgaggtggatgagaagaggcaggtgttccacgccctggaggatgagctgcagaaggccaaggccatcagtgatgagatgttcaagacctacaaggagcgggacctggactttgactggcacaaggagaaggctgaccagctggtggagcgctggcagaatgtgcacgtgcagattgacaaccggctgcgggacctggagggcatcggcaagagcctgaagtactacagagacacctaccaccccctggatgactggatccagcaggtggagaccacccagaggaagatccaggagaaccagcctgagaacagcaagaccctggccacccagctgaaccagcagaagatgctggtgtctgaaattgagatgaagcagagcaagatggatgagtgccagaagtatgcagagcagtacagcgccaccgtgaaggactatgagctgcagaccatgacctaccgggccatggtggacagccagcagaagagccctgtgaagagaagaaggatgcagagcagcgctgacctgatcatccaggagttcatggacctgcggacccgctacacagccctggtgaccctgatgacccagtacatcaagtttgctggggacagcctgaagaggctggaggaggaggagaagagcctggaggaggagaagaaggagcacgtggagaaggccaaggagctgcagaagtgggtgagcaacatcagcaagaccctgaaggatgctgagaaggccggcaagccacccttcagcaagcagaagatcagcagcgaggagatcagcaccaagaaggagcagctgtctgaggccctgcagaccatccagctgttcctggccaagcacggggacaagatgacagatgaggagagaaatgagctggagaagcaggtgaagaccctgcaggagagctacaacctgctcttcagcgagagcctgaagcagctgcaggagagccagaccagcggagatgtgaaggtggaggagaagatcgtggccgagcggcagcaggagtacaaggagaagctgcagggcatctgtgacctgctgacccagacagagaacagactcatcggccaccaggaggccttcatgattggagatggcaccgtggagctgaagaagtaccagagcaagcaggaggagctgcagaaggacatgcagggcagcgcccaggccctggccgaggtggtgaagaacacagagaacttcctgaaggaaaatggagagaagctgagccaggaggacaaggccctgattgagcagaagctgaatgaggccaagatcaagtgtgagcagctgaacctgaaggccgagcagagcaagaaggagctggacaaggtggtgaccacagccatcaaggaggagacagagaaggtggccgctgtgaagcagctggaggagagcaagaccaagattgagaacctgctggactggctgagcaatgtggacaaggacagcgagcgggccggcaccaagcacaagcaggtgattgagcagaatggcacccacttccaggagggagatggcaagagcgccatcggggaggaggatgaggtgaatggaaacctgctggagacagatgtggatggccaggtgggcaccacccaggagaacctgaaccagcagtaccagaaggtgaaggcccagcacgagaagatcatcagccagcaccaggccgtcatcatcgccacccagagcgcccaggtgctgctggagaagcagggccagtacctgagccctgaggagaaggagaagctgcagaagaacatgaaggagctgaaggtgcactatgaaacagccctggccgagagcgagaagaagatgaagctgacccacagcctgcaggaggagctggagaagtttgatgctgactacacagaatttgagcactggctgcagcagagcgagcaggagctggagaacctggaggccggggctgatgacatcaatggcctgatgaccaagctgaagaggcagaagagcttctctgaagatgtgatcagccacaagggggacctgcgctacatcaccatcagcggcaacagagtgctggaggccgccaagagctgcagcaagagagatggcggcaaggtggacaccagcgccacccaccgggaggtgcagaggaagctggaccacgccacagaccgcttccgcagcctgtacagcaaatgtaatgtgctgggcaacaacctgaaggacctggtggacaagtaccagcactatgaagatgccagctgtggcctgctggccggcctgcaggcctgtgaggccacagccagcaagcacctgtctgagcccatcgctgtggaccccaagaacctgcagaggcagctggaggagaccaaggccctgcagggccagatcagcagccagcaggtggccgtggagaagctgaagaagacagctgaggtgctgctggatgcccggggcagcctgctgcctgccaagaatgacatccagaagaccctggatgacatcgtgggccgctatgaggacctgagcaagtctgtgaatgaaagaaatgagaagctgcagatcaccctgaccaggagcctgtctgtgcaggacggcctggatgagatgctggactggatgggaaatgtggagagcagcctgaaggagcagggccaggtgcccctgaacagcacagccctgcaggacatcatcagcaagaacatcatgctggagcaggacattgctggccggcagagcagcatcaatgccatgaatgagaaggtgaagaagttcatggagaccacagaccccagcacagccagcagcctgcaggccaagatgaaggacctgagcgcccgcttcagcgaggccagccacaagcacaaggagaccctggccaagatggaggagctgaagaccaaggtggagctgtttgagaacctgtctgagaagctgcagaccttcctggagaccaagacccaggccctgacagaggtggatgtgcctgggaaggatgtgacagagctgagccagtacatgcaggagagcaccagcgagttcctggagcacaagaagcacctggaggtgctgcacagcctgctgaaggagatcagcagccacggcctgcccagcgacaaggccctggtgctggagaagaccaacaacctgagcaagaagttcaaggagatggaggacaccatcaaggagaagaaggaggccgtgaccagctgccaggagcagctggatgccttccaggtgctggtgaagagcctgaagtcctggatcaaggagaccaccaagaaggtgcccatcgtgcagcccagctttggagctgaggacctgggcaagagcctggaggacaccaagaagctgcaggagaagtggagcctgaagaccccagagatccagaaggtgaacaacagcggcatcagcctgtgcaacctgatctctgctgtgaccaccccagccaaggccatcgctgctgtgaagtctggaggagctgtgctgaatggagagggcacagccaccaacacagaggagttctgggccaacaagggcctgaccagcatcaagaaggacatgacagacatcagccacggctatgaggacctgggcctgctgctgaaggacaagattgctgagctgaacaccaagctgagcaagctgcagaaggcccaggaggagagcagcgccatgatgcagtggctgcagaagatgaacaagacagccaccaagtggcagcagaccccagcccccacagacacagaggccgtgaagacccaggtggagcagaacaagagctttgaagctgagctgaagcagaatgtgaacaaggtgcaggagctgaaggacaagctgacagagctgctggaggagaacccagacaccccagaggccccccgctggaagcagatgctgacagaaattgacagcaagtggcaggagctgaaccagctgaccatcgaccggcagcagaagctggaggagagcagcaacaacctgacccagttccagacagtggaggcccagctgaagcagtggctggtggagaaggagctgatggtgtctgtgctgggccccctgagcattgaccccaacatgctgaacacccagaggcagcaggtgcagatcctgctgcaggagtttgccaccaggaagccccagtatgagcagctgacagctgctggccagggcatcctgagcaggcctggagaggaccccagcctgcggggcatcgtgaaggagcagctggccgctgtgacccagaagtgggacagcctgaccggccagctgagtgacagatgtgactggattgaccaggccatcgtgaagagcacccagtaccagagcctgctgcggagcctgagtgacaagctgagtgacctggacaacaagctgagcagcagcctggccgtgtccacccacccagatgccatgaaccagcagctggagacagcccagaagatgaagcaggagatccagcaggagaagaagcagatcaaggtggcccaggccctgtgtgaggacctgagcgccctggtgaaggaggagtacctgaaggccgagctgagccggcagctggagggcatcctgaagagcttcaaggatgtggagcagaaggcagaaaatcatgtgcagcacctgcagagcgcctgtgccagcagccaccagttccagcagatgagccgggacttccaggcctggctggacaccaagaaggaggagcagaacaagagccaccccatcagcgccaagctggatgtgctggagagcctcatcaaggaccacaaggacttcagcaagaccctgacagcccagagccacatgtatgagaagaccatcgccgagggggagaacctgctgctgaagacccagggcagcgagaaggccgccctgcagctgcagctgaacaccatcaagaccaactgggacaccttcaacaagcaggtgaaggagcgggagaacaagctgaaggagagcctggagaaggccctgaagtacaaggagcaggtggagaccctgtggccctggattgacaagtgccagaacaacctggaggagatcaagttctgcctggaccctgcagaaggagaaaattccatcgccaagctgaagagcctgcagaaggagatggaccagcacttcggcatggtggagctgctgaacaacacagccaacagcctgctgtctgtgtgtgaaattgacaaggaggtggtgacagatgagaacaagagcctcatccagaaggtggacatggtgacagagcagctgcacagcaagaagttctgcctggagaacatgacccagaagttcaaggagttccaggaggtgtccaaggagagcaagaggcagctgcagtgtgccaaggagcagctggacatccatgacagcctgggcagccaggcctacagcaacaagtacctgaccatgctgcagacccagcagaagagcctgcaggccctgaagcaccaggtggacctggccaagaggctggcccaggacctggtggtggaggccagtgacagcaagggcaccagtgatgtgctgctgcaggtggagaccatcgcccaggagcacagcaccctgagccagcaggtggatgagaagtgcagcttcctggagaccaagctgcagggcatcggccacttccagaacaccatccgggagatgttcagccagtttgctgagtttgatgatgagctggacagcatggcccctgtgggcagagatgctgagaccctgcagaagcagaaggagaccatcaaggccttcctgaagaagctggaggccctgatggccagcaatgacaatgccaacaagacctgcaagatgatgctggccacagaggagaccagcccagacctggtgggcatcaagagggacctggaggccctgagcaagcagtgcaacaagctgctggaccgggcccaggcccgggaggagcaggtggagggcaccatcaagaggctggaggagttctacagcaagctgaaggagttcagcatcctgctgcagaaggccgaggagcacgaggagagccagggccctgtgggcatggagacagagaccatcaaccagcagctgaacatgttcaaggtgttccagaaggaggagattgagcccctgcagggcaagcagcaggatgtgaactggctgggccagggcctcatccagagcgctgccaagagcaccagcacccagggcctggagcatgacctggatgatgtgaatgcccgctggaagaccctgaacaagaaggtggcccagagagctgcccagctgcaggaggccctgctgcactgcggccgcttccaggatgccctggagagcctgctgtcctggatggtggacacagaggagctggtggccaaccagaagccacccagcgctgagttcaaggtggtgaaggcccagatccaggagcagaagctgctgcagaggctgctggatgacaggaagagcacagtggaggtgatcaagcgggagggggagaagatcgccaccacagctgagcctgctgacaaggtgaagatcctgaagcagctgagcctgctggacagccgctgggaggccctgctgaacaaggccgagaccaggaaccggcagctggagggcatctctgtggtggcccagcagttccacgagaccctggagcccctgaatgagtggctgaccaccatcgagaagaggctggtgaactgtgagcccatcggcacccaggccagcaagctggaggagcagatcgcccagcacaaggccctggaggatgacatcatcaaccacaacaagcacctgcaccaggccgtgtccatcggccagagcctgaaggtgctgagcagccgggaggacaaggacatggtgcagagcaagctggacttcagccaggtgtggtacatcgagatccaggagaagagccacagccgctctgagctgctgcagcaggccctgtgcaatgccaagatctttggagaagatgaggtggagctgatgaactggctgaatgaggtgcatgacaagctgagcaagctgtctgtgcaggactacagcacagagggcctgtggaagcagcagagcgagctgcgggtgctgcaggaggacatcctgctgaggaagcagaatgtggaccaggccctgctgaatggcctggagctgctgaagcagaccactggagatgaggtgctgatcatccaggacaagctggaggccatcaaggcccgctacaaggacatcaccaagctgagcacagatgtggccaagaccctggagcaggccctgcagctggcccggcggctgcacagcacccatgaggagctgtgcacctggctggacaaggtggaggtggagctgctgtcctatgagacccaggtgctgaagggggaggaggccagccaggcccagatgaggcccaaggagctgaagaaggaggccaagaacaacaaggccctgctggacagcctgaatgaggtgagcagcgccctgctggagctggtgccctggagggcccgggagggcctggagaagatggtggccgaggacaatgaaagataccgcctggtgtctgacaccatcacccagaaggtggaggagattgatgctgccatcctgcggagccagcagtttgaccaggccgcagatgctgagctgtcctggatcacagaaacagagaagaagctgatgagcctgggggacatccggctggagcaggaccagaccagcgcccagctgcaggtgcagaagaccttcaccatggagatcctgcggcacaaggacatcattgatgacctggtgaagagcggccacaagatcatgacagcctgcagcgaggaggagaagcagagcatgaagaagaagctggacaaggtgctgaagaactatgacaccatctgccagatcaacagcgagcgctacctgcagctggagcgggcccagagcctggtgaaccagttctgggagacctatgaggagctgtggccctggctgacagagacccagagcatcatcagccagctgcctgccccagccctggagtatgagaccctgcggcagcagcaggaggagcaccggcagctgcgggagctgattgctgagcacaagccccacatcgacaagatgaacaagacaggcccccagctgctggagctgagccctggagagggcttcagcatccaggagaagtatgtggccgctgacaccctgtacagccagatcaaggaggatgtgaagaagagagctgtggccctggatgaggccatcagccagagcacccagttccatgacaagattgaccagatcctggagagcctggagcgcatcgtggagcggctgcggcagcccccatccatctctgctgaggtggagaagatcaaggagcagatcagcgagaacaagaatgtgtctgtggacatggagaagctgcagcccctgtatgagaccctgaagcagagaggagaggagatgattgcccggagcggcggcacagacaaggacatcagcgccaaggctgtgcaggacaagctggaccagatggtgttcatctgggagaacatccacaccctggtggaggagcgggaggccaagctgctggatgtgatggagctggccgagaagttctggtgtgaccacatgagcctgattgtgaccatcaaggacacccaggacttcatccgggacctggaggaccccggcatcgaccccagcgtggtgaagcagcagcaggaggccgctgagaccatccgggaggagattgatggcctgcaggaggagctggacatcgtcatcaacctgggcagcgagctgattgctgcctgtggggagccagacaagcccatcgtgaagaagagcattgatgagctgaacagcgcctgggacagcctgaacaaggcctggaaggacagaattgacaagctggaggaggccatgcaggccgctgtgcagtaccaggacggcctgcaggccgtgtttgactgggtggacattgctgggggcaagctggcctccatgagccccatcggcacagacctggagaccgtgaagcagcagatcgaggagctgaagcagttcaagtctgaggcctaccagcagcagatcgagatggagcggctgaaccaccaggccgagctgctgctgaagaaggtgacagaggagagtgacaagcacacagtgcaggaccccctgatggagctgaagctgatctgggacagcctggaggagcgcatcatcaaccggcagcacaagctggagggcgccctgctggccctgggccagttccagcacgccctggatgagctgctggcctggctgacccacacagagggcctgctgtctgagcagaagcctgtgggcggggaccccaaggccattgaaattgagctggccaagcaccacgtgctgcagaatgatgtgctggcccaccagagcacagtggaggccgtgaacaaggctggaaatgacctgattgagagcagcgctggggaggaggccagcaacctgcagaacaagctggaggtgctgaaccagcgctggcagaatgtgctggagaagacagagcagaggaagcagcagctggatggagccctgcggcaggccaagggcttccacggggagattgaggacctgcagcagtggctgacagacacagagcggcacctgctggccagcaagcccctgggcggcctgcctgagacagccaaggagcagctgaatgtgcacatggaggtgtgtgccgcctttgaggccaaggaggagacctacaagagcctgatgcagaagggccagcagatgctggcccgctgccccaagtctgctgagaccaacatcgaccaggacatcaacaacctgaaggagaagtgggagagcgtggagaccaagctgaatgaaaggaagaccaagctggaggaggccctgaacctggccatggagttccacaacagcctgcaggacttcatcaactggctgacccaggccgagcagaccctgaatgtggccagccggcccagcctcatcctggacacagtgctcttccagattgatgagcacaaggtgtttgccaatgaggtgaacagccaccgggagcagatcatcgagctggacaagacaggcacccacctgaagtacttcagccagaagcaggatgtggtgctgatcaagaacctgctgatctctgtgcagagccgctgggagaaggtggtgcagaggctggtggagcggggccgcagcctggatgatgccaggaagagggccaagcagttccacgaggcctggagcaagctgatggagtggctggaggagagcgagaagagcctggacagcgagctggagatcgccaatgaccctgacaagatcaagacccagctggcccagcacaaggagttccagaagagcctgggcgccaagcacagcgtgtatgacaccaccaacagaacaggccgcagcctgaaggagaagaccagcctggctgatgacaacctgaagctggatgacatgctgtctgagctgcgggacaagtgggacaccatctgtgggaagtctgtggagcggcagaacaagctggaggaggccctgctcttcagcggccagttcacagatgccctgcaggccctgattgactggctgtacagagtggagccccagctggccgaggaccagcctgtgcacggggacatcgacctggtgatgaacctgattgacaaccacaaggccttccagaaggagctgggcaagaggaccagctctgtgcaggccctgaagaggtctgcccgggagctgattgagggcagcagagatgacagctcctgggtgaaggtgcagatgcaggagctgagcacccgctgggagaccgtgtgtgccctgagcatcagcaagcagacccggctggaggccgccctgcggcaggccgaggagttccacagcgtggtgcacgccctgctggagtggctggccgaggccgagcagaccctgcgcttccacggcgtgctgcctgatgatgaagatgccctgcggaccctgattgaccagcacaaggagttcatgaagaagctggaggagaagagagctgagctgaacaaggccaccaccatgggagacacagtgctggccatctgccacccagacagcatcaccaccatcaagcactggatcaccatcatccgggccaggtttgaggaggtgctggcctgggccaagcagcaccagcagaggctggccagcgccctggccggcctcatcgccaagcaggagctgctggaggccctgctggcctggctgcagtgggccgagaccaccctgacagacaaggacaaggaggtgatcccccaggagattgaggaggtgaaggccctgattgctgagcaccagaccttcatggaggagatgaccaggaagcagccagatgtggacaaggtgaccaagacctacaagagaagagctgctgaccccagcagcctgcagagccacatccctgtgctggacaagggccgggccggcaggaagcgcttccctgccagcagcctgtaccccagcggcagccagacccagatcgagaccaagaacccccgggtgaacctgctggtgtccaagtggcagcaggtgtggctgctggccctggagaggaggaggaagctgaatgatgccctggaccggctggaggagctgcgggagtttgccaactttgattttgacatctggaggaagaagtacatgcgctggatgaaccacaagaagagccgggtgatggacttcttcagaagaattgacaaggaccaggacggcaagatcacccggcaggagttcattgatggcatcctgagcagcaagttccccaccagccggctggagatgtctgctgtggccgacatctttgacagagatggagatggctacatcgactactatgaatttgtggccgccctgcaccccaacaaggatgcctacaagcccatcacagatgctgacaagattgaagatgaggtgacccggcaggtggccaagtgcaagtgtgccaagcgcttccaggtggagcagatcggggacaacaagtaccgcttcttcctgggcaaccagtttggagacagccagcagctgcggctggtgcgcatcctgcggagcacagtgatggtgcgggtgggcggcggctggatggccctggatgagttcctggtgaagaatgacccctgccgggccaagggccgcaccaacatggagctgcgggagaagttcatcctggctgatggagccagccagggcatggccgccttccggccccggggccgccgcagccggcccagcagcagaggagccagccccaacagaagcacctctgtgagcagccaggccgcccaggccgccagcccccaggtgcctgccaccaccacccccaagatcctgcaccccctgaccagaaattatggcaagccctggctgaccaacagcaagatgagcaccccctgcaaggccgcagaatgtagtgacttccctgtgcccagcgctgagggcacccccatccagggcagcaagctgcggctgcccggctacctgagcggcaagggcttccacagcggagaagattctggcctcatcaccacagctgctgcccgggtgaggacccagtttgctgacagcaagaagacccccagcaggcctggcagcagagctggcagcaaggccggcagccgggccagcagccggcggggcagtgatgccagtgactttgacatcagcgagatccagagcgtgtgcagtgatgtggagaccgtgccccagacccaccggcccacccccagggctggcagccggcccagcacagccaagcccagcaagatccccaccccccagaggaagagccctgccagcaagctggacaagagcagcaagaggtag

SEQ ID NO: 187316 - DNA, 15516 bp, Artificial Sequence
  derived and/or modified sequence
atgcacagcagcagctacagctaccggagcagcgacagcgtgttcagtaataccacctctacgcggacaagcctcgactcgaatgaaaaccttctgcttgttcactgcgggccaacactgatcaactcctgtatcagctttgggtctgagagttttgacggacaccgcttggaaatgctgcagcagatcgcaaaccgggtccagagggattctgttatttgcgaagacaagttaattcttgccgggaacgctctccagtccgactctaagagactggagagcggcgtccaattccagaacgaggctgaaatcgccggttacatcctcgagtgtgaaaaccttctcaggcagcacgtcatcgacgtgcagattctgatcgatggcaagtattaccaggcggatcagttagtccaaagggttgcgaagctgcgcgatgaaattatggccctcagaaacgagtgctccagcgtttacagcaagggccgcatactcaccactgaacagacgaagttgatgatctcagggatcacacagagcctcaacagcggattcgctcagaccctccacccgagtctaactagcggccttacacagagcctaaccccgtccctcacctcctcgagtatgactagcggtctgtcatctgggatgacttcccggttgactccctctgtaacgccggcttacacaccagggtttccttccggcctggttccaaacttctcctccggggtcgagcctaactcactacagacattgaagcttatgcagattcgaaaacctttgttaaagagtagcctactcgaccaaaacttgaccgaggaagagattaatatgaaatttgtgcaggatcttctcaattgggtggatgaaatgcaagtccagctagataggacggagtggggctccgacttacccagcgtggaatcccacctggagaaccacaagaatgtccacagagctattgaagaatttgaatcatcactcaaggaggccaagatcagtgagatacagatgactgccccattgaagctgacgtacgctgagaaactgcacaggcttgagtcacaatacgcaaagcttctgaataccagccgcaatcaagagagacacctagatacactgcacaacttcgttagccgtgcgactaacgaacttatctggctgaatgagaaagaggaggaagaggtcgcatatgattggagtgagagaaacacaaacatcgctcggaagaaagattaccacgccgaacttatgagagagctggatcaaaaggaagaaaacattaagtccgtgcaggagatagctgagcagctccttctagagaatcatcccgcccgtcttaccattgaagcttaccgggccgcgatgcaaacacagtggagctggatcttacagctttgccagtgtgtcgaacagcatatcaaagaaaacacggcgtactttgaattcttcaatgatgccaaagaagcgaccgactatcttagaaatttgaaggacgctattcagagaaagtattcgtgtgatcgatctagtagcatccataagctcgaagacctggtccaggagagtatggaagaaaaggaagagctgctgcagtataagtctacaattgccaatctgatggggaaggccaaaaccattatccagctgaaacctcggaatagcgactgtccattgaagacctcgattcctatcaaggctatttgtgattatcgtcagattgaaataaccatctacaaagacgacgaatgcgtactcgctaacaattctcatcgggccaagtggaaagtcattagcccaacaggaaatgaggcaatggttccaagcgtgtgttttactgtgcccccaccgaacaaagaagccgtggaccttgcaaatagaattgagcagcaataccagaatgtcctgaccctgtggcatgaatcgcacatcaacatgaaatctgtcgtaagttggcactacctgatcaatgagattgatagaatccgtgcctctaatgtcgcctccataaagaccatgctgcctggcgagcaccagcaagttctgtcgaacctgcagtctaggtttgaagacttcctggaggactcccaggagtcacaggtgttcagtgggtccgatataacccaactggagaaggaggtcaatgtatgtaaacagtactatcaagagctgttgaaatccgccgagcgcgaggaacaggaagagtctgtgtataacttgtacatttcagaggttcggaacattaggcttcgcttagagaattgtgaagataggttgatacgacaaatacggacacccctggaaagggacgatttgcatgagtccgtgtttaggataaccgagcaggagaaactcaagaaagagctggaacgccttaaggacgacttagggacgatcaccaacaaatgcgaggagttcttcagtcaggccgcagcctcctcctctgtcccaacattgaggtccgagctgaacgtcgtactacaaaacatgaatcaggtttatagcatgtcatccacatacatcgacaagctgaagaccgtcaacctcgttctgaagaatacccaggccgccgaggcactggtgaaactttatgagactaagctgtgcgaggaggaggccgtcattgctgataagaataacattgagaatctcattagcacactcaaacagtggcggtccgaggtcgacgagaaacggcaggtgtttcatgctctggaagacgagctgcaaaaggccaaggcaatcagcgatgaaatgtttaagacatataaggaacgggacctcgattttgattggcataaagagaaggcagaccagctagtggagcgctggcaaaatgtgcacgtacagattgacaatcgtctgagggacttagaaggcatcgggaagtcacttaaatattaccgggatacttaccaccccctcgacgactggatccagcaggtggagacaacccagcggaagattcaggagaaccagccagagaactctaaaactttagccacccagctgaaccagcagaagatgctggtcagcgaaattgagatgaaacagagcaaaatggatgaatgccagaaatacgccgaacaatacagcgcaactgttaaggactatgagcttcagacaatgacctacagggctatggtggactcacaacagaagagcccggtgaagcgcagacgcatgcagagctcggccgacctgattatccaggaatttatggatctgcggactcgctacacagctctggtcactctgatgacccagtatatcaagttcgctggggactcactgaagcgcctggaagaagaggaaaagtccctcgaggaagagaagaaagagcacgtcgagaaagccaaagagctgcagaagtgggtgtccaatatcagcaagaccctgaaagatgccgaaaaagcggggaagcctccttttagcaaacagaaaattagctccgaggaaatttccaccaagaaagagcagctgtccgaagcactccagacaattcagctgtttctggccaaacacggggataagatgactgatgaggaaaggaatgaattggaaaaacaggtcaaaaccttacaggagtcatacaatctgctgttctctgagtccctgaaacagctgcaggaaagccagacatctggggatgtaaaggtggaggaaaagatagtagctgaacggcagcaagagtataaagaaaagctgcaggggatctgtgatttgttgacccagacggagaacagactgataggacatcaggaggccttcatgatcggcgatgggacagttgagctgaagaagtaccagtccaaacaagaagagctccagaaggatatgcaaggctccgcgcaggccctggccgaagtagtgaagaacaccgagaatttccttaaagagaatggtgaaaaactgtcacaggaggacaaagcactgattgaacagaagttgaacgaggcaaagatcaagtgcgagcagctgaatctgaaagctgaacagagtaaaaaagagttggataaagttgtcactaccgcgatcaaggaggagaccgaaaaagtggcagctgtcaaacagctggaggagagcaagactaagattgagaaccttctggattggttatctaacgtggacaaggacagcgaacgagccggcacaaagcacaaacaggtcatcgagcagaacggaactcacttccaggaaggtgatggaaaatcagctattggcgaagaagatgaagtcaatggtaatcttctggagactgatgttgacgggcaggtggggactacccaagagaacctgaaccagcagtaccaaaaagtcaaggcccagcacgaaaagattatctcccagcaccaggcggttataattgctacccagagtgctcaagtgttgttggagaagcaaggtcagtatctgtctccggaagagaaagaaaagctgcagaaaaatatgaaggaacttaaggtgcattacgagactgcccttgctgaaagcgaaaagaagatgaaattgactcacagtctacaggaagaactggagaaatttgatgcggactacaccgaatttgagcactggcttcagcagagcgagcaggagctggaaaacctggaggccggagcagacgacattaacgggctgatgacaaagttgaaacggcaaaaaagctttagtgaggatgtgatcagtcacaaaggcgatctcagatacattaccatcagtggcaacagagtcctcgaagcagcaaaatcctgctctaaacgtgatggtggaaaggtggatacctccgccactcatagggaagttcagcgaaagctagaccatgctacggaccggtttcgttccttgtacagtaaatgcaatgttctgggcaataacttaaaagacctggtggataagtaccagcactacgaggatgcatcctgcggcctgttggctggtctccaggcttgtgaggccaccgctagcaaacacttgtcagagcctattgccgtggatccgaaaaaccttcaaagacagctggaggagactaaagctttgcagggtcagatctccagccagcaggtcgctgttgagaaactaaagaaaaccgcagaggtgctcttagatgcgagggggtcactgctgcctgctaaaaatgacattcagaaaaccctcgacgatatcgtgggccgctacgaagatctctctaaaagtgtgaacgagagaaacgagaagctgcaaatcaccttaactaggagtctgagcgtgcaagacggactggatgagatgttggactggatgggcaatgtcgagagctccctgaaggaacagggtcaggtgcctctcaactccacagcgctgcaggacatcatcagtaagaatatcatgttggagcaggacattgcaggtcgccagagttctattaatgctatgaacgagaaggtcaaaaaattcatggagacaacagacccctctacagccagttctctccaggctaagatgaaagacctgtccgcacgattctccgaggcgagccataagcacaaggagactttggcgaagatggaggagctgaaaactaaagtggagttatttgaaaacttatccgaaaaactgcagacctttctggagaccaagacacaggccctaaccgaggtggatgttcccggaaaggatgtgaccgagttatctcagtacatgcaggagtctacttcagagtttctcgaacataaaaagcacctcgaggttctccactccctcctgaaggaaatttcatctcatgggttgccttcagataaggccttggtgttggaaaagacaaataatctgagcaagaaatttaaggagatggaagacaccataaaggaaaagaaagaggctgtgacaagctgccaagagcaattggatgccttccaagtgctcgtgaaatctcttaagtcctggataaaagagaccacaaaaaaggttccgatcgtgcagccctcttttggcgctgaagatctcgggaagtcactggaagacaccaagaagctccaagaaaagtggtcattaaagaccccagagattcagaaagttaataatagtggtatttctttgtgcaatttaatttctgctgttactactcccgccaaggccatcgccgcagtaaagtctggcggggcggtgttgaacggggagggcaccgccaccaacacagaagagttctgggccaacaaaggtttaacctctatcaagaaggacatgaccgacatatcacacgggtatgaagacctgggccttcttttgaaggacaaaatcgcggagttgaacaccaagctgagcaagctgcagaaagcacaggaagagtcctcggccatgatgcagtggctgcagaaaatgaacaaaactgccactaaatggcagcaaacacccgctcccaccgataccgaggccgtgaagacccaagtggaacagaataaaagctttgaggccgagctgaagcagaatgtgaacaaggtccaagaactgaaggataaactgaccgagcttcttgaagaaaatcccgatacacccgaggctccgcgatggaagcagatgcttacggagatcgatagcaaatggcaagagctgaaccagttaacgatagatcgccagcagaagctggaggaatcttcaaataacctgactcagtttcaaaccgtggaggcccagcttaagcagtggttagtcgaaaaggagctaatggtgtccgtgttgggtccactgagcatcgatccaaatatgttgaacactcagagacagcaggtccagattcttctgcaggagtttgcaacacgtaaacctcagtatgagcagctgaccgctgccggccaggggatcctgtcccggccaggcgaggatccatctctgaggggaatcgtcaaagaacaactggcagccgtaacgcagaagtgggacagcctgacgggccagcttagtgataggtgcgattggatcgatcaagccattgttaaatcgacccagtatcagagcttgctccgctccttgtccgacaaactgtcagaccttgataacaagctctcaagctctcttgctgttagcactcacccagacgcgatgaatcagcaactcgagaccgctcagaaaatgaaacaagagatacagcaagaaaaaaaacagattaaggttgctcaagccctttgcgaggacttgagcgccctggtcaaagaagagtatctgaaggcagaactttcaaggcaactggaggggatactcaaaagctttaaggatgttgaacaaaaagctgagaaccatgtccagcatctgcagagtgcctgcgcgtcatctcaccagtttcaacaaatgagtcgagacttccaggcatggttggacactaagaaggaggagcagaacaagagccatcctatctcggccaaactagacgtgctcgaatccctcatcaaagatcataaggactttagcaaaaccttgaccgcacagagccacatgtacgagaaaactattgccgagggagagaatctgctgcttaagactcagggctcggagaaggctgcactgcaactccagctgaatactattaagaccaattgggacaccttcaataagcaggtgaaggaacgggagaacaaactcaaggaatctctggaaaaagctctgaaatacaaggagcaagtcgaaactctatggccttggattgataagtgccagaataatttggaggaaatcaagttctgcctggatccggctgagggcgagaatagcattgccaagctgaagtcactgcagaaggaaatggatcagcacttcggcatggttgaacttctcaacaataccgcaaatagcctgctctccgtctgcgagatagacaaagaggttgtaaccgatgagaataagagcttgatccagaaagtagacatggtgacagaacaactgcactcgaagaagttctgtctggagaatatgactcagaagtttaaagagttccaagaagtttcaaaagagtcaaaacgtcagctgcagtgcgccaaagagcagctggacattcacgatagtctggggagccaagcgtactccaacaagtatctcactatgcttcagacccagcagaaatcactgcaagcgttaaaacaccaggtggacttagctaagcggcttgcccaggacctggtcgtggaagcttcagattctaagggcacctcagatgtgctgctccaggtggaaactattgcgcaggaacacagtactctgagtcagcaggtggatgagaagtgttcattcctagagactaagcttcagggaatcggtcattttcagaacactattagggagatgttctctcagttcgccgagttcgacgacgaactggacagtatggcccctgtgggtcgcgacgctgagaccttgcaaaagcagaaggagacaattaaagcatttctgaagaagcttgaggccctgatggcatccaatgataatgctaataaaacctgtaagatgatgttggccacagaggagacatcccccgacttagtgggcatcaaaagggatttggaggctctgagtaagcagtgcaataaactgcttgatagagctcaggcccgggaggaacaggtcgagggaaccatcaaaaggcttgaagagttttactcaaaactgaaggagttcagtatcctgctccagaaagccgaagagcatgaagaatcacagggacccgtgggaatggaaaccgagactattaatcagcagctcaatatgtttaaagtgtttcagaaggaagagatagaaccactgcaggggaagcagcaggatgtcaactggctcggtcagggccttatccaaagcgctgctaagtccacttctacgcaaggtcttgagcacgatctggacgatgtcaatgccaggtggaaaacacttaacaaaaaagtggcccagagggccgctcagctgcaggaggcactgctgcactgcgggcgctttcaagatgctttggagagtctcctgtcctggatggtagacaccgaggagctagtcgcgaaccagaagcctccatctgccgaattcaaggtggtcaaggcccaaatacaggagcaaaagctcctccagcggttgctcgacgatcgaaagagcacagtggaggtcataaagagggagggcgagaaaatcgccaccacagctgagccagccgataaggtgaagatccttaaacagctctcacttttagattctaggtgggaggccctgttgaataaggctgagactcggaacagacagcttgagggaattagtgtcgttgcgcaacagttccatgagactcttgagccgctaaacgaatggctaaccactatcgaaaagcggttagtcaactgcgagcccatcggaactcaggcatcaaaacttgaggaacagatagctcagcataaagccttggaggacgacatcatcaaccacaataaacatttacaccaggctgtgtcaattggccaatcattgaaggtactgtctagcagggaagacaaggacatggtccagagcaaactagactttagtcaggtgtggtacatcgaaatccaggagaaaagccactctcgttcggagttgttgcagcaggccctctgtaacgccaaaatcttcggtgaagatgaggtcgaactgatgaattggctgaatgaggtgcatgataagctatccaaactcagcgtgcaggactattctacagaaggtttgtggaagcaacaaagcgaacttagagtgctccaggaggacatcctcctcagaaagcagaacgtcgatcaggctcttctgaatggacttgagctgttaaaacagacaaccggggatgaagtcctgattattcaggacaaactcgaggctatcaaggccagatataaagatattactaagctatcgacagacgtggccaaaacattggagcaagctctgcagctggctagaaggctccactccacccacgaggaactctgtacctggctcgataaggtcgaggtggaactgctcagttacgagacccaagtgctcaagggcgaagaggcctcacaggcccagatgcggcccaaggagctgaaaaaggaagccaagaacaacaaggcgttgttggactccctgaacgaagtttccagcgccctgctggagctagttccatggcgcgctcgtgaaggtctggagaagatggtggcggaagacaacgaacgataccggctcgtatccgatacaattacccagaaggtagaagagatcgatgccgcgattctcaggtctcagcagtttgaccaggccgcagacgccgaactgtcttggattaccgaaacagaaaaaaagctcatgagtctgggcgacatccggctggagcaggatcaaaccagcgctcagcttcaggttcagaaaacttttactatggaaattctgcggcataaagacatcatcgacgatttagtcaaatctgggcacaaaatcatgaccgcttgcagcgaagaagaaaaacagtccatgaagaagaagctggacaaagtgttgaagaattacgacactatctgtcagatcaattctgaacgataccttcagctggaacgagcccagagcctggtcaaccagttctgggaaacgtacgaggaattgtggccctggctcacagaaacacagagcattatttcacagcttccagctcccgctctggaatatgagaccctgcggcagcagcaggaagaacatagacagctccgagaactgatcgctgaacataaacctcatatcgacaaaatgaacaaaacaggccctcagttgttagaactgtcacctggagaaggattcagtatacaagaaaaatacgtagcagctgatactctgtactcacagatcaaggaagacgtgaaaaagcgcgccgtagctctagatgaagctatatcccagtcaacccagtttcatgacaaaatcgatcagatactggagtccctggaacgcattgtagagagacttaggcagcccccctctatctcagccgaggtcgaaaagataaaggaacagatctccgaaaacaagaatgtaagcgtcgacatggagaagctgcagccgctgtacgagacgctcaagcagagaggcgaggaaatgatcgcccgctctggcggcactgataaggatatttcagctaaagccgtgcaggacaaactggatcaaatggtcttcatttgggaaaatatccacaccctggtggaggaaagagaagcgaaacttctagatgtcatggaactggccgagaagttctggtgtgatcacatgtctctcatcgtgaccattaaagatacccaagacttcattcgggatctggaagaccctggcatcgaccccagcgtggtcaagcaacagcaggaagccgccgagaccatcagggaagagatcgacgggctgcaggaagaactggacatcgtgattaatctcgggagtgaacttattgcggcatgtggcgagccggataagcccatcgtgaagaaatcaatcgacgagcttaattcggcgtgggattcattgaataaagcttggaaggataggattgacaaattggaagaagcgatgcaggcggccgtgcagtaccaggatggtctgcaggccgtctttgactgggtggatattgccgggggaaagctcgcctccatgtcccctataggcaccgatctggagaccgtgaaacagcaaatcgaagagctcaaacaatttaaatcagaagcatatcagcaacagattgaaatggaacgcctcaatcaccaagccgaattgctgctcaagaaggtgaccgaggaaagtgacaagcatacagtacaggatccgctgatggagttaaagttaatctgggacagcttggaggagcgtattatcaatcgacaacataaacttgagggggctctcctggcattaggtcagtttcaacacgctctagatgagctcctggcctggctaactcacaccgaaggactcctgtccgaacagaaaccagtcggcggggatccaaaagccatcgaaatcgagctggccaagcatcacgtgctgcagaacgatgtcctggcccaccagagcaccgtggaggcggttaataaggctggcaacgatctcatagaatcgagcgccggggaggaagcttctaatcttcaaaacaaactggaggttctgaaccagaggtggcagaatgtgctggagaaaaccgaacagcgcaagcagcagttagacggggccttgcgccaggcaaaaggctttcatggcgagatagaggatttacagcagtggcttactgacacagagcggcacctgctggcaagtaagcctctgggagggttgccggaaactgcaaaggaacaactgaatgttcatatggaggtgtgtgccgcattcgaagcaaaggaggagacatataagagtctaatgcaaaagggccagcagatgctcgccagatgtcctaaatccgccgagacaaacattgatcaagatataaataacctcaaggagaagtgggaaagtgtggaaaccaagctcaatgagagaaagacaaagctggaggaggctctgaacttagccatggagtttcataacagtttgcaggacttcatcaattggcttactcaggcagagcagacactgaacgtggcatcccggccatcccttatcctggacacagttcttttccaaattgatgaacacaaagtgtttgcgaacgaagtcaattcacacagggaacagatcatcgagctggacaagactgggacgcacctgaagtatttcagccagaaacaagatgtcgttctgataaagaacctccttattagcgtacagtcacgttgggaaaaagtggtgcagcggctggttgaacgcgggcgatcactggatgacgcaagaaagagggccaaacagtttcacgaagcctggtccaaattaatggagtggctggaagagtccgaaaaatccttggatagtgaattggagatcgccaacgacccagacaaaattaagacccagctggcacagcacaaggagttccagaagtcgctcggtgcaaaacacagcgtgtatgatacaactaatcggacaggtcggtctctcaaagaaaagacgtccctcgcagacgacaatctgaaactagacgatatgctgagtgagttgagagacaaatgggataccatctgcggtaaatcagtagaaaggcagaacaaattggaagaagctcttctcttcagcgggcagtttaccgacgccctgcaggccctgattgattggttatacagggtggagccgcagcttgccgaagatcagccggttcacggggacattgaccttgtgatgaatctgatagacaatcataaggcgttccagaaagaacttggtaagcgtaccagcagtgttcaggctttgaagcggtcagccagagagctaattgaagggagtcgggacgatagcagctgggtgaaggttcagatgcaggaactgtcgacgaggtgggaaacagtgtgcgcgctgtcaattagcaaacagactcgactggaggcagcactcaggcaagccgaggagtttcacagcgtggtgcacgcattgttagaatggctagcagaggcggaacagacactcaggttccacggcgtcctccctgacgatgaagacgccttgaggaccctcatcgatcagcataaggagtttatgaaaaagttggaagagaaaagggccgaactaaacaaggccactactatgggggacactgtactggctatttgccacccagactctataaccacgattaagcattggatcactatcatacgggctcgtttcgaggaagtgctcgcttgggctaagcaacatcagcagcgattagcatccgcactggcaggcctgattgctaagcaggagctgctggaagctctcctagcttggctgcagtgggcggaaactacgttgacagacaaagataaggaggtcataccgcaggagatcgaagaggtcaaggccctcattgcagaacaccagacatttatggaagagatgacacggaagcagcctgatgtagacaaagtcactaaaacctacaagcgacgcgcggctgacccaagctctctacagtcacacatcccggtccttgacaaaggcagggctgggcggaagagatttcctgcctcctcattatatccctcagggtcccagacccagatcgaaacaaagaatcctagagtgaatctgctcgtgtccaagtggcagcaggtgtggctactcgccctggaacgcagacggaaattaaacgacgcccttgataggcttgaggaactgcgggaatttgccaactttgacttcgatatctggaggaaaaagtatatgcgctggatgaaccataagaaatcgcgagtgatggacttttttagacggattgacaaggaccaggatggaaagattactcggcaagagtttatagacggcattctctcttcaaagtttccaacttcaaggctagaaatgagcgccgttgcagacatattcgatagggatggggacgggtacattgattattatgagtttgtagcagcactccaccctaataaggacgcctataagcctattacagatgccgacaaaatagaagatgaggtcactagacaggttgctaaatgtaaatgtgccaaaagatttcaggtggaacagataggcgataacaagtataggttttttctcggcaatcagtttggggacagccagcaactcagattagtgaggattttgaggagtaccgtgatggtacgggtgggcggagggtggatggcactcgacgagtttctcgtcaagaacgacccctgtcgggccaaaggacgaacgaatatggagttaagagagaagttcatattggccgatggtgcaagccagggaatggctgccttccgacctaggggacgtcggtcgcggccatccagtcggggagcttccccgaaccggtccacctccgtgagcagccaagcagcccaggccgcttcgccacaggttccagctacgaccacacctaaaattctccatcctctcacacgtaattacgggaagccttggttaactaactctaagatgagcaccccttgcaaggccgccgagtgttccgatttccccgtccctagcgctgaaggtacccctattcagggttccaaactgcgcctcccagggtatctcagcggcaaaggatttcatagcggtgaagactccggtctaatcactaccgccgcggccagagtccgcacccagttcgcagattctaaaaagaccccgagcaggcccgggtctagagccggctccaaggcaggctcacgagcttcctctaggcgaggaagtgatgccagtgattttgacatctcagagattcagtctgtctgcagcgatgtagagacagttccgcaaactcaccgcccaaccccaagggcaggaagccgccccagtaccgccaaacctagtaaaatcccaactccccagcggaaaagccccgcaagcaagttggacaagtccagcaaaagatag

SEQ ID NO: 187317 - DNA, 15516 bp, Artificial Sequence
  derived and/or modified sequence
atgcactccagctcctactcctaccggtcttcagattccgtttttagcaacactacatccacgagaacctccttggactctaacgagaacttgctgcttgttcactgtggaccaactctcattaactcctgcatctccttcggctcggaatcctttgacggccaccgcctggagatgcttcagcaaatagctaatcgggtgcaaagagacagcgtgatctgcgaagacaaactgatactggccggaaatgcactgcagtccgattctaaacgccttgaaagcggggtgcagtttcagaatgaagctgaaattgccggatacattctggaatgtgaaaacttgcttcgccagcacgtcatcgacgtgcagatactgattgacggaaagtactaccaggcagaccagctagtgcagcgcgtcgccaaactgcgagacgaaattatggcactgaggaacgagtgttcaagtgtgtactccaaggggcgtattctgaccacagagcagaccaagttaatgatcagcggcatcacgcaaagccttaatagcggttttgcgcagactctgcatcctagtctaacctcaggtcttacccagtctctcacaccctccctgactagctcttcaatgacctccggcctgagttctgggatgacttctaggcttacaccctcagtgacccccgcttacaccccgggttttcccagcggcctggttcctaacttctcgagtggggtagagccgaacagccttcagacccttaagctgatgcagattaggaagcccctgcttaagtcgagccttctcgaccagaaccttaccgaggaggaaatcaatatgaagtttgtccaggatctcttgaactgggtggatgaaatgcaggtccagttggaccgtacggagtgggggagtgatttgcctagcgttgaaagccacctggaaaatcacaagaatgtacatcgtgcaattgaagaatttgagtcctccctaaaagaggccaaaatatctgagattcaaatgacagccccattaaaattgacctacgctgaaaagctgcacaggttggagtcccagtatgctaagctccttaatacttccagaaaccaggagaggcacttggacactctgcacaactttgtctcacgggcaaccaatgagctgatatggctcaatgaaaaggaagaggaggaggtggcctatgattggagtgaaagaaataccaacattgccaggaaaaaggactaccacgccgagctcatgcgggagttggaccagaaagaggaaaatatcaagagcgttcaggaaattgccgagcagctgctcttggagaatcacccagcacgtctcactattgaagcttaccgagctgctatgcaaacccagtggagctggattctccaattatgtcaatgcgtggaacagcatatcaaggagaataccgcatatttcgaattctttaacgatgctaaagaggctacagattacctcagaaaccttaaggacgccatacagcggaagtactcttgtgatagatcctctagtattcacaagctggaggatctggttcaagagtccatggaggaaaaggaggagcttctccagtataagagcaccatcgccaacctgatggggaaggccaagaccattatccagcttaaacctcgtaattctgattgtccactaaagacctcaatcccgattaaggccatctgcgactaccggcagattgagattacaatttataaagacgatgaatgtgtcctggcaaacaacagccaccgcgcaaagtggaaggtgattagtcctactggaaatgaggctatggtgccctccgtatgttttaccgtacctcctccaaataaagaggcagtggatctggcaaaccggatcgagcagcagtatcaaaatgtcctcaccctctggcatgagagccatatcaacatgaaatctgttgtgtcgtggcactacctcattaatgaaatcgataggatccgagcaagtaatgttgcgtctattaagactatgcttccaggcgagcatcagcaggtccttagcaatctacagtcccggtttgaggactttctcgaggacagtcaggaaagtcaggtgttctccggcagcgacattacgcaactggagaaagaagttaacgtctgcaaacagtactaccaggaattgctgaaaagcgctgagcgggaggaacaggaggaatcagtctataatctgtacatctccgaggttcggaatattagactccggctggagaattgtgaagaccggcttatacggcagatccgtactccactggagagagacgatcttcacgagagtgtgttccggatcacagaacaggaaaaactgaaaaaggagctcgagcgtctcaaagacgacttaggtaccatcaccaataagtgtgaagagtttttcagccaggccgcagcgagcagctccgttccaaccctgaggagcgagctgaatgtggtgctccagaacatgaaccaggtctacagtatgtcctctacttacatagacaagctgaagaccgtcaatctggtgctgaagaatacgcaggccgctgaggccctcgtgaagctttacgagaccaagctctgtgaggaggaggctgtgatcgctgacaagaacaacatcgaaaatctgatttccacattaaagcaatggcgatcagaggtcgacgagaaacggcaagtgttccatgcactagaggacgaactgcagaaggccaaagcgatcagtgacgagatgttcaaaacatacaaggagcgggatcttgactttgattggcataaggaaaaggccgatcaactggtcgaaaggtggcagaacgtgcacgtccagatcgataatcgattgcgtgacctggagggcatcggaaaatcactaaaatattacagagacacctaccatcccctcgatgactggattcagcaggttgaaacaacccagcgtaagatccaagagaatcagcccgaaaactctaagaccctggccacccagttaaaccagcaaaaaatgctcgtgagcgagatcgagatgaagcagtccaagatggatgagtgtcagaaatacgctgagcagtatagcgctaccgtgaaagattacgaactgcagacgatgacctatagggccatggtggacagtcagcaaaaatctccagttaaacgcagacgcatgcagtccagcgcagacctgattatccaggagtttatggatctgcggacaaggtatactgcactggtgaccctgatgacacagtacataaagttcgcaggagactctctaaagagattggaggaagaggaaaagagcctcgaggaggagaagaaggagcacgtcgaaaaggcgaaagaattacagaagtgggtgtctaatatctcaaagactttaaaagacgcagaaaaagccggaaagccccctttcagtaaacagaagatttccagtgaggaaatcagcaccaaaaaggagcagctaagtgaggctttgcagaccatccagctcttcctggctaagcacggagataaaatgaccgacgaagagaggaacgaacttgagaaacaagtcaagacccttcaggagtcttacaacttattgttcagcgagagcttgaaacagctccaggaaagccagacttcaggagatgtcaaggtagaagagaaaatcgtcgcagaacggcagcaagagtacaaagagaagctgcaaggaatatgcgatctcctgacacagactgaaaatcggttgattggccatcaggaagcttttatgattggggacgggacagtggagctcaaaaaataccagagcaagcaagaggagcttcaaaaggatatgcaagggtccgcccaggccctggccgaggtcgtgaagaatacggagaattttctgaaagagaacggcgaaaagctgtcacaggaagataaagccttgattgaacagaagctcaatgaagcaaaaatcaaatgcgagcaactgaacctgaaagctgagcaaagcaagaaggagcttgataaggtcgttacaacggcaatcaaggaggaaaccgaaaaggtggctgccgtgaaacagctggaagaaagtaaaaccaaaatcgagaatctattagattggctatctaatgttgataaagatagcgagagggcgggaactaaacacaagcaggtgattgagcaaaacggcacccacttccaggagggggacggcaagagcgctataggggaggaagacgaagtaaacggaaatctcctggaaacagatgtggatggccaagtaggcactacccaggagaatctgaatcaacagtaccagaaagtgaaagctcaacatgaaaaaataattagccagcatcaggcagtgatcattgcgacccaaagtgcccaggtgcttttagaaaagcagggtcagtacttaagccccgaagaaaaagaaaagctgcagaagaatatgaaagagttgaaagtccattacgagacagccctggcagagtcagagaaaaagatgaaactgacgcactctctgcaggaggaactcgaaaaattcgatgcagactataccgagtttgaacactggctgcaacagagcgagcaggaactggaaaacctggaggccggagcggatgatatcaacggactgatgacaaagctgaaacgacaaaagagtttctctgaggacgtgattagtcacaaaggcgacttacgttatattacaattagcggcaaccgggtcctggaagccgcaaaatcttgctctaagagggatgggggaaaggtggacacatctgccacacaccgggaggttcagaggaaacttgatcacgccacagaccgattccggagtctttattccaagtgtaatgtcctaggcaataatctgaaggacctggtggacaaataccagcactacgaggacgcctcttgcggcctcctggcaggtcttcaagcatgtgaggctaccgcttcaaagcacctgagcgaacctatcgcagtcgatcccaaaaacttgcagcgccagctcgaggagactaaggccctgcagggtcagatcagtagccagcaggtagctgttgagaagctgaagaaaacagccgaggtgctgctggatgcccgagggagtctactcccagctaagaacgacattcagaaaaccctggacgacatcgtgggacgctatgaagacctgtctaagagcgtcaatgagcggaacgaaaagctccagatcaccttgacgaggtctctgtccgttcaagatggcctcgacgaaatgctcgattggatgggcaacgttgaatccagccttaaagaacaggggcaggtacccctgaacagcactgcgctgcaagacatcatctctaaaaacattatgctcgagcaggatatcgcagggaggcaatcatctatcaatgccatgaacgagaaggtaaagaagttcatggagaccacagatcccagcacggcctctagtttgcaagctaaaatgaaagacctgagtgctagattcagcgaagccagccataagcacaaggagacgctcgccaagatggaagagcttaagactaaggtcgagctgtttgaaaacctcagcgagaaactccagacatttctcgagacaaaaacccaggcccttacagaggtggatgtgcccggaaaggatgttaccgagttaagtcaatacatgcaggagtccaccagtgaattcctggagcacaaaaagcaccttgaagtcctgcacagcctgctgaaagagatcagcagccacggtctgccctccgataaggctctggtcctagagaaaacaaataatctgtcgaaaaagtttaaggagatggaggacactatcaaggaaaagaaagaagcagtaacaagctgtcaggagcagctcgatgcttttcaagttctggtgaaaagcctaaagagttggattaaggagacaactaaaaaggttccaatcgtacagccgagctttggcgcagaggaccttggtaaatctttagaggatacaaagaagttgcaggaaaagtggtcattaaagactcccgaaatccaaaaggtgaataactccggaatatctttgtgcaaccttattagtgcggtcactacacccgctaaggcaattgctgctgtgaaaagtggtggagcagtgctgaatggcgaagggacagcaaccaataccgaagaattttgggccaataaaggactaactagtattaagaaggacatgaccgatatttcacacggctacgaggaccttggtctcttgctgaaggacaagattgccgagttgaataccaaactgagtaaactccaaaaggcccaggaagaatcttccgccatgatgcagtggctgcagaaaatgaacaaaacagccacgaaatggcagcagacccccgctcctaccgataccgaggccgtgaagacccaggtggagcaaaataagagttttgaggcagaactgaagcagaacgtcaacaaggtgcaggagctcaaagacaaactgacggagctgctcgaggagaaccccgacactcccgaagcacctcgctggaagcagatgctgacggaaatagacagcaagtggcaggagctgaatcagctcaccatcgacaggcaacagaagcttgaggagtcttctaacaatctgacccagttccagacagttgaggcacagttaaagcaatggcttgtggaaaaggaacttatggtgtccgtcctgggccctctgtccattgatcccaacatgttaaacacccagagacagcaggtccagattctgctgcaggagttcgctactaggaaacctcagtacgaacagctgaccgccgctggccagggaatcctctcacgccctggagaagacccctcactccgcggtatcgtgaaggaacaattggctgccgttacccagaagtgggatagcctgacaggacagctgtcagaccgatgcgattggattgaccaagcaatagtgaagtcaacgcaataccagagcctgttgcggagcctgtctgataaactgagcgatctggacaataagctgtccagctccttggccgtttccacccacccggacgctatgaatcaacaactcgagacagcacagaaaatgaaacaagaaatacaacaggaaaagaagcagattaaggtggcccaggccttgtgtgaggacttaagcgcactcgtcaaggaggagtatctgaaagccgagctgagtagacaactcgaggggatactgaagtctttcaaagatgttgaacagaaggctgaaaatcacgttcagcacctccagagtgcctgcgccagttctcaccagttccaacagatgagccgtgactttcaggcatggttagacaccaagaaagaggaacagaacaagagtcatccaatatcagctaaactggatgtgctggagtccttaattaaggaccacaaggatttttcaaagactctgaccgcccaaagccacatgtatgaaaagaccatcgcagagggagagaaccttttgttgaaaactcaaggatccgagaaagccgctctccagctacagctcaacaccatcaagaccaattgggacacattcaacaaacaggtcaaagagagagagaataagttaaaagagtcactggaaaaggcattgaaatacaaggagcaggtcgaaacattatggccttggatagacaagtgtcagaataacctggaggaaatcaagttctgcttggaccccgctgagggagaaaattcaatagctaagttaaagtccctacagaaagagatggaccagcacttcggtatggtggagctgctgaacaacacagctaactccttgctgagtgtgtgcgaaatcgataaggaagttgtgactgacgagaacaaatccctcatccaaaaggtcgatatggttaccgaacagctccactccaaaaagttctgccttgagaatatgacccaaaagttcaaggagttccaggaggtcagcaaggagtcaaaacgtcagctgcagtgtgcaaaagaacagctcgacatacacgacagtttgggttctcaggcttattctaataagtatcttactatgctgcagacacagcagaagtctctgcaggctctgaagcaccaagtcgacctggcaaagcgactggcacaagatctcgttgtggaggcatcggactctaaggggacctccgacgtgctgctgcaggtggagaccatcgcccaagagcattcaacactgtcccaacaagtggacgagaaatgcagctttttggagactaagcttcagggcataggacactttcagaacacaattcgggaaatgttttctcagttcgccgagttcgatgatgagctggactctatggcacccgtaggtcgggacgccgaaacccttcagaaacagaaggagaccattaaagcgtttctaaaaaaattagaagctctgatggcctcgaatgataacgcaaataagacatgtaagatgatgttagccaccgaggagacctcccctgatctggtggggataaagagagacctggaggctctcagcaagcagtgcaacaagttgctggatagagctcaggctagggaggaacaggtggaggggaccattaagcgtctggaggagttttatagcaagctaaaagagttcagcatcctcctacaaaaggcagaggagcacgaagagagtcaaggcccagtcggcatggagaccgagaccatcaaccagcaactcaacatgttcaaagttttccagaaggaagaaatcgagccactccaaggtaaacagcaggacgtcaactggctcgggcagggattgatccagtctgcagctaaatctacttctacccaaggacttgagcacgatttggacgatgtgaacgcccgttggaaaaccctgaataaaaaagtggcccagcgggcagcacagttgcaggaagctttactgcattgtggaaggtttcaggatgcacttgagtcactactttcttggatggtggataccgaggagctggtggcaaaccagaagcctccatctgcagagttcaaagttgtgaaagcccagattcaggaacaaaaactgctccagcggctgctcgacgaccgaaaatcaacagtggaggttatcaaaagggaaggtgagaaaatcgcaacgaccgccgaacctgccgataaggtgaagattctcaaacaactgagcctgctggactctcggtgggaagccctgttgaataaggccgaaacacggaacaggcaactcgagggaatttccgtggtggcgcagcagtttcatgagacactggagcccttgaatgaatggctgactaccatcgagaagaggctcgttaactgtgaacctatcgggacacaggcctctaagctggaagagcagatcgcgcagcacaaagccttagaggatgacattattaaccacaacaaacaccttcaccaagctgtgagcataggtcagagcctcaaggttctcagctccagggaagacaaagatatggtgcagtctaaactagactttagtcaggtatggtacatcgaaatccaagaaaaaagtcactcccgaagcgaattgttacagcaggccctgtgtaacgcgaagatttttggagaagacgaagtggaactaatgaactggttgaacgaggtgcatgacaagctgtctaaactgagcgttcaggactactctaccgagggcctatggaaacaacagtcagagctccgggtgctccaggaggacattctccttcgcaagcagaacgttgatcaggccctgctaaatggactggagttgctgaagcaaacaaccggtgacgaagtgctgataattcaggacaagttggaggccatcaaggccagatacaaagacataacgaagctgagcacagacgtcgcaaaaacattggaacaagccctccagctggctcgaaggcttcatagcactcacgaggagttgtgcacatggctggacaaggtggaagtcgagcttctgtcttacgaaacacaagtgctgaagggcgaggaagcgagccaagctcaaatgcgcccaaaggagctcaagaaggaagcaaaaaacaacaaagccctgcttgattccctcaatgaggtttcatccgccctactcgaattagtcccatggagagccagggagggactggagaagatggtcgcagaagacaatgagcggtatcgcctggtgagcgacacaatcacgcagaaagtggaagagatcgacgctgcgatactcagaagccaacaatttgatcaggctgcagatgccgaattgtcctggatcacagaaactgagaaaaaactgatgtctctgggcgatatccgactggaacaggatcagaccagcgcgcagctccaggtgcagaagacctttacaatggagatcctacggcacaaggacataatcgacgacctggtgaaaagtggtcacaagattatgaccgcctgcagtgaagaggagaagcagtccatgaagaagaagttggacaaggtgttaaagaattacgacaccatctgccagatcaatagcgagcgctacttgcagctggaacgggcacagagccttgtgaatcagttctgggaaacttacgaggagctctggccttggctcacagagacacagagcataataagccagctgccagcaccagcccttgagtatgaaactctgaggcagcagcaggaggagcacagacaattgagagagctgatcgcggaacacaagccacacattgacaaaatgaataagacaggaccgcagttgcttgaacttagccctggcgaaggtttctccattcaggaaaaatatgtggccgcagatacactctactcacagataaaggaagatgtgaaaaaaagggccgttgcccttgatgaggctatatcacaatctactcagttccatgataaaatcgaccagatccttgaatctctggaacggatcgtcgagagactgcgtcagcctcctagtatcagcgccgaggtagaaaaaataaaagagcagatctctgaaaacaagaatgtcagcgtggacatggagaagctgcagccactgtatgagacactcaagcagcgaggtgaggagatgatcgccagatctggtgggacggacaaggacatttctgcaaaagctgtgcaggataaactcgaccaaatggtgttcatttgggagaatattcacaccctggtcgaagagagagaagcaaaactcctcgacgtaatggaactggcggaaaagttttggtgcgatcatatgtctctgatcgtgaccatcaaagacacccaggacttcatacgagaccttgaagaccctgggatcgacccatccgtggtgaagcagcagcaggaagccgcagaaacgattcgcgaagagatcgatggactccaagaggaactcgatattgtcatcaatctggggagcgaattaattgcggcatgtggagagccagataaacctatcgtgaagaagtcaattgatgagctgaatagcgcatgggattccctgaataaagcatggaaagaccgaatcgacaaactcgaagaggccatgcaagccgctgtccagtatcaggatggtttgcaggccgtgtttgattgggtggatattgctgggggaaaactggcatcaatgagcccaatcgggaccgacctggagaccgtgaaacagcagatcgaagagctgaagcagttcaaatccgaagcctatcagcaacaaatagaaatggaaagactgaaccatcaggctgagctgctcttaaagaaggtcaccgaagagtctgacaaacacaccgtgcaggacccactgatggaactcaagctcatctgggactctctcgaagagagaatcattaataggcagcacaaactcgaaggagcactactggccctgggccagtttcagcatgcactggacgagctcttggcctggctcactcatactgaggggctcctgtcagagcagaagccagtcggtggggatcccaaagccatcgaaatcgagctggcaaaacatcatgttctccagaatgacgtactggcccaccagagcaccgttgaggccgtcaataaagccggaaacgacttgattgagtccagtgctggtgaggaagcatccaacctgcagaacaagttagaggtgcttaaccagagatggcagaacgtgcttgaaaagacggaacagaggaagcaacaactcgacggcgcattgaggcaggctaaaggattccatggtgagatcgaggatttacagcagtggttgaccgataccgaacgccatctgctggcttctaagccgctcggtggcttacccgagactgccaaggaacaacttaacgtccacatggaggtctgcgccgcattcgaagccaaggaagaaacttacaagtccctcatgcaaaagggccagcagatgctggcgagatgtcctaagtcagccgagacgaacattgatcaagatataaataaccttaaggagaagtgggagagtgtggaaaccaaactgaacgaacgcaagacaaagctggaggaagctctcaacctggcaatggagtttcataattctctccaggatttcatcaattggctgacacaagccgagcagaccctcaatgttgcttcacgcccatccctgattctggacacggtgctcttccagattgatgaacataaggtctttgccaatgaggtcaattcacatcgcgagcagatcatcgagcttgataagactggcacccacctgaaatacttttctcagaagcaggacgtcgtgttaatcaagaatctcctgattagcgttcaatcccggtgggaaaaagtcgttcagcgacttgtggaacggggtcggtccttggatgacgccaggaagagagcaaagcagttccatgaagcgtggagcaagctaatggaatggctcgaggagtcagagaagtcgctggacagcgaactggagattgcaaacgaccccgataagattaagactcaactggcgcagcataaagagttccagaagtcacttggggctaagcacagtgtgtacgatacaaccaaccggacgggcagatctttaaaggagaagacgagcctggccgatgacaacctgaaactggacgatatgctgtccgagctgagggataagtgggataccatttgcggtaaaagcgttgaacgccagaacaagctggaagaggcactgttgtttagtggtcagtttaccgatgcactgcaggctcttatcgactggttatacagggtggagcctcaattggccgaagatcagcctgtgcacggtgacattgacctagtcatgaacctgattgacaatcacaaggcatttcagaaggagctgggaaaaagaacgagcagcgtgcaagccctgaagagaagcgccagagagcttattgaaggctctagagatgattccagttgggtcaaggtgcagatgcaggagctttctacccggtgggaaactgtgtgtgcgttatccatctccaagcagactcggttggaggcggctctccgtcaagctgaagaatttcattctgttgtgcacgcactgttggagtggttagccgaagccgaacagactctaaggtttcacggagtcctaccggatgacgaggacgcattgagaacactgattgaccaacacaaggagttcatgaaaaaattggaggaaaagcgggctgagctaaataaagccactactatgggcgacacagtcctggctatctgtcaccctgactctataaccaccattaagcactggattaccattatcagggctcgtttcgaagaggtattagcctgggcgaagcagcatcaacagaggctggctagcgcacttgctggattaattgctaagcaggagctcctggaagccttacttgcctggctgcagtgggccgagaccactctcacagataaagacaaggaggtgatccctcaggaaatcgaggaagtcaaggccctgattgccgagcaccagactttcatggaagaaatgacccgcaagcaacctgatgtggacaaagttaccaaaacttacaagaggcgcgctgccgaccctagttcacttcaaagtcatatccctgtcctggataagggccgagccggaagaaagagatttccagcaagctccctctaccccagcggctcccaaactcagatcgagacaaagaaccctagggtgaatctgctggtatcgaagtggcagcaggtgtggctcctggctctggagcggaggcggaagctcaatgatgcactggataggctggaggagctacgggaatttgcgaacttcgactttgacatttggagaaagaagtatatgaggtggatgaatcacaaaaagtcccgtgttatggacttcttcagaaggatagacaaagatcaagatgggaaaatcacacgccaggagtttattgacggtatcctcagttccaaatttccgacaagcaggttggagatgagcgccgtggcagatatttttgaccgcgacggagacgggtatatcgactattacgaatttgtcgccgcattacaccctaataaagatgcgtacaaaccaatcacggacgctgacaagattgaggacgaggtcacccgccaggtcgccaaatgtaaatgtgcgaagaggttccaagtggaacaaattggtgataacaaatacagattttttcttgggaaccaatttggggattctcagcagcttcggttggtccggatcctgcgtagtacagtgatggtccgtgtcgggggaggctggatggccctggacgagtttttagtgaaaaatgacccttgtagggctaagggacggaccaacatggagctgcgcgaaaaatttatcctggccgacggagcatctcaagggatggcagcttttcggccacggggaaggaggagtcgacccagttcaagaggtgcttctccaaaccgctcaacctcagtcagctcacaggccgcacaggcagcctcgccacaggtccccgctaccactactcctaagatactccacccactgacccggaactacggtaaaccttggcttaccaacagcaagatgtcaaccccttgtaaagcagcagagtgcagcgacttccctgtcccatccgctgaaggcacccccatccagggttccaagctgagactgcctgggtacctcagcggcaagggatttcactccggtgaggactccgggctcatcacaactgcagctgccagggtgaggacacaatttgccgattcgaaaaaaacacccagccgccctgggagtagggccggatccaaagctggctcccgggcttcatcaaggagaggcagcgatgcttctgatttcgatatctcggagattcagagtgtgtgctctgatgttgagacggtgccgcagacacaccgcccaaccccacgagctggctcacgcccatctacagctaagccaagcaagatccctacaccccagcgaaaatctcccgctagcaagcttgataaaagctctaagagatag

SEQ ID NO: 187318 - DNA, 15516 bp, Artificial Sequence
  derived and/or modified sequence
atgcacagcagcagctacagctacagaagcagcgacagcgtgttcagcaacaccaccagcaccagaaccagcctggacagcaacgagaacctgctgctggtgcactgcggccccaccctgatcaacagctgcatcagcttcggcagcgagagcttcgacggccacagactggagatgctgcagcagatcgccaacagagtgcagagagacagcgtgatctgcgaggacaagctgatcctggccggcaacgccctgcagagcgacagcaagagactggagagcggcgtgcagttccagaacgaggccgagatcgccggctacatcctggagtgcgagaacctgctgagacagcacgtgatcgacgtgcagatcctgatcgacggcaagtactaccaggccgaccagctggtgcagagagtggccaagctgagagacgagatcatggccctgagaaacgagtgcagcagcgtgtacagcaagggcagaatcctgaccaccgagcagaccaagctgatgatcagcggcatcacccagagcctgaacagcggcttcgcccagaccctgcaccccagcctgaccagcggcctgacccagagcctgacccccagcctgaccagcagcagcatgaccagcggcctgagcagcggcatgaccagcagactgacccccagcgtgacccccgcctacacccccggcttccccagcggcctggtgcccaacttcagcagcggcgtggagcccaacagcctgcagaccctgaagctgatgcagatcagaaagcccctgctgaagagcagcctgctggaccagaacctgaccgaggaggagatcaacatgaagttcgtgcaggacctgctgaactgggtggacgagatgcaggtgcagctggacagaaccgagtggggcagcgacctgcccagcgtggagagccacctggagaaccacaagaacgtgcacagagccatcgaggagttcgagagcagcctgaaggaggccaagatcagcgagatccagatgaccgcccccctgaagctgacctacgccgagaagctgcacagactggagagccagtacgccaagctgctgaacaccagcagaaaccaggagagacacctggacaccctgcacaacttcgtgagcagagccaccaacgagctgatctggctgaacgagaaggaggaggaggaggtggcctacgactggagcgagagaaacaccaacatcgccagaaagaaggactaccacgccgagctgatgagagagctggaccagaaggaggagaacatcaagagcgtgcaggagatcgccgagcagctgctgctggagaaccaccccgccagactgaccatcgaggcctacagagccgccatgcagacccagtggagctggatcctgcagctgtgccagtgcgtggagcagcacatcaaggagaacaccgcctacttcgagttcttcaacgacgccaaggaggccaccgactacctgagaaacctgaaggacgccatccagagaaagtacagctgcgacagaagcagcagcatccacaagctggaggacctggtgcaggagagcatggaggagaaggaggagctgctgcagtacaagagcaccatcgccaacctgatgggcaaggccaagaccatcatccagctgaagcccagaaacagcgactgccccctgaagaccagcatccccatcaaggccatctgcgactacagacagatcgagatcaccatctacaaggacgacgagtgcgtgctggccaacaacagccacagagccaagtggaaggtgatcagccccaccggcaacgaggccatggtgcccagcgtgtgcttcaccgtgcccccccccaacaaggaggccgtggacctggccaacagaatcgagcagcagtaccagaacgtgctgaccctgtggcacgagagccacatcaacatgaagagcgtggtgagctggcactacctgatcaacgagatcgacagaatcagagccagcaacgtggccagcatcaagaccatgctgcccggcgagcaccagcaggtgctgagcaacctgcagagcagattcgaggacttcctggaggacagccaggagagccaggtgttcagcggcagcgacatcacccagctggagaaggaggtgaacgtgtgcaagcagtactaccaggagctgctgaagagcgccgagagagaggagcaggaggagagcgtgtacaacctgtacatcagcgaggtgagaaacatcagactgagactggagaactgcgaggacagactgatcagacagatcagaacccccctggagagagacgacctgcacgagagcgtgttcagaatcaccgagcaggagaagctgaagaaggagctggagagactgaaggacgacctgggcaccatcaccaacaagtgcgaggagttcttcagccaggccgccgccagcagcagcgtgcccaccctgagaagcgagctgaacgtggtgctgcagaacatgaaccaggtgtacagcatgagcagcacctacatcgacaagctgaagaccgtgaacctggtgctgaagaacacccaggccgccgaggccctggtgaagctgtacgagaccaagctgtgcgaggaggaggccgtgatcgccgacaagaacaacatcgagaacctgatcagcaccctgaagcagtggagaagcgaggtggacgagaagagacaggtgttccacgccctggaggacgagctgcagaaggccaaggccatcagcgacgagatgttcaagacctacaaggagagagacctggacttcgactggcacaaggagaaggccgaccagctggtggagagatggcagaacgtgcacgtgcagatcgacaacagactgagagacctggagggcatcggcaagagcctgaagtactacagagacacctaccaccccctggacgactggatccagcaggtggagaccacccagagaaagatccaggagaaccagcccgagaacagcaagaccctggccacccagctgaaccagcagaagatgctggtgagcgagatcgagatgaagcagagcaagatggacgagtgccagaagtacgccgagcagtacagcgccaccgtgaaggactacgagctgcagaccatgacctacagagccatggtggacagccagcagaagagccccgtgaagagaagaagaatgcagagcagcgccgacctgatcatccaggagttcatggacctgagaaccagatacaccgccctggtgaccctgatgacccagtacatcaagttcgccggcgacagcctgaagagactggaggaggaggagaagagcctggaggaggagaagaaggagcacgtggagaaggccaaggagctgcagaagtgggtgagcaacatcagcaagaccctgaaggacgccgagaaggccggcaagccccccttcagcaagcagaagatcagcagcgaggagatcagcaccaagaaggagcagctgagcgaggccctgcagaccatccagctgttcctggccaagcacggcgacaagatgaccgacgaggagagaaacgagctggagaagcaggtgaagaccctgcaggagagctacaacctgctgttcagcgagagcctgaagcagctgcaggagagccagaccagcggcgacgtgaaggtggaggagaagatcgtggccgagagacagcaggagtacaaggagaagctgcagggcatctgcgacctgctgacccagaccgagaacagactgatcggccaccaggaggccttcatgatcggcgacggcaccgtggagctgaagaagtaccagagcaagcaggaggagctgcagaaggacatgcagggcagcgcccaggccctggccgaggtggtgaagaacaccgagaacttcctgaaggagaacggcgagaagctgagccaggaggacaaggccctgatcgagcagaagctgaacgaggccaagatcaagtgcgagcagctgaacctgaaggccgagcagagcaagaaggagctggacaaggtggtgaccaccgccatcaaggaggagaccgagaaggtggccgccgtgaagcagctggaggagagcaagaccaagatcgagaacctgctggactggctgagcaacgtggacaaggacagcgagagagccggcaccaagcacaagcaggtgatcgagcagaacggcacccacttccaggagggcgacggcaagagcgccatcggcgaggaggacgaggtgaacggcaacctgctggagaccgacgtggacggccaggtgggcaccacccaggagaacctgaaccagcagtaccagaaggtgaaggcccagcacgagaagatcatcagccagcaccaggccgtgatcatcgccacccagagcgcccaggtgctgctggagaagcagggccagtacctgagccccgaggagaaggagaagctgcagaagaacatgaaggagctgaaggtgcactacgagaccgccctggccgagagcgagaagaagatgaagctgacccacagcctgcaggaggagctggagaagttcgacgccgactacaccgagttcgagcactggctgcagcagagcgagcaggagctggagaacctggaggccggcgccgacgacatcaacggcctgatgaccaagctgaagagacagaagagcttcagcgaggacgtgatcagccacaagggcgacctgagatacatcaccatcagcggcaacagagtgctggaggccgccaagagctgcagcaagagagacggcggcaaggtggacaccagcgccacccacagagaggtgcagagaaagctggaccacgccaccgacagattcagaagcctgtacagcaagtgcaacgtgctgggcaacaacctgaaggacctggtggacaagtaccagcactacgaggacgccagctgcggcctgctggccggcctgcaggcctgcgaggccaccgccagcaagcacctgagcgagcccatcgccgtggaccccaagaacctgcagagacagctggaggagaccaaggccctgcagggccagatcagcagccagcaggtggccgtggagaagctgaagaagaccgccgaggtgctgctggacgccagaggcagcctgctgcccgccaagaacgacatccagaagaccctggacgacatcgtgggcagatacgaggacctgagcaagagcgtgaacgagagaaacgagaagctgcagatcaccctgaccagaagcctgagcgtgcaggacggcctggacgagatgctggactggatgggcaacgtggagagcagcctgaaggagcagggccaggtgcccctgaacagcaccgccctgcaggacatcatcagcaagaacatcatgctggagcaggacatcgccggcagacagagcagcatcaacgccatgaacgagaaggtgaagaagttcatggagaccaccgaccccagcaccgccagcagcctgcaggccaagatgaaggacctgagcgccagattcagcgaggccagccacaagcacaaggagaccctggccaagatggaggagctgaagaccaaggtggagctgttcgagaacctgagcgagaagctgcagaccttcctggagaccaagacccaggccctgaccgaggtggacgtgcccggcaaggacgtgaccgagctgagccagtacatgcaggagagcaccagcgagttcctggagcacaagaagcacctggaggtgctgcacagcctgctgaaggagatcagcagccacggcctgcccagcgacaaggccctggtgctggagaagaccaacaacctgagcaagaagttcaaggagatggaggacaccatcaaggagaagaaggaggccgtgaccagctgccaggagcagctggacgccttccaggtgctggtgaagagcctgaagagctggatcaaggagaccaccaagaaggtgcccatcgtgcagcccagcttcggcgccgaggacctgggcaagagcctggaggacaccaagaagctgcaggagaagtggagcctgaagacccccgagatccagaaggtgaacaacagcggcatcagcctgtgcaacctgatcagcgccgtgaccacccccgccaaggccatcgccgccgtgaagagcggcggcgccgtgctgaacggcgagggcaccgccaccaacaccgaggagttctgggccaacaagggcctgaccagcatcaagaaggacatgaccgacatcagccacggctacgaggacctgggcctgctgctgaaggacaagatcgccgagctgaacaccaagctgagcaagctgcagaaggcccaggaggagagcagcgccatgatgcagtggctgcagaagatgaacaagaccgccaccaagtggcagcagacccccgcccccaccgacaccgaggccgtgaagacccaggtggagcagaacaagagcttcgaggccgagctgaagcagaacgtgaacaaggtgcaggagctgaaggacaagctgaccgagctgctggaggagaaccccgacacccccgaggcccccagatggaagcagatgctgaccgagatcgacagcaagtggcaggagctgaaccagctgaccatcgacagacagcagaagctggaggagagcagcaacaacctgacccagttccagaccgtggaggcccagctgaagcagtggctggtggagaaggagctgatggtgagcgtgctgggccccctgagcatcgaccccaacatgctgaacacccagagacagcaggtgcagatcctgctgcaggagttcgccaccagaaagccccagtacgagcagctgaccgccgccggccagggcatcctgagcagacccggcgaggaccccagcctgagaggcatcgtgaaggagcagctggccgccgtgacccagaagtgggacagcctgaccggccagctgagcgacagatgcgactggatcgaccaggccatcgtgaagagcacccagtaccagagcctgctgagaagcctgagcgacaagctgagcgacctggacaacaagctgagcagcagcctggccgtgagcacccaccccgacgccatgaaccagcagctggagaccgcccagaagatgaagcaggagatccagcaggagaagaagcagatcaaggtggcccaggccctgtgcgaggacctgagcgccctggtgaaggaggagtacctgaaggccgagctgagcagacagctggagggcatcctgaagagcttcaaggacgtggagcagaaggccgagaaccacgtgcagcacctgcagagcgcctgcgccagcagccaccagttccagcagatgagcagagacttccaggcctggctggacaccaagaaggaggagcagaacaagagccaccccatcagcgccaagctggacgtgctggagagcctgatcaaggaccacaaggacttcagcaagaccctgaccgcccagagccacatgtacgagaagaccatcgccgagggcgagaacctgctgctgaagacccagggcagcgagaaggccgccctgcagctgcagctgaacaccatcaagaccaactgggacaccttcaacaagcaggtgaaggagagagagaacaagctgaaggagagcctggagaaggccctgaagtacaaggagcaggtggagaccctgtggccctggatcgacaagtgccagaacaacctggaggagatcaagttctgcctggaccccgccgagggcgagaacagcatcgccaagctgaagagcctgcagaaggagatggaccagcacttcggcatggtggagctgctgaacaacaccgccaacagcctgctgagcgtgtgcgagatcgacaaggaggtggtgaccgacgagaacaagagcctgatccagaaggtggacatggtgaccgagcagctgcacagcaagaagttctgcctggagaacatgacccagaagttcaaggagttccaggaggtgagcaaggagagcaagagacagctgcagtgcgccaaggagcagctggacatccacgacagcctgggcagccaggcctacagcaacaagtacctgaccatgctgcagacccagcagaagagcctgcaggccctgaagcaccaggtggacctggccaagagactggcccaggacctggtggtggaggccagcgacagcaagggcaccagcgacgtgctgctgcaggtggagaccatcgcccaggagcacagcaccctgagccagcaggtggacgagaagtgcagcttcctggagaccaagctgcagggcatcggccacttccagaacaccatcagagagatgttcagccagttcgccgagttcgacgacgagctggacagcatggcccccgtgggcagagacgccgagaccctgcagaagcagaaggagaccatcaaggccttcctgaagaagctggaggccctgatggccagcaacgacaacgccaacaagacctgcaagatgatgctggccaccgaggagaccagccccgacctggtgggcatcaagagagacctggaggccctgagcaagcagtgcaacaagctgctggacagagcccaggccagagaggagcaggtggagggcaccatcaagagactggaggagttctacagcaagctgaaggagttcagcatcctgctgcagaaggccgaggagcacgaggagagccagggccccgtgggcatggagaccgagaccatcaaccagcagctgaacatgttcaaggtgttccagaaggaggagatcgagcccctgcagggcaagcagcaggacgtgaactggctgggccagggcctgatccagagcgccgccaagagcaccagcacccagggcctggagcacgacctggacgacgtgaacgccagatggaagaccctgaacaagaaggtggcccagagagccgcccagctgcaggaggccctgctgcactgcggcagattccaggacgccctggagagcctgctgagctggatggtggacaccgaggagctggtggccaaccagaagccccccagcgccgagttcaaggtggtgaaggcccagatccaggagcagaagctgctgcagagactgctggacgacagaaagagcaccgtggaggtgatcaagagagagggcgagaagatcgccaccaccgccgagcccgccgacaaggtgaagatcctgaagcagctgagcctgctggacagcagatgggaggccctgctgaacaaggccgagaccagaaacagacagctggagggcatcagcgtggtggcccagcagttccacgagaccctggagcccctgaacgagtggctgaccaccatcgagaagagactggtgaactgcgagcccatcggcacccaggccagcaagctggaggagcagatcgcccagcacaaggccctggaggacgacatcatcaaccacaacaagcacctgcaccaggccgtgagcatcggccagagcctgaaggtgctgagcagcagagaggacaaggacatggtgcagagcaagctggacttcagccaggtgtggtacatcgagatccaggagaagagccacagcagaagcgagctgctgcagcaggccctgtgcaacgccaagatcttcggcgaggacgaggtggagctgatgaactggctgaacgaggtgcacgacaagctgagcaagctgagcgtgcaggactacagcaccgagggcctgtggaagcagcagagcgagctgagagtgctgcaggaggacatcctgctgagaaagcagaacgtggaccaggccctgctgaacggcctggagctgctgaagcagaccaccggcgacgaggtgctgatcatccaggacaagctggaggccatcaaggccagatacaaggacatcaccaagctgagcaccgacgtggccaagaccctggagcaggccctgcagctggccagaagactgcacagcacccacgaggagctgtgcacctggctggacaaggtggaggtggagctgctgagctacgagacccaggtgctgaagggcgaggaggccagccaggcccagatgagacccaaggagctgaagaaggaggccaagaacaacaaggccctgctggacagcctgaacgaggtgagcagcgccctgctggagctggtgccctggagagccagagagggcctggagaagatggtggccgaggacaacgagagatacagactggtgagcgacaccatcacccagaaggtggaggagatcgacgccgccatcctgagaagccagcagttcgaccaggccgccgacgccgagctgagctggatcaccgagaccgagaagaagctgatgagcctgggcgacatcagactggagcaggaccagaccagcgcccagctgcaggtgcagaagaccttcaccatggagatcctgagacacaaggacatcatcgacgacctggtgaagagcggccacaagatcatgaccgcctgcagcgaggaggagaagcagagcatgaagaagaagctggacaaggtgctgaagaactacgacaccatctgccagatcaacagcgagagatacctgcagctggagagagcccagagcctggtgaaccagttctgggagacctacgaggagctgtggccctggctgaccgagacccagagcatcatcagccagctgcccgcccccgccctggagtacgagaccctgagacagcagcaggaggagcacagacagctgagagagctgatcgccgagcacaagccccacatcgacaagatgaacaagaccggcccccagctgctggagctgagccccggcgagggcttcagcatccaggagaagtacgtggccgccgacaccctgtacagccagatcaaggaggacgtgaagaagagagccgtggccctggacgaggccatcagccagagcacccagttccacgacaagatcgaccagatcctggagagcctggagagaatcgtggagagactgagacagccccccagcatcagcgccgaggtggagaagatcaaggagcagatcagcgagaacaagaacgtgagcgtggacatggagaagctgcagcccctgtacgagaccctgaagcagagaggcgaggagatgatcgccagaagcggcggcaccgacaaggacatcagcgccaaggccgtgcaggacaagctggaccagatggtgttcatctgggagaacatccacaccctggtggaggagagagaggccaagctgctggacgtgatggagctggccgagaagttctggtgcgaccacatgagcctgatcgtgaccatcaaggacacccaggacttcatcagagacctggaggaccccggcatcgaccccagcgtggtgaagcagcagcaggaggccgccgagaccatcagagaggagatcgacggcctgcaggaggagctggacatcgtgatcaacctgggcagcgagctgatcgccgcctgcggcgagcccgacaagcccatcgtgaagaagagcatcgacgagctgaacagcgcctgggacagcctgaacaaggcctggaaggacagaatcgacaagctggaggaggccatgcaggccgccgtgcagtaccaggacggcctgcaggccgtgttcgactgggtggacatcgccggcggcaagctggccagcatgagccccatcggcaccgacctggagaccgtgaagcagcagatcgaggagctgaagcagttcaagagcgaggcctaccagcagcagatcgagatggagagactgaaccaccaggccgagctgctgctgaagaaggtgaccgaggagagcgacaagcacaccgtgcaggaccccctgatggagctgaagctgatctgggacagcctggaggagagaatcatcaacagacagcacaagctggagggcgccctgctggccctgggccagttccagcacgccctggacgagctgctggcctggctgacccacaccgagggcctgctgagcgagcagaagcccgtgggcggcgaccccaaggccatcgagatcgagctggccaagcaccacgtgctgcagaacgacgtgctggcccaccagagcaccgtggaggccgtgaacaaggccggcaacgacctgatcgagagcagcgccggcgaggaggccagcaacctgcagaacaagctggaggtgctgaaccagagatggcagaacgtgctggagaagaccgagcagagaaagcagcagctggacggcgccctgagacaggccaagggcttccacggcgagatcgaggacctgcagcagtggctgaccgacaccgagagacacctgctggccagcaagcccctgggcggcctgcccgagaccgccaaggagcagctgaacgtgcacatggaggtgtgcgccgccttcgaggccaaggaggagacctacaagagcctgatgcagaagggccagcagatgctggccagatgccccaagagcgccgagaccaacatcgaccaggacatcaacaacctgaaggagaagtgggagagcgtggagaccaagctgaacgagagaaagaccaagctggaggaggccctgaacctggccatggagttccacaacagcctgcaggacttcatcaactggctgacccaggccgagcagaccctgaacgtggccagcagacccagcctgatcctggacaccgtgctgttccagatcgacgagcacaaggtgttcgccaacgaggtgaacagccacagagagcagatcatcgagctggacaagaccggcacccacctgaagtacttcagccagaagcaggacgtggtgctgatcaagaacctgctgatcagcgtgcagagcagatgggagaaggtggtgcagagactggtggagagaggcagaagcctggacgacgccagaaagagagccaagcagttccacgaggcctggagcaagctgatggagtggctggaggagagcgagaagagcctggacagcgagctggagatcgccaacgaccccgacaagatcaagacccagctggcccagcacaaggagttccagaagagcctgggcgccaagcacagcgtgtacgacaccaccaacagaaccggcagaagcctgaaggagaagaccagcctggccgacgacaacctgaagctggacgacatgctgagcgagctgagagacaagtgggacaccatctgcggcaagagcgtggagagacagaacaagctggaggaggccctgctgttcagcggccagttcaccgacgccctgcaggccctgatcgactggctgtacagagtggagccccagctggccgaggaccagcccgtgcacggcgacatcgacctggtgatgaacctgatcgacaaccacaaggccttccagaaggagctgggcaagagaaccagcagcgtgcaggccctgaagagaagcgccagagagctgatcgagggcagcagagacgacagcagctgggtgaaggtgcagatgcaggagctgagcaccagatgggagaccgtgtgcgccctgagcatcagcaagcagaccagactggaggccgccctgagacaggccgaggagttccacagcgtggtgcacgccctgctggagtggctggccgaggccgagcagaccctgagattccacggcgtgctgcccgacgacgaggacgccctgagaaccctgatcgaccagcacaaggagttcatgaagaagctggaggagaagagagccgagctgaacaaggccaccaccatgggcgacaccgtgctggccatctgccaccccgacagcatcaccaccatcaagcactggatcaccatcatcagagccagattcgaggaggtgctggcctgggccaagcagcaccagcagagactggccagcgccctggccggcctgatcgccaagcaggagctgctggaggccctgctggcctggctgcagtgggccgagaccaccctgaccgacaaggacaaggaggtgatcccccaggagatcgaggaggtgaaggccctgatcgccgagcaccagaccttcatggaggagatgaccagaaagcagcccgacgtggacaaggtgaccaagacctacaagagaagagccgccgaccccagcagcctgcagagccacatccccgtgctggacaagggcagagccggcagaaagagattccccgccagcagcctgtaccccagcggcagccagacccagatcgagaccaagaaccccagagtgaacctgctggtgagcaagtggcagcaggtgtggctgctggccctggagagaagaagaaagctgaacgacgccctggacagactggaggagctgagagagttcgccaacttcgacttcgacatctggagaaagaagtacatgagatggatgaaccacaagaagagcagagtgatggacttcttcagaagaatcgacaaggaccaggacggcaagatcaccagacaggagttcatcgacggcatcctgagcagcaagttccccaccagcagactggagatgagcgccgtggccgacatcttcgacagagacggcgacggctacatcgactactacgagttcgtggccgccctgcaccccaacaaggacgcctacaagcccatcaccgacgccgacaagatcgaggacgaggtgaccagacaggtggccaagtgcaagtgcgccaagagattccaggtggagcagatcggcgacaacaagtacagattcttcctgggcaaccagttcggcgacagccagcagctgagactggtgagaatcctgagaagcaccgtgatggtgagagtgggcggcggctggatggccctggacgagttcctggtgaagaacgacccctgcagagccaagggcagaaccaacatggagctgagagagaagttcatcctggccgacggcgccagccagggcatggccgccttcagacccagaggcagaagaagcagacccagcagcagaggcgccagccccaacagaagcaccagcgtgagcagccaggccgcccaggccgccagcccccaggtgcccgccaccaccacccccaagatcctgcaccccctgaccagaaactacggcaagccctggctgaccaacagcaagatgagcaccccctgcaaggccgccgagtgcagcgacttccccgtgcccagcgccgagggcacccccatccagggcagcaagctgagactgcccggctacctgagcggcaagggcttccacagcggcgaggacagcggcctgatcaccaccgccgccgccagagtgagaacccagttcgccgacagcaagaagacccccagcagacccggcagcagagccggcagcaaggccggcagcagagccagcagcagaagaggcagcgacgccagcgacttcgacatcagcgagatccagagcgtgtgcagcgacgtggagaccgtgccccagacccacagacccacccccagagccggcagcagacccagcaccgccaagcccagcaagatccccaccccccagagaaagagccccgccagcaagctggacaagagcagcaagagatag

SEQ ID NO: 187319 - DNA, 16742 bp, Artificial Sequence
  derived and/or modified sequence
atggctttaggctagattcttttgaatagttatcagcatattatttgctgtgtgttgcatatgcatgttgaagcatatttaaggagccactaaaagctgtaatattcagctgccacttttcaccgttagaagtagagctttttccagacctcctaccttttagtctactttgaaaggtgaaagaaagaacatcgtttcaggaataaaaatgcacagtagtagttatagttaccgtagcagtgattctgtgtttagtaacactaccagcactcgaaccagtcttgattcaaatgaaaatcttctcttggttcattgtggtccaacactgatcaactcttgcattagcttcggcagtgaatcctttgatggacacaggttagaaatgttgcaacagattgccaacagagttcagagggacagtgtcatctgtgaagacaaactgattcttgctggaaatgctcttcagtctgattctaaaagattagaatcaggagtgcagtttcagaatgaagcagaaattgctgggtatatacttgaatgtgagaaccttttacgccagcatgtaattgatgtacagattcttattgatggaaaatactaccaggcagatcaattggtacagagggttgcaaaactgcgtgacgaaattatggccttaaggaacgaatgttcttctgtgtacagcaaaggacgcatactgacaacagaacagacaaagctcatgatatcaggaatcactcaaagtttaaactcaggatttgcacagaccttacaccctagtctgacctcagggctgacccagagtttaacaccttccctaacctcttctagtatgacttctggcctgtcatcagggatgacttcccgcctgactccatctgtcactccagcttatacacctggtttcccatcaggattagttccaaatttcagttcaggagtagagccaaattcattgcaaactttgaagttgatgcagatccgaaaaccccttctaaagtcttctttgctggatcaaaatttaacagaagaagaaatcaatatgaaatttgttcaggatcttttgaattgggttgatgagatgcaggtacaactggaccgcactgagtggggctcagatttgccaagtgttgaaagccatttagaaaatcataaaaatgttcatagagctattgaagaatttgaatctagtctcaaagaagctaaaatcagtgagattcaaatgacagcacctcttaaactgacttatgcagaaaagttgcacagattagagagtcagtatgcaaaactcttgaatacatccaggaatcaagaacggcaccttgatacactccataattttgtaagtcgtgcgactaatgaacttatttggttgaatgaaaaagaagaggaggaagttgcttatgactggagtgagagaaacaccaacatagctaggaaaaaagattatcatgctgaattaatgagagaacttgatcaaaaggaagaaaatattaaatcagttcaggagatagcagagcagctacttctagaaaatcatccagcccggttaactattgaggcctacagagcggcaatgcagacgcagtggagctggatcttacagctctgccagtgtgtggagcagcacataaaggagaacacagcgtatttcgagtttttcaatgatgccaaagaagctactgattacttaaggaatctaaaagatgccattcagcggaagtacagctgtgatagatcaagcagcattcacaagctagaagaccttgttcaggaatcaatggaagagaaagaagaacttctgcagtacaaaagcactatagcaaacctaatgggaaaagcaaaaacaataattcaactgaagccaaggaattctgactgtccactcaaaacttctattccgatcaaagctatctgtgactacagacaaattgagataaccatttacaaagacgatgaatgtgttttggcgaataactctcatcgtgctaaatggaaggtcattagtcctactgggaatgaggctatggtcccatctgtgtgcttcaccgttcctccaccaaacaaagaagcggtggaccttgccaacagaattgagcaacagtatcagaatgtcctgactctttggcatgagtctcacataaacatgaagagtgtagtatcctggcattatctcatcaatgaaattgatagaattcgagctagcaatgtggcttcaataaagacaatgctacctggtgaacatcagcaagttctaagtaatctacaatctcgttttgaagattttctggaagatagccaggaatcccaagtcttttcaggctcagatataacacaactggaaaaggaggttaatgtatgtaagcagtattatcaagaacttcttaaatctgcagaaagagaggagcaagaggaatcagtttataatctctacatctctgaagttcgaaacattagacttcggttagagaactgtgaagatcggctgattagacagattcgaactcccctggaaagagatgatttgcatgaaagtgtgttcagaatcacagaacaggagaaactaaagaaagagctggaacgacttaaagatgatttgggaacaatcacaaataagtgtgaggagtttttcagtcaagcagcagcctcttcatcagtccctaccctacgatcagagcttaatgtggtccttcagaacatgaaccaagtctattctatgtcttccacttacatagataagttgaaaactgttaacttggtgttaaaaaacactcaagctgcagaagccctcgtaaaactctatgaaactaaactgtgtgaagaagaagcagttatagctgacaagaataatattgagaatctaataagtactttaaagcaatggagatctgaagtagatgaaaagagacaggtattccatgccttagaggatgagttgcagaaagctaaagccatcagtgatgaaatgtttaaaacgtataaagaacgggaccttgattttgactggcacaaagaaaaagcagatcaattagttgaaaggtggcaaaatgttcatgtgcagattgacaacaggttacgggacttagagggcattggcaaatcactgaagtactacagagacacttaccatcctttagatgattggatccagcaggttgaaactactcagagaaagattcaggaaaatcagcctgaaaatagtaaaaccctagccacacagttgaatcaacagaagatgctggtgtccgaaatagaaatgaaacagagcaaaatggacgagtgtcaaaaatatgcagaacagtactcagctacagtgaaggactatgaattacaaacaatgacctaccgggccatggtagattcacaacaaaaatctccagtgaaacgccgaagaatgcagagttcagcagatctcattattcaagagttcatggacctaaggactcgatatactgccctggtcactctcatgacacaatatattaaatttgctggtgattcattgaagaggctggaagaggaggagaagtcactggaagaagaaaagaaagaacatgttgaaaaagccaaagaattgcaaaaatgggtatcaaatatcagcaagacattgaaagatgcagagaaggctggaaaacctcccttctctaagcaaaagatttccagtgaggaaatatcaaccaagaaggaacaattatcggaagcacttcaaactatacagctttttttggcaaaacatggagacaaaatgacagatgaagaaagaaatgaattggaaaaacaagtgaaaactcttcaggaaagttataatttattattcagtgaatctctgaaacagctacaagaatcacaaacctcaggagatgtaaaggtagaggagaagattgtagcagagcgtcagcaggagtataaagagaaactccaagggatatgtgatcttcttacccaaactgaaaaccgcctaattggtcaccaagaagccttcatgattggagatggcacagttgagttaaagaaatatcagtccaagcaagaggaattacagaaagatatgcaaggaagtgcacaggcattggctgaagtagtgaaaaacacagagaacttcttaaaagagaatggtgaaaagctgtcacaggaagataaggctttgattgaacagaaacttaatgaagctaagataaagtgtgaacagcttaatttaaaagcagaacagtctaaaaaggagctggataaagttgtgacaacagcaatcaaggaagaaactgaaaaggtagcagcagtgaagcagctggaagagagcaaaaccaaaatagaaaaccttttggactggttgtcaaatgttgacaaagactcagaaagggcagggacaaaacacaaacaggtaatcgaacagaacgggacccattttcaagaaggtgatggcaagtcagcaattggagaagaggatgaagttaatggtaacctgttggagactgatgttgatgggcaagttggaaccactcaggagaatctgaatcagcaatatcagaaagttaaggcccaacacgagaagatcatctctcagcaccaagcagtgatcatagccactcagtctgcacaagtgttgcttgagaaacagggtcagtatctctctcctgaagaaaaagagaaactgcaaaagaacatgaaggaactgaaagtgcattatgaaactgcactggctgagtcagagaagaaaatgaagttaactcactctctgcaggaagaattagaaaagtttgatgctgactataccgagtttgagcactggctacagcagtcagaacaagaacttgaaaacctggaggcaggtgcagatgacatcaatggtttaatgaccaaattgaagaggcagaagagtttctcagaagacgttatttctcacaaaggtgacttgagatacatcacaatttctggaaacagagtgttggaagctgccaaatcttgcagcaagagagacggtggcaaggttgatacttctgcaacccacagagaagtgcagcgcaagttggatcatgctactgatcggttcaggtctctctactctaagtgcaatgttcttggaaataatcttaaagatctggtggataaatatcaacactatgaagatgcttcatgtggacttcttgctggactccaggcctgtgaggccacagcgagcaaacacttatctgaacctattgcggtggaccccaaaaatcttcaaaggcaattagaagagaccaaggctttgcaaggacagatatcaagtcagcaggttgctgtagagaaactgaagaaaacggctgaagtgcttttagatgccaggggatctttacttccagccaagaatgatatccagaaaacacttgatgacattgttgggagatatgaggatctgtccaagtctgttaatgaacgaaatgaaaaactccagataaccttgacccgttcactgagtgtgcaggatggcttggatgaaatgctggactggatgggaaatgtggaaagttctctgaaagaacaaggtcaagtgcctttaaactctactgctcttcaggatattatcagtaaaaacattatgttggaacaggatattgcaggtcgtcagagcagtataaatgccatgaatgaaaaagtgaagaaatttatggaaacaacagatccatccactgcatcctcactgcaagccaaaatgaaagacttgtctgctcggttttcagaagcaagtcataaacacaaagaaactcttgccaaaatggaggagctaaaaaccaaagtagaactgtttgagaacctctcagaaaagctccagacatttttagaaacaaaaactcaggctcttactgaagtagatgtgccaggaaaagatgttactgaattgtctcagtatatgcaggaatcaacttctgaatttttagaacacaagaaacatcttgaagttttgcatagtctcttgaaggagatatccagccatggcttaccaagtgataaggctttggtccttgaaaaaacaaataatttgtcaaagaaattcaaggaaatggaggataccatcaaagaaaaaaaagaagctgtaacttcttgtcaagaacagttggatgctttccaagttcttgttaaatcattgaagtcatggataaaagaaacaacaaaaaaagttcccattgtacagccttcttttggtgcagaggatttaggaaaatctttggaagacactaagaaattacaagaaaagtggagtttaaaaacaccagagattcagaaagtaaacaacagtgggatctcactatgtaacttaataagtgctgtgaccacccctgcaaaggcaatagcagcagttaaatcaggtggagcagtattaaatggtgaaggaacagccacaaatactgaggaattttgggcaaataaaggtttaacatccattaaaaaggacatgactgacataagtcatggttatgaagatcttggcctcttactcaaggacaaaatagcggaactgaacactaaactctccaaattgcaaaaggctcaggaagaatcaagtgcaatgatgcagtggttacagaaaatgaacaaaactgcaacaaaatggcagcagacacctgcacctacagatactgaagctgtgaagactcaagttgagcagaataagtcgtttgaggcagaactgaagcagaatgtaaacaaagtacaggagttgaaagacaaattgacagagctgttggaggagaacccagatactcctgaggcccccagatggaaacagatgttgacagaaatagattctaagtggcaagaactcaatcaattaacaattgatagacaacaaaaactggaagaatcctccaataatctaacccagttccagactgtagaggcccaattgaaacagtggcttgtggaaaaagaacttatggtcagtgttcttgggcccttgtcaattgacccaaatatgctaaacacacaaaggcagcaggtgcagattttgctgcaagaattcgccactcggaaacctcaatatgaacagctgacagcagctggtcagggcattctgagcaggcctggagaagacccttctttacgtgggattgtgaaagagcaactggcagctgtgacccaaaaatgggatagcctaacagggcaattgagtgacagatgtgactggattgaccaagccattgttaaaagcacacagtatcaaagcctgctgagaagcctttctgataaactgagtgacttggataataaactcagcagcagtctggctgtgagcacgcaccctgatgctatgaaccaacagttggaaacagcccaaaaaatgaagcaggagatacagcaggaaaagaagcagataaaagtggcccaggcactctgtgaggatttgtcagcactggttaaagaagagtacttgaaagcagaacttagtaggcaactagaaggcatcttaaaatcatttaaggatgttgaacagaaagcagagaatcatgtccagcaccttcagtcggcctgtgcaagctctcatcaatttcagcaaatgtctagagattttcaggcttggctggatacaaagaaagaagagcaaaacaaatctcatccaatatctgccaaactcgatgtcttggagtcattaattaaagatcataaagactttagtaaaactttgaccgctcagtctcatatgtatgaaaaaaccattgcagaaggtgaaaatctgttattaaaaacacaagggtctgagaaggcagccttacagttacagcttaatacaattaaaaccaattgggatacatttaataagcaggtgaaagaaagagaaaacaagttaaaagagtcattggaaaaagcccttaagtataaagagcaagtagagactctctggccatggatagacaaatgccaaaacaacctggaggaaataaaattttgcttggatcctgctgaaggagagaattctattgccaagttaaagtctctgcagaaggaaatggaccaacactttggtatggtagaattactgaacaacacagccaatagcttgctcagtgtctgtgagatagataaagaagttgttacagatgagaataagtcactgatccagaaggtggacatggtcactgaacaacttcacagtaagaaattctgtctggagaacatgactcagaagtttaaagaatttcaagaagtttccaaagaatctaaaaggcagcttcagtgtgcaaaggagcagctagatatccatgattcgctgggatcccaggcttacagtaacaaatacctgaccatgttgcaaactcagcagaaatcacttcaggccttgaagcatcaggtagatttggctaaaagacttgcacaggaccttgtggtagaggcctcagactcaaagggaacctctgatgttttattacaagtggaaaccatagctcaagagcatagtacactaagtcagcaggttgatgaaaagtgttctttcttagaaaccaagcttcagggcattgggcatttccagaataccattcgagaaatgttttctcagttcgcagagtttgatgatgaactggatagcatggctccagtggggagagatgcagaaacattgcaaaagcaaaaggaaactataaaagcctttctaaagaaactagaagccctcatggcaagcaatgacaatgccaataaaacctgcaagatgatgttagccacagaagaaacctctcctgaccttgttggaatcaaaagggacttggaggccttaagcaaacaatgcaacaagttactggaccgagcccaagccagagaagagcaggttgaagggacaattaagcgccttgaagaattttacagcaaattgaaagaattttctattctgctccagaaagccgaagaacatgaagagtcacaaggtcctgttggtatggaaacggagacaattaatcagcagcttaacatgttcaaggtattccagaaagaagagattgaacccttgcaaggtaaacagcaagatgtaaactggttaggtcaaggccttattcagagtgctgccaaaagcactagcactcagggcttggagcatgacctggatgatgtcaatgcacggtggaagactctcaataagaaggtggctcagcgagcagcccagctgcaggaggccttgctgcactgtgggaggttccaggatgccctggagtccctgctcagctggatggtggacactgaggagcttgtggccaatcagaagcccccgtcggctgagttcaaagtggtaaaggcccagatacaagaacaaaagcttctccagagattgttggatgaccgaaaatctacggtggaggtaatcaaacgagaaggagaaaaaattgctacaacagcagagcccgcagataaagtgaagattttgaaacagctcagtctcttggatagcagatgggaggcattgcttaataaagctgaaacaaggaatcgtcagttggaaggtatctcggtggtagcacagcaatttcatgaaaccttagaaccactgaacgagtggcttacaaccatagaaaagaggctggtgaattgtgaacccataggaacccaagcatctaaacttgaggaacaaattgcacagcacaaagccttagaagatgacatcatcaatcacaataaacatttacaccaggctgttagcattggccagtccttaaaggttttgagctccagggaggataaagatatggtgcagagtaaattagacttctctcaagtatggtacattgagattcaagagaaaagtcacagcaggtctgagctcctccagcaggccttatgtaatgctaagatttttggggaagatgaagttgaactgatgaactggctgaatgaagtgcatgacaaactgagcaagctctcagtccaggattacagcactgaggggctatggaagcagcagtctgaacttcgggttctgcaagaggacatcttactcaggaaacaaaatgtagatcaggctttactaaatggtttagaactacttaaacaaaccacaggtgatgaagttttaataattcaagataaattggaagccattaaagcaaggtacaaagacattactaaactgagcactgatgtggccaagactctggaacaggcgctgcagcttgcaaggcggctgcactccacacacgaagagctgtgtacctggctggacaaagtggaggtggaattactttcatatgaaactcaggttctgaaaggagaagaagcaagtcaagcacaaatgagaccaaaggaactgaaaaaggaagctaagaacaacaaagccttactggactcccttaatgaagtgagcagtgctttgctggaactggtaccatggagggcaagagaaggacttgagaaaatggtagctgaggacaatgagcgctaccgattagtgagcgacaccatcactcagaaggtggaggagatcgatgcagccattctgcgatcacagcagtttgaccaagcagctgatgctgagttatcctggattactgaaacagaaaaaaaattgatgtctctgggtgacatcaggcttgagcaagaccagacttctgctcagcttcaagttcaaaagacattcaccatggagattttgagacacaaggatattattgatgaccttgttaaatctgggcataaaatcatgaccgcatgcagtgaagaggaaaagcaatcaatgaagaaaaaactggacaaggtactgaagaactatgataccatctgccagattaattcagaaaggtatctgcagctggaacgggcacagtccctggttaaccaattctgggaaacatatgaagaactttggccatggctgacagaaacacaatcaatcatctctcagcttcccgccccagcccttgaatatgaaactctaaggcagcagcaggaagaacatcggcaactgcgtgagttgatagctgaacacaagcctcatatagataagatgaacaaaactgggccacagttactggaattgagccctggggaaggcttttctatccaagagaagtatgtggcagccgacaccctttacagtcaaattaaagaagatgtcaaaaagcgtgctgtggcactggatgaagccatttctcaatcaactcagttccatgacaagatagatcagatccttgagagcctggaacgcatcgtggaacgtctgaggcagccaccctctatctctgcagaggttgagaagatcaaggaacagatcagtgaaaataagaatgtgtcagtagacatggaaaagctacagccgttgtatgaaactcttaaacagaggggagaggaaatgattgctagatctggggggactgataaagacatatctgccaaagctgttcaggataagcttgaccaaatggttttcatttgggagaacatacacacactggtggaagagagggaagccaaactactggatgtgatggagctagcagaaaagttctggtgtgatcacatgtcattgatagttaccattaaagatactcaagatttcatccgggacctggaagatcctggaattgatccttcagtagtaaaacaacagcaagaagcagcagagaccataagggaagaaatagatggactacaggaggagctggatatagttattaacctaggttctgaactcattgcggcatgtggggagcctgataaacccattgtcaagaagagtatagatgagttaaattcagcatgggattctctaaataaagcttggaaagaccggattgacaaacttgaggaggcaatgcaggctgccgttcagtaccaggatggactgcaggcggtatttgactgggtagatattgcaggtggtaaattagcttcaatgtctccaattggaacagatctcgaaactgtcaagcagcagattgaagagctaaagcaatttaagtctgaggcctatcaacagcagatagaaatggaaagactgaatcatcaagcagagcttttgctaaagaaagtaacagaagagagtgacaaacacactgttcaagacccattaatggaactgaaattgatatgggatagcctggaggagagaatcatcaacagacagcataaactggagggtgctctattagccttgggtcagttccaacatgccctggatgagctcctggcatggctgacacacaccgagggcttgctaagtgagcagaaacctgttggaggagaccctaaagccattgaaattgaacttgccaagcatcatgtgctccaaaatgatgtattagcccatcagtccacagtggaagccgttaataaagcaggaaatgatctaattgaatcaagtgcaggagaagaagcaagcaaccttcagaacaagctagaggttttaaatcaacgctggcaaaatgttttggaaaaaacagaacaaaggaagcagcagctggatggtgccttgcgccaggccaaagggttccatggcgaaattgaggatttgcagcagtggctgactgacacggagcgtcatctgttggcatctaaaccgctgggaggtttaccggaaacagccaaggagcagcttaatgtccatatggaagtctgtgctgcctttgaagctaaagaagaaacatataagagtctgatgcagaaaggccagcagatgcttgcaagatgcccaaaatctgcagagacaaatattgaccaagacataaataacttgaaagaaaaatgggaatcggtggaaaccaaactcaatgaaaggaaaactaaactggaagaggctctcaacttggcaatggagttccacaattctctccaagacttcatcaactggcttactcaggctgaacagaccctaaatgtagcttctcggccaagtctcatcttggacacagtcttatttcaaattgacgaacacaaggtttttgccaatgaagtaaattctcatcgtgagcagataatagagctggacaaaactggaacccacctaaaatattttagtcagaaacaagatgttgttctaatcaagaatctacttatcagtgtacaaagtcgatgggaaaaagtggttcaacggttggtagagagaggaagatctttggatgatgcaaggaagagagccaagcagttccatgaagcttggagtaaacttatggagtggctagaagagtcagaaaagtctttggattctgaactggaaatcgcaaatgatccagacaaaataaaaacacaacttgcacaacataaggagtttcagaaatcactcggagccaagcattctgtctacgacaccaccaacaggactggacgttctctgaaggagaaaacctccctggctgatgacaacctgaaactggatgacatgctgagtgaactcagagacaaatgggataccatatgtggaaaatctgtggaaagacaaaacaaattggaggaagccctgttattttctggacaattcacagatgccctacaggctctcattgattggttatatagagttgaaccccagctggcagaagaccagcctgttcatggagacattgatttggtgatgaatctgatcgataatcacaaggccttccaaaaagagttggggaagaggaccagcagtgtgcaggccctgaagcgctcagcccgagaactcatagaaggcagtcgggatgactcctcctgggtcaaggtccagatgcaggaattaagcacacgctgggagaccgtgtgtgcactttctatatcaaagcaaacacggttagaagcagccctgcgtcaggcagaggaattccactcggtggtacatgccctcttggagtggctggctgaggcggagcaaaccctgcgtttccatggtgtcctcccagatgatgaggatgctctccggactctcattgatcagcataaagaattcatgaagaaactggaagaaaagagagctgaactaaataaagccaccactatgggcgacaccgttttggctatctgccaccccgactccatcactaccattaagcactggataacaatcatccgggcgaggtttgaggaggtgctggcctgggcaaagcaacatcagcagagattagcaagtgctctggctgggcttattgccaaacaggaattgttggaagctttgctggcttggttgcaatgggctgaaactacacttactgataaggataaagaagtcatcccccaggagatcgaagaggtgaaagcactcattgcagaacaccagaccttcatggaggaaatgaccagaaaacagcctgatgttgataaagtaacgaagacctataagaggagagctgctgatccttcctcattacaatcccatattccagtcttggataagggacgagcaggaagaaaacgctttccagcatcaagcttgtatccctctgggtcacagacacaaattgaaaccaaaaatcctagggtaaacttactggtgagcaaatggcagcaagtctggctcctggcgttggaaagaaggaggaaactcaatgatgccttggacagactagaggagctgagggaatttgctaactttgattttgatatctggcgcaaaaaatacatgcgatggatgaatcacaagaaatctcgagtgatggacttcttcaggagaattgataaagaccaggatgggaaaataacgcggcaggaatttattgatggaattctttcctcaaagtttccaaccagtcgcttggagatgagcgcagttgcagacatctttgacagagatggcgatggatatattgactactatgaatttgtagcagcccttcacccaaataaagatgcatataaacctatcacagatgccgacaaaatcgaagatgaggtgacaaggcaggtagctaagtgtaaatgtgcaaagcgatttcaagttgagcagattggtgataataaatacaggttcttcctgggaaatcagtttggagactcccagcaactgcgactggtccggatcctgcggagtactgtgatggttcgtgttggaggtggatggatggcacttgatgagttcttagtgaaaaatgatccttgcagggccaaaggaaggacaaacatggaactgcgtgagaagttcattttagcagatggtgccagccagggtatggctgctttccgaccccgaggccgaagatcccggccatcatcacgaggcgcttcacccaacagatccacttctgtgtccagtcaggctgcgcaggcggcctccccacaggtccctgccaccaccacacccaagattctccatcctttaacacgcaattatggtaaaccatggttgacaaacagcaaaatgtcaactccttgtaaagcagcagagtgctcagactttcccgtgccatctgcagagggaacgccaatacaaggaagcaagcttcgacttccaggatatttatcagggaaaggcttccactctggggaggacagtggcttgataacaactgcagctgccagagtccgaacacagtttgctgattccaagaagactcccagccgaccaggaagtcgagctggaagcaaagctggcagcagggccagcagccgccgaggcagtgatgcatcagactttgacatttcagaaatccagtccgtgtgctcagatgtggaaactgtcccccagacacacagacctacaccccgagcaggttctcggccatccacagcgaagccttcaaaaatccccacgccccagaggaaatcacctgccagcaaattggacaagtcctcaaagagatagtgcaattggttctaccaaggcccttccttgagcatttattatttaagtttgaacgatgtaaaatatggtgtagaaattcttgtgaaatattgcaagaggcgagtttaaaattctgcagatggccttatttgtgtatttgtctttttattttatctgtataattttttttgtcagatattctggggttaaagtcacatcatatgtgaggaggaaaagtttaacatgaactaacatttctgcactgtaacgtgccgggcacacactaaactcagttactgtacctacaggtaagtctacatcctctctgacagccacagcactacatcaatccctgacgttagggatacctcatgacattttcctgtttttatggaaactctgagaagctgaatgatacatgcaggggatattttttgagatgatttaaatgtaaaccaaaagatggaagacaaaaagacaaacacacccacacgcagtctttgcagtatctgacagagaactcacaggaagttacttcaagcacttgccagtactatgatattcaagtaccttgcagcatttctctgccattgctttcaatgaggccagaggcatcctggatattagacctattatactgtaagaatataagtataaagtgcgttcatatacatgtgaggttttcttttgcttgagtggacagtagcacctgtatcattgaactcattttgtatcagagcaattttgcttgcagaaagctatgaaataaaacacgtcccttaactgcattgctatggaattaattttttttccccagggaaaactagtgtatttttttatgagcaatatcaatttggagtgaccaaaagatacttaaaaatgggtttattttgatttctcatctgaaataatcatgttctggtattatatctatctatatttaataaatatatacattttaatttattatgtgtactcacatactatagaaagatattagtatgcatttaataaaacatattcacttgaatatatggaa

SEQ ID NO: 187320 - protein, 887 aa, Artificial Sequence
  derived and/or modified sequence
MMSDEKNLGVSQKLVSPSRSTSSCSSKQGSRQDSWEVVEGLRGEMNYTQEPPVQKGFLLKKRKWPLKGWHKRFFYLDKGILKYAKSQTDIEREKLHGCIDVGLSVMSVKKSSKCIDLDTEEHIYHLKVKSEEVFDEWVSKLRHHRMYRQNEIAMFPHEVNHFFSGSTITDSSSGVFDSISSRKRSSISKQNLFQTGSNVSFSCGGETRVPLWLQSSEDMEKCSKDLAHCHAYLVEMSQLLQSMDVLHRTYSAPAINAIQGGSFESPKKEKRSHRRWRSRAIGKDAKGTLQVPKPFSGPVRLHSSNPNLSTLDFGEEKNYSDGSETSSEFSKMQEDLCHIAHKVYFTLRSAFNIMSAEREKLKQLMEQDASSSPSAQVIGLKNALSSALAQNTDLKERLRRIHAESLLLDSPAVAKSGDNLAEENSRDENRALVHQLSNESRLSITDSLSEFFDAQEVLLSPSSSENEISDDDSYVSDISDNLSLDNLSNDLDNERQTLGPVLDSGREAKSRRRTCLPAPCPSSSNISLWNILRNNIGKDLSKVAMPVELNEPLNTLQRLCEELEYSELLDKAAQIPSPLERMVYVAAFAISAYASSYYRAGSKPFNPVLGETYECIREDKGFQFFSEQVSHHPPISACHAESRNFVFWQDVRWKNKFWGKSMEIVPIGTTHVTLPVFGDHFEWNKVTSCIHNILSGQRWIEHYGEIVIKNLHDDSCYCKVNFIKAKYWSTNAHEIEGTVFDRSGKAVHRLFGKWHESIYCGGGSSSACVWRANPMPKGYEQYYSFTQFALELNEMDPSSKSLLPPTDTRFRPDQRFLEEGNLEEAEIQKQRIEQLQRERRRVLEENHVEHQPRFFRKSDDDSWVSNGTYLELRKDLGFSKLDHPVLW

SEQ ID NO: 187321 - DNA, 2664 bp, Artificial Sequence
  derived and/or modified sequence
atgatgtcagacgagaaaaatctgggtgtgtctcagaagcttgtatctccctccagaagcacttcttcttgttcgagcaaacagggttcaagacaggactcctgggaagtagtggaagggttgaggggagaaatgaactacactcaggagccgcccgtccagaagggatttctgctcaagaagcgcaagtggcctttgaaaggctggcacaagcggttcttttaccttgacaagggaatactgaagtatgccaagtcccagaccgacattgaacgggagaagctgcatggctgtatcgatgttggactgagcgtgatgagcgtgaagaagtcctccaaatgcatcgatcttgacaccgaagaacacatatatcacctgaaagtaaagagcgaagaagtgttcgacgagtgggtgtctaagctcaggcatcacagaatgtataggcagaatgagatagctatgtttccacacgaggtcaatcactttttctcgggttccacaataactgatagtagctcaggggtattcgatagcattagcagtcggaagagatcctccatttctaagcagaatctgtttcagactggctctaacgtgtctttctcttgcggcggagagactcgcgttcctttatggctgcagagctctgaggacatggaaaagtgttccaaggatctggcgcactgtcatgcttaccttgtggagatgtcccagctattgcaaagtatggacgtgctgcatcggacctattcagcccctgctatcaatgcaatacaaggaggttccttcgaaagtcctaagaaggagaagagatcacaccgccggtggcggtcccgtgccattggaaaagatgctaagggcaccctgcaggtgcccaaaccgttttccgggccagtcagactgcatagctcaaatccaaatctctctaccctggactttggcgaggaaaagaattattccgatggaagcgaaacgtcctccgaattctctaaaatgcaggaggatctgtgccacatcgcacataaggtgtacttcacgttaagatcagcattcaatataatgtcagccgaacgcgagaagctgaaacaactgatggaacaagacgcctctagctcaccttcggcccaggtgattggtctgaagaacgctctgagcagcgcactggctcagaacaccgatctgaaggaacggctgcgccgaattcacgctgagagcctgctgctggattccccggccgtcgctaaatcaggtgataacctggccgaggagaactctagggacgagaaccgggccctggtgcatcagctttctaacgagtctcgcttgtcgatcactgactctttaagtgagttttttgatgctcaggaagtgcttctgagtccttcctccagcgagaatgagatttccgacgacgattcatatgtatccgatatctccgacaatctcagtttagacaatctgtcaaatgacctggacaatgagcgccagacattgggacctgtgctggattccgggagggaagctaagagtcggagaagaacctgccttccagccccttgcccgtcaagtagcaatatttcattgtggaatatactgcggaacaacataggcaaggacctaagcaaagtcgcaatgccagtggaactcaacgaaccccttaatacattgcagcgtctctgcgaagaactggagtacagcgaactgctggacaaagcggcccagattccatcgccactggagcggatggtatatgtggctgcctttgcaataagtgcttatgcctcctcttactacagggccgggagtaaaccgttcaacccagtcttgggagaaacctacgaatgtatcagagaagacaaagggtttcagttcttctctgaacaggtgagtcaccaccccccaatctcagcttgtcatgcggagagccggaattttgtgttctggcaagacgtccgttggaagaacaaattttggggtaaaagcatggaaattgtgcccattggaacaactcatgtcaccctgcctgtatttggggatcacttcgaatggaataaggtgacatcttgcatccacaacattcttagcggtcaaaggtggatcgagcactatggcgagatcgtcatcaagaatctgcacgatgattcctgttattgtaaggtgaatttcataaaagctaagtattggtctaccaatgctcacgagattgaaggtactgtgttcgatcggtccggaaaggcagtgcatagattgtttgggaaatggcacgagagcatatactgcggaggcgggtcatcctcagcctgcgtctggagagctaaccctatgcctaaaggctatgagcagtactattcgtttacccagtttgctttggagctaaacgagatggacccctcctctaaaagcctccttccccccacagacacgcggttcagacctgaccagcgctttctagaagaaggaaacctggaggaagccgagattcagaaacagaggatcgaacaactgcagcgcgaacggcgcagagtcctagaagaaaatcacgtcgagcaccagccgcgctttttccgcaaaagcgatgacgacagttgggtgtcaaatggcacttacctggagttgaggaaggacctggggttcagtaaactcgatcatccggtgctgtggtag

SEQ ID NO: 187322 - DNA, 2664 bp, Artificial Sequence
  derived and/or modified sequence
atgatgtctgatgagaagaacctgggcgtgtcccagaagctggtgagccccagccgcagcaccagcagctgcagcagcaagcagggcagccggcaggacagctgggaggtggtggagggcctgcggggggagatgaactacacccaggagccccctgtgcagaagggcttcctgctgaagaagaggaagtggcccctgaagggctggcacaagcgcttcttctacctggacaagggcatcctgaagtatgccaagagccagacagacatcgagcgggagaagctgcacggctgcattgatgtgggcctgtctgtgatgtctgtgaagaagagcagcaaatgtattgacctggacacagaggagcacatctaccacctgaaggtgaagtctgaggaggtgtttgatgagtgggtgtccaagctgcggcaccacaggatgtaccggcagaatgagatcgccatgttcccccatgaggtgaaccacttcttcagcggcagcaccatcacagacagcagcagtggagtgtttgacagcatcagcagcaggaagaggagcagcatcagcaagcagaacctcttccagacaggcagcaatgtgtccttcagctgtggcggggagaccagggtgcccctgtggctgcagagcagcgaggacatggagaagtgcagcaaggacctggcccactgccacgcctacctggtggagatgagccagctgctgcagagcatggatgtgctgcacaggacctacagcgccccagccatcaatgccatccagggcggcagctttgagagccccaagaaggagaagaggagccaccggcgctggaggagccgggccatcggcaaggatgccaagggcaccctgcaggtgcccaagcccttcagcggccctgtgcggctgcacagcagcaaccccaacctgagcaccctggactttggagaggagaagaactacagtgatggcagcgagaccagcagcgagttcagcaagatgcaggaggacctgtgccacatcgcccacaaggtgtacttcaccctgcggagcgccttcaacatcatgtctgctgagcgggagaagctgaagcagctgatggagcaggatgccagcagcagccccagcgcccaggtgattggcctgaagaatgccctgagcagcgccctggcccagaacacagacctgaaggagcggctgcggcgcatccatgctgagagcctgctgctggacagccctgctgtggccaagagcggggacaacctggccgaggagaacagcagagatgagaacagagccctggtgcaccagctgagcaatgaaagccggctgagcatcacagacagcctgtctgagttctttgatgcccaggaggtgctgctgagccccagcagcagtgaaaatgagatcagtgatgatgacagctatgtgtctgacatcagtgacaacctgagcctggacaacctgagcaatgacctggacaatgaaaggcagaccctgggccctgtgctggacagcggccgggaggccaagagcagaagaaggacctgcctgcctgccccctgccccagcagcagcaacatcagcctgtggaacatcctgaggaacaacatcggcaaggacctgagcaaggtggccatgcctgtggagctgaatgagcccctgaacaccctgcagaggctgtgtgaggagctggagtacagcgagctgctggacaaggccgcccagatccccagccccctggagaggatggtgtatgtggccgcctttgccatcagcgcctatgccagcagctactaccgggccggcagcaagcccttcaaccctgtgctgggggagacctatgagtgcatccgggaggacaagggcttccagttcttcagcgagcaggtgagccaccacccccccatcagcgcctgccacgccgagagcaggaactttgtgttctggcaggatgtgcgctggaagaacaagttctggggcaagtccatggagatcgtgcccatcggcaccacccacgtgaccctgcctgtgtttggagaccactttgagtggaacaaggtgaccagctgcatccacaacatcctgagcggccagcgctggattgagcactatggagagatcgtcatcaagaacctgcatgatgacagctgctactgcaaggtgaacttcatcaaggccaagtactggagcaccaatgcccatgaaattgagggcaccgtgtttgacagaagtggcaaggctgtgcaccggctgtttgggaagtggcatgagagcatctactgcggcggcggcagcagcagcgcctgtgtgtggagggccaaccccatgcccaagggctatgagcagtactacagcttcacccagtttgccctggagctgaatgagatggaccccagcagcaagagcctgctgcccccaacagacacccgcttccggccagaccagcgcttcctggaggagggcaacctggaggaggccgagatccagaagcagagaattgagcagctgcagcgggagcggcggcgggtgctggaggagaaccacgtggagcaccagccccgcttcttcaggaagagtgatgatgacagctgggtgtccaatggcacctacctggagctgaggaaggacctgggcttcagcaagctggaccaccctgtgctgtggtag

SEQ ID NO: 187323 - DNA, 2664 bp, Artificial Sequence
  derived and/or modified sequence
atgatgagcgacgagaagaacctgggcgtgagccagaagctggtgtctccttctaggtccacttccagttgtagctcaaagcagggatcacgccaggattcgtgggaagtggtcgaaggcctacgcggggaaatgaattacacccaggaaccccccgtgcagaaaggttttctgctcaaaaagagaaaatggcctttgaaaggctggcataagcgcttcttctacttggacaaaggtatcctgaaatacgctaagtcccagacggatatcgaaagggaaaagttgcacggctgcatcgacgtaggactgagcgtgatgtcagtcaagaaatcctccaaatgcatcgacctcgatacagaagaacacatttatcacctgaaagtaaagagtgaggaagtgtttgacgaatgggtgagtaaattaaggcaccataggatgtatagacagaacgaaattgcaatgttcccgcatgaggtgaaccactttttcagtggctctaccattactgattcctcctccggggtctttgatagcatttctagcagaaaacgatcttcaatatcgaagcaaaatttgtttcagaccggcagcaatgtatccttttcttgcgggggagaaacccgtgtccctctgtggctacagtcctcagaggacatggaaaaatgttctaaggatttggcacattgccatgcttatctggtagaaatgtcccaactcctgcagtccatggatgtactccaccggacctatagtgcacctgcaatcaacgccatccagggtggcagcttcgaaagtccaaaaaaagaaaagagatctcaccgtagatggcggagcagggcaataggtaaagacgcaaagggtacactgcaagtccccaagccatttagtgggccggtgcgcctgcattccagtaatccaaatctcagtacacttgatttcggagaagagaagaattacagtgacggcagcgaaacttccagtgaatttagcaagatgcaggaagatctgtgtcatattgcgcacaaagtctatttcaccctcagatccgcatttaacattatgtctgctgagagggagaaactgaagcagctcatggaacaggatgcttccagttcaccctcagcccaggtgatcggcctcaagaacgcactgagctccgcactcgcacagaacaccgaccttaaagagaggctcaggaggattcacgccgaatctttactcttggattcccctgcagttgcaaaaagcggtgataacctcgctgaggaaaattcccgggacgagaatcgtgccctggtgcatcagctgtccaatgagtccaggcttagtattacagactctctttccgagttctttgacgcgcaggaagtcttgctaagcccatcaagctcggagaatgagatatcagatgatgattcttacgtttctgacatttctgataacctgtctttagacaatttatcaaacgacttggacaacgaaaggcagactttgggccccgtactagacagcggcagagaagccaagagtagaagaaggacatgcttaccagccccctgtccgtcatcctcgaatattagcctctggaacatcctccgcaataatattggtaaggacctatccaaggtcgcgatgcctgtagaactaaacgagcccctgaatacactacagagactctgcgaagagctagaatatagtgagctgctcgacaaagcggcacagataccaagccccctggagcggatggtttacgtagctgcattcgcaatatctgcctatgcctcaagctattaccgggccggtagtaaaccctttaacccagtactcggcgaaacgtacgaatgcatccgtgaagataagggatttcagttctttagcgagcaggtgagccatcacccacctatttctgcctgccacgcggagagcagaaacttcgttttctggcaggatgttaggtggaaaaacaaattctggggaaagagtatggaaatcgttcccataggaaccactcacgtgaccctccctgtctttggggaccactttgagtggaacaaagtgaccagctgcattcataatattttgagcggccaaaggtggatcgaacattacggtgagattgtgatcaagaatcttcatgacgacagctgctattgcaaagtgaactttattaaggcgaaatattggtcgacaaatgcacacgaaatcgagggcactgttttcgaccgatcaggaaaagcggtacatcggcttttcggaaagtggcacgagtccatctattgcggcggaggctcctcttctgcttgtgtttggagagccaacccgatgcctaaaggatatgagcagtattattcttttactcagttcgcgctggagctgaacgagatggatccaagcagtaagtccttgttgccccccacggacacgagattccgcccagatcagaggtttcttgaagagggaaacctggaggaggccgaaatccagaagcaacgaattgaacaacttcaacgagagagacgcagggtgttggaggagaatcatgtcgagcatcaacctcggtttttccgaaaaagtgatgatgactcctgggtctcaaatggcacatacctggagctgcgtaaagacctcggcttttcgaagctcgatcaccccgtactgtggtag

SEQ ID NO: 187324 - DNA, 6760 bp, Artificial Sequence
  derived and/or modified sequence
ggcgcgcgccgagaagttctgggcaaagtactcagaactggccgcgtgctggtggcgcccgccagccggcccgggagaggggacttgagcgcttcgcggccggtgcgcagcgcggctccggccccgcagtctgtctgcaagtggccatccccgcccccgactcctgcggccggtgcgggagctgtcagctgcacgttgcgggggtaccggagaagccggggttgccttctcccggttctgtgcgctaaccccggagcccggccccggggaactagggagcgtctccggctgcacagcgctcaggttttagggtttcctttgggccacccaaaatgttttttaaatactttggataagagctaaaccacctgccactggggacttccatactctcggctcccttgtcatctgatggcattttgattgtctcgaggccaagtgacttgctgtccatgatgagtgatgagaagaaccttggtgtgtcccaaaaattggtatcaccttcaaggagcacaagtagctgctcttccaagcaaggaagtcgacaggacagctgggaagtggtggaaggactgaggggggagatgaattacacccaggagccaccagttcagaaaggatttttgctgaaaaagaggaagtggcccttaaaaggctggcataagagattcttctatctggacaaaggaatcttgaaatatgccaagagccaaaccgatatagagagagagaagctgcatggctgcattgatgtcgggctctcagtgatgtctgtaaagaagtcatcaaaatgcatagaccttgacaccgaggagcacatctaccatctgaaggtcaagtcagaagaagtctttgatgagtgggtatcgaaacttcgccaccacagaatgtatcgtcagaatgaaattgccatgtttccacatgaagttaaccactttttctcagggtccaccatcacagactcttcatctggggtgtttgactccatttcaagtaggaagcgtagcagtatatcaaagcagaatttatttcaaactggaagcaatgtatcattttcttgtggtggtgagacacgagttccattatggttacagtcttcagaggacatggaaaaatgctccaaagacctggcgcactgtcatgcctacctggtagaaatgagccagctcctgcaaagcatggacgtcctgcatcggacatactcggcaccagctatcaacgccatccagggtggatcttttgaaagtcccaaaaaggaaaaaagatcgcacaggaggtggcggtccagagctattggcaaagatgctaaaggaacactgcaggtcccgaaacctttttctggcccagtaagactacactcctccaatcctaatttgtcaacactagattttggagaagagaaaaattattctgatggctctgaaacctcatcagagttttctaaaatgcaagaagatctgtgtcatattgcccataaagtttacttcactttaaggtcagcttttaatatcatgtcagcggagagagagaaactgaagcagctgatggagcaggatgcctcctcctccccgtctgctcaggtcattggtctgaagaacgccctgtcatccgccctagcacaaaacacagatcttaaagaacgcttacgcagaatccatgccgagtctctgctcctcgactcccccgctgtcgccaagtcgggtgacaatctggcagaggaaaactccagagatgaaaaccgagctctagttcatcagctttctaatgaaagtagactctccatcactgactccctttctgagttttttgatgctcaggaagttctgttatctccaagctcttcagaaaacgagatttctgatgatgactcatatgtcagtgacataagtgataatctttccttagataatctcagtaatgatttagataatgagagacagaccttggggcctgtccttgatagtggtcgggaagcgaagtcccggagaagaacgtgcctgccggcgccctgcccgagcagcagtaacatcagcctgtggaacatcctgaggaacaacatcgggaaggacctgtccaaggtggccatgccggtggagctgaacgagcccctgaacacgctgcagaggctctgcgaggagctggagtacagcgagctcctggacaaggccgcgcagattcccagccccctggaaaggatggtatatgtggcagcctttgccatatcagcgtatgcatctagctactaccgagctggaagcaagccatttaatccggttcttggagaaacatatgaatgtattcgggaggacaagggcttccagtttttttcagaacaggtcagccaccatccgcctatctctgcgtgtcatgctgagtctagaaattttgttttctggcaagatgtgagatggaaaaacaaattctggggcaaatccatggaaattgttccaattggcacaacccatgtgactctgccagtttttggggatcattttgagtggaacaaagtgacctcttgcatccataacatcttaagcgggcagaggtggattgagcactatggagagattgtcatcaagaacctgcatgatgattcctgctactgcaaagtgaattttataaaggcaaaatactggagcactaatgcccatgagattgaaggcacagtgtttgacaggagtggaaaagcggttcatcggctgtttgggaaatggcatgaaagcatctactgtggcggcggctcctcttctgcctgtgtatggagagcaaatcctatgccgaaaggctacgagcaatactatagcttcacacagtttgcgctggaattaaatgaaatggatccatcatcaaagtctttattgccacctactgacactcgatttaggccagaccagaggtttctagaggaagggaacttagaagaagctgaaatacaaaagcagaggattgaacaactgcagagagaaaggcggcgggtcttagaagaaaatcatgtggagcaccagcctcggtttttcaggaaatccgacgatgactcttgggtgagcaacggcacctatttggaacttagaaaagatcttggtttttccaaactggaccatcctgtcttatggtgaaaaagtaaagaagaaagataacattagtgtatttctcctgtgcttgccttctgaagtggcacaaacctgtgtttatatatttaaaagatactctaggatgatcacttgtgcttagcttagcattgtaactctttaagtctatattttcctcagtgcgtttctttacaatttcaaatgttaccctgattgtttatatgaatgtagaacaccttgacatttctttttatatataaactatttaataaaaatgaaagattgaatgttcatgtgtgggttaaaaaaagaagctttaacactaattttccaaaggttagggaagattccaattaaatttatgccttataaaattatgttgtagaaaaaaaatcaacctctcccaggtgcattaagaaataagaattcccagggttactcacccatgcgtaagctacccaagtttaatttggtagctgaaatatctttttgcctcagacagctcttgaattgctcatacagaacaattctgctggtgctggagtctgaagaatattttcatttgcattttagtggttagggagaggatataagattaatggaatgtatatttttatataagacgtatacggcaccttcttgaaaaggaagcatttgaacttgttcctccctatagttctattgccttatatgcaaaattgtaccctgttgctcagagaaattattcataagagaaaagaattccaattaattaaatatcacaatagcatcccagagagacagtaggaaatttctccttagtgagagctgagtccttgagaagttaagagactgtttcctgcttcccaccccaccccgttttttgtccctccgtttgatcacctccctgttgagtatggaatgtcccagtttaatataaaacatacagtttattccacacagcagtttgactttgtaaaagtttagcaaaataactgattgttttggataactcaacatgtttttcttaaatgctgttttagtattttctacctcttaataagcaccatattttagatcttgtataaaaagttgccatctgccttatagacaaatgtagagaattgatgttcttgctttgtgttgtgttctggtaaagctttaagtgagtgtcttacccctttcctatactttcttgttatccatatcattcttttgtgagttttgcagcagtcttgaataatacagattataactactgaaaggggaaccttcgtctttttaaatgtgttatttcacattacaataatatgtgtagtagttgaattgtgttatcaaagcatgtccaacttctgtccagatgacattaaaaccaaagcctaattgttaagcctcttattctaaagtccatagcaatgctatggaatatcaagtataatgatgtagtaaaaagatttctccagaaaacactttgagatacttaaagaaattcagagcatatcgaatgttatgaatgaagagtaaaataattacaggaaaagaatgcatgatttttcattgtcacaccaaataaccagttggacaatattgcattttcaaaatggagagttatttaaagtggatgtgtagccttctggaatctgcacgtgactggcattttaaaacaactcattaaatattggattcattttatcgagatgccaagatgaacacaatgtgaatatcatttccatttctaagcagttgaatgacacagtcagattctttggtgtatgctttgttctttccatctcaagcatttatccaaattctgctcacagacatgaggaagcaggctgtagatttaagggcactcaaggggaaaacaaatgtagtttccacagtgtgaggataaatgtagaatcgtggtaatattggctgttaaattggcctgctccagagactggctcaaaaaagaaagaagcaacgaaaacaaaatgcacagcctgaatggacgtagcactgtcatgtggcatttggaaaatctttaattatcctaatgttatttcacttgcccttatgctttattttagagtcccagggacaactggatgaaacattacgtctgtagtcatcttatttgagatgggggtgggaacgaattaaaatatgatagagaactatatgcagattttaaaatctagtcagtactagcatctataaagggcttttctgaaatttaaacagcttggtgatgcatcctgatattataagcttaaaactatcttgagggggaaatgacttcttttctccttctgtcccttttctcaaaagcatctttcccccaaatgtatgtctctaggacattttatagttttaagaggaagaaaacagaaacgtggcatcatttgggaagaaccaaggtagaatttaattttctggactttaaatctcctggttaaataatgctaatcactgtaccatttgagttacatgttttaacctcttttttttttctaattattccatccaaaatttctggtgaattacacagaaatttttggaaatgggactttgtgcaggtaaccaccctgcacttcaggtaatgttcctgtcacagctgtcgactaccccacgctgcaggaaatccattcagaaatgagctaacagtctccagtgtagcaggagagccagtcacttccctccccaggccccaaagcaccccaaggctggtattccttgagtcataggtattaataataaaagcctcaatgcagcttctccatgtagttcctctcctacaagccaggtggattctggtcctaactaaagagatgggagttcacctgagggcaagaagtacccaggatgcccaaacagccgcacaggtgtcctgtgcttcctgtgagacttcctgggggaaatatacaaactaatatattttttaatgtttacgtcatttacactgctgcttttctcatattctgcttttaattacttgtagtaaatcatttgtttgggcttcaagcactgtcttccatctgcatcttccagatttatcatgagtgatcttgttctactgttaaagatgtcaagcctaaaaagtaataaagtttttatttggctgttgaaccttgatgtagcccctactacatacactacaagttatgccttctggctactacagaatctccgcagaccttttagttatgagtagaagcaataagaaggtgtccttatggtcttaggaataatagttccaatgtattggcataatttgtttgaatgtctttattttgatattaacaccggcataaatctatttttgctaccagatgatagctattttcatttgctctattttcctctgcattgtactaatctgttactcagtgttagtcttcatttttctgtgttggaaacctgcgtcatgtaaatatctgcaaatcatgacagtctaaagtgcaaaccattttcagagactttggggaatgcagtgatcagaagtggctaatttattttatttctgattattttatccagagggtacttttttaatggatatttgtaaatcttccacttaaccactgaaaattattttgttttaatcccacccttccatccatacctctgcctccccaaaaagctcctattaatttgcttatccccctcatgtagctagttgaatgtgaataaataacatggaaaaaaag

SEQ ID NO: 187325 - DNA, 2664 bp, Artificial Sequence
  derived and/or modified sequence
atgatgtcagacgagaagaaccttggagtctctcagaagctcgtctcgccatcaagatcgacctccagctgtagttccaagcaaggctccagacaagactcctgggaagtggtcgagggattgaggggcgagatgaactatacgcaggaaccccctgtccagaaaggctttttactgaaaaagagaaaatggccgctgaaggggtggcataagcggtttttctacctggacaaagggattctcaaatacgctaagtcgcagaccgatattgaacgcgagaaactgcacggctgcatagatgtcgggttatcggtcatgagtgtcaaaaaaagtagcaagtgtatcgacttagacaccgaagagcatatttaccatctgaaggtgaagagcgaggaagtttttgatgaatgggtgtccaagctgcgccatcatcgcatgtaccggcagaacgagatagcgatgtttccgcacgaagtgaatcatttttttagtggtagtacaattaccgacagctcctcgggagtctttgactcaattagctcccggaaacggtcctccatctccaagcagaacctgttccagaccggctctaacgtctcattctcatgtggcggagaaacacgcgtgcctttgtggctacagtcatccgaggacatggaaaagtgctcaaaagacttggcacattgccatgcttatctcgtagagatgagtcagctcctgcagtcaatggacgttctgcaccggacctacagcgcccctgcaattaacgccattcaggggggttccttcgagtcccctaaaaaggagaagaggagtcataggaggtggcggagtcgggctatcggaaaagacgccaaaggaacgctgcaggtgccaaagcctttctctgggcctgtgcggctgcattcatcaaaccctaatctttccacgctcgattttggagaagagaagaactacagtgatggttctgagacaagcagcgaattcagcaaaatgcaggaagacctttgccacatcgcccataaggtctattttacgttgcgctccgcctttaatattatgagcgccgaacgggagaaactgaagcaactaatggaacaggacgcctctagctctccctccgctcaagtcattgggcttaaaaacgccctgagcagtgcacttgcccagaacacggatttgaaagagcgcctgcgtagaatccacgccgagtccctcctgttggactcgcctgccgtcgccaagtctggggataatctcgccgaagagaactcgcgcgatgagaacagggccctggtccatcagctgtcgaatgaaagccggttatccattaccgatagcttgtccgaattctttgatgcccaggaagtactgctgagtcccagctcctcggagaacgagatctccgatgatgacagctacgtgagtgatatttccgataatctgtccctggacaatctctcaaatgacctggacaacgagcgtcaaactctcggccctgtgcttgactcaggtagggaagcaaaatctcgcaggcgcacctgtttgccagccccatgcccttcatcctcaaatatctctctctggaacatccttaggaataacatcggtaaggacctgtcaaaagtggctatgcccgtcgaattgaatgagcccctaaatactctccaacgcctatgtgaggagctggaatatagcgagctactagataaggctgctcagattcccagccctctggaaagaatggtgtacgttgcagcatttgctattagtgcgtatgcatcttcctattaccgcgctggcagtaagccttttaatccagtcttgggagaaacatacgaatgcattcgggaagataaagggttccaatttttcagtgagcaggtaagtcatcaccctcctattagtgcctgccatgctgaaagcagaaattttgtgttctggcaggacgtgagatggaaaaataaattttggggcaaatctatggagatagtgcctattggaaccactcatgtaactcttccagtgttcggtgaccatttcgagtggaataaggttacgtcgtgtatccacaatattctgtccggacagcgctggatcgagcattatggcgagatcgtgattaagaatttacatgacgactcctgttattgtaaggttaactttataaaggccaagtactggtcaacgaacgctcacgagattgaaggaacagtttttgataggagcgggaaggctgtgcaccgcctctttggcaaatggcacgaatccatctattgcggcggaggttcttcatctgcctgtgtttggagagcgaatccgatgccgaaggggtatgagcagtactatagcttcacccaattcgccctggagttaaacgagatggacccaagttctaaaagtctgctgccccctacggatacccggtttcggcctgaccagagattcctcgaggagggtaatctggaggaggctgagattcaaaagcagcgtatcgaacagctccagcgtgaacgaaggagagttttggaggaaaatcacgttgaacaccagccgagattttttagaaaatcagacgacgatagctgggtatctaatgggacttacttagaattgcgtaaggatctggggttctctaagctggatcatccggtcttatggtag

SEQ ID NO: 187326 - DNA, 2664 bp, Artificial Sequence
  derived and/or modified sequence
atgatgagcgacgagaagaacctgggcgtgagccagaagctggtgagccccagcagaagcaccagcagctgcagcagcaagcagggcagcagacaggacagctgggaggtggtggagggcctgagaggcgagatgaactacacccaggagccccccgtgcagaagggcttcctgctgaagaagagaaagtggcccctgaagggctggcacaagagattcttctacctggacaagggcatcctgaagtacgccaagagccagaccgacatcgagagagagaagctgcacggctgcatcgacgtgggcctgagcgtgatgagcgtgaagaagagcagcaagtgcatcgacctggacaccgaggagcacatctaccacctgaaggtgaagagcgaggaggtgttcgacgagtgggtgagcaagctgagacaccacagaatgtacagacagaacgagatcgccatgttcccccacgaggtgaaccacttcttcagcggcagcaccatcaccgacagcagcagcggcgtgttcgacagcatcagcagcagaaagagaagcagcatcagcaagcagaacctgttccagaccggcagcaacgtgagcttcagctgcggcggcgagaccagagtgcccctgtggctgcagagcagcgaggacatggagaagtgcagcaaggacctggcccactgccacgcctacctggtggagatgagccagctgctgcagagcatggacgtgctgcacagaacctacagcgcccccgccatcaacgccatccagggcggcagcttcgagagccccaagaaggagaagagaagccacagaagatggagaagcagagccatcggcaaggacgccaagggcaccctgcaggtgcccaagcccttcagcggccccgtgagactgcacagcagcaaccccaacctgagcaccctggacttcggcgaggagaagaactacagcgacggcagcgagaccagcagcgagttcagcaagatgcaggaggacctgtgccacatcgcccacaaggtgtacttcaccctgagaagcgccttcaacatcatgagcgccgagagagagaagctgaagcagctgatggagcaggacgccagcagcagccccagcgcccaggtgatcggcctgaagaacgccctgagcagcgccctggcccagaacaccgacctgaaggagagactgagaagaatccacgccgagagcctgctgctggacagccccgccgtggccaagagcggcgacaacctggccgaggagaacagcagagacgagaacagagccctggtgcaccagctgagcaacgagagcagactgagcatcaccgacagcctgagcgagttcttcgacgcccaggaggtgctgctgagccccagcagcagcgagaacgagatcagcgacgacgacagctacgtgagcgacatcagcgacaacctgagcctggacaacctgagcaacgacctggacaacgagagacagaccctgggccccgtgctggacagcggcagagaggccaagagcagaagaagaacctgcctgcccgccccctgccccagcagcagcaacatcagcctgtggaacatcctgagaaacaacatcggcaaggacctgagcaaggtggccatgcccgtggagctgaacgagcccctgaacaccctgcagagactgtgcgaggagctggagtacagcgagctgctggacaaggccgcccagatccccagccccctggagagaatggtgtacgtggccgccttcgccatcagcgcctacgccagcagctactacagagccggcagcaagcccttcaaccccgtgctgggcgagacctacgagtgcatcagagaggacaagggcttccagttcttcagcgagcaggtgagccaccacccccccatcagcgcctgccacgccgagagcagaaacttcgtgttctggcaggacgtgagatggaagaacaagttctggggcaagagcatggagatcgtgcccatcggcaccacccacgtgaccctgcccgtgttcggcgaccacttcgagtggaacaaggtgaccagctgcatccacaacatcctgagcggccagagatggatcgagcactacggcgagatcgtgatcaagaacctgcacgacgacagctgctactgcaaggtgaacttcatcaaggccaagtactggagcaccaacgcccacgagatcgagggcaccgtgttcgacagaagcggcaaggccgtgcacagactgttcggcaagtggcacgagagcatctactgcggcggcggcagcagcagcgcctgcgtgtggagagccaaccccatgcccaagggctacgagcagtactacagcttcacccagttcgccctggagctgaacgagatggaccccagcagcaagagcctgctgccccccaccgacaccagattcagacccgaccagagattcctggaggagggcaacctggaggaggccgagatccagaagcagagaatcgagcagctgcagagagagagaagaagagtgctggaggagaaccacgtggagcaccagcccagattcttcagaaagagcgacgacgacagctgggtgagcaacggcacctacctggagctgagaaaggacctgggcttcagcaagctggaccaccccgtgctgtggtag

SEQ ID NO: 187327 - protein, 1013 aa, Artificial Sequence
  derived and/or modified sequence
MGDPGSEIIESVPPAGPEASESTTDENEDDIQFVSEGPLRPVLEYIDLVSSDDEEPSTSYTDENIKRKDHIDYQKDKVALTLARLARHVEVEKQQKEEKNRAFREKIDFQHAHGLQELEFIRGHSDTEAARLCVDQWLKMPGLKTGTINCGTKSSFRRGGHTWVSGKPILCPIMHCNKEFDNGHLLLGHLKRFDHSPCDPTITLHGPFFSSFACVVCYKKFVTQQQYRDHLFDKEATDDGHNNNLLPQIIQCFACPNCFLLFSRKEECSKHMSGKNHFHQSFKLGDNKGIAHPISFPSFAKKLLISLCKDVPFQVKCVACHKTLRSHMELTAHFRVHCRNAGPVAVAEKSITQVAEKFILRGYCPDCNQVFVDETSTQNHKQNSGHKVRVINSVEESVLLYCHSSEGNKDPSSDLHLLLDQSKFSSLKRTMSIKESSSLECIAIPKKKMNLKDKSHEGVACVQKEKSVVKTWFCECNQRFPSEDAVEKHVFSANTMGYKCVVCGKVCDDSGVIRLHMSRIHGGAHLNNFLFWCRTCKKELTRKDTIMAHVTEFHNGHRYFYEMDEVEGETLPSSSTTLDNLTANKPSSAITVIDHSPANSSPRGKWQCRICEDMFDSQEYVKQHCMSLASHKFHRYSCAHCRKPFHKIETLYRHCQDEHDNEIKIKYFCGLCDLIFNVEEAFLSHYEEHHSIDYVFVSEKTETSIKTEDDFPVIETSNQLTCGCRESYICKVNRKEDYSRCLQIMLDKGKLWFRCSLCSATAQNLTDMNTHIHQVHKEKSDEEEQQYVIKCGTCTKAFHDPESAQQHFHRKHCFLQKPSVAHFGSEKSNLYKFTASASHTERKLKQAINYSKSLDMEKGVENDLSYQNIGGNTNWKPPLNCKIYNYLNRIGCFFLHPRCSKRKDAADFAICMHAGRLDEQLPKQIPFTILSGDQGFLELENQFKKTQRPAHILNPHHLEGDMMCALLNSISDTTKECDSDDNMGAKNTSIGEEFISTEDVELEEAIRRSLEEM

SEQ ID NO: 187328 - DNA, 3042 bp, Artificial Sequence
  derived and/or modified sequence
atgggcgaccccggcagcgagatcatcgagagcgtgccccccgccggccccgaggccagcgagagcaccaccgacgagaacgaggacgacatccagttcgtgagcgagggccccctgagacccgtgctggagtacatcgacctggtgagcagcgacgacgaggagcccagcaccagctacaccgacgagaacatcaagagaaaggaccacatcgactaccagaaggacaaggtggccctgaccctggccagactggccagacacgtggaggtggagaagcagcagaaggaggagaagaacagagccttcagagagaagatcgacttccagcacgcccacggcctgcaggagctggagttcatcagaggccacagcgacaccgaggccgccagactgtgcgtggaccagtggctgaagatgcccggcctgaagaccggcaccatcaactgcggcaccaagagcagcttcagaagaggcggccacacctgggtgagcggcaagcccatcctgtgccccatcatgcactgcaacaaggagttcgacaacggccacctgctgctgggccacctgaagagattcgaccacagcccctgcgaccccaccatcaccctgcacggccccttcttcagcagcttcgcctgcgtggtgtgctacaagaagttcgtgacccagcagcagtacagagaccacctgttcgacaaggaggccaccgacgacggccacaacaacaacctgctgccccagatcatccagtgcttcgcctgccccaactgcttcctgctgttcagcagaaaggaggagtgcagcaagcacatgagcggcaagaaccacttccaccagagcttcaagctgggcgacaacaagggcatcgcccaccccatcagcttccccagcttcgccaagaagctgctgatcagcctgtgcaaggacgtgcccttccaggtgaagtgcgtggcctgccacaagaccctgagaagccacatggagctgaccgcccacttcagagtgcactgcagaaacgccggccccgtggccgtggccgagaagagcatcacccaggtggccgagaagttcatcctgagaggctactgccccgactgcaaccaggtgttcgtggacgagaccagcacccagaaccacaagcagaacagcggccacaaggtgagagtgatcaacagcgtggaggagagcgtgctgctgtactgccacagcagcgagggcaacaaggaccccagcagcgacctgcacctgctgctggaccagagcaagttcagcagcctgaagagaaccatgagcatcaaggagagcagcagcctggagtgcatcgccatccccaagaagaagatgaacctgaaggacaagagccacgagggcgtggcctgcgtgcagaaggagaagagcgtggtgaagacctggttctgcgagtgcaaccagagattccccagcgaggacgccgtggagaagcacgtgttcagcgccaacaccatgggctacaagtgcgtggtgtgcggcaaggtgtgcgacgacagcggcgtgatcagactgcacatgagcagaatccacggcggcgcccacctgaacaacttcctgttctggtgcagaacctgcaagaaggagctgaccagaaaggacaccatcatggcccacgtgaccgagttccacaacggccacagatacttctacgagatggacgaggtggagggcgagaccctgcccagcagcagcaccaccctggacaacctgaccgccaacaagcccagcagcgccatcaccgtgatcgaccacagccccgccaacagcagccccagaggcaagtggcagtgcagaatctgcgaggacatgttcgacagccaggagtacgtgaagcagcactgcatgagcctggccagccacaagttccacagatacagctgcgcccactgcagaaagcccttccacaagatcgagaccctgtacagacactgccaggacgagcacgacaacgagatcaagatcaagtacttctgcggcctgtgcgacctgatcttcaacgtggaggaggccttcctgagccactacgaggagcaccacagcatcgactacgtgttcgtgagcgagaagaccgagaccagcatcaagaccgaggacgacttccccgtgatcgagaccagcaaccagctgacctgcggctgcagagagagctacatctgcaaggtgaacagaaaggaggactacagcagatgcctgcagatcatgctggacaagggcaagctgtggttcagatgcagcctgtgcagcgccaccgcccagaacctgaccgacatgaacacccacatccaccaggtgcacaaggagaagagcgacgaggaggagcagcagtacgtgatcaagtgcggcacctgcaccaaggccttccacgaccccgagagcgcccagcagcacttccacagaaagcactgcttcctgcagaagcccagcgtggcccacttcggcagcgagaagagcaacctgtacaagttcaccgccagcgccagccacaccgagagaaagctgaagcaggccatcaactacagcaagagcctggacatggagaagggcgtggagaacgacctgagctaccagaacatcggcggcaacaccaactggaagccccccctgaactgcaagatctacaactacctgaacagaatcggctgcttcttcctgcaccccagatgcagcaagagaaaggacgccgccgacttcgccatctgcatgcacgccggcagactggacgagcagctgcccaagcagatccccttcaccatcctgagcggcgaccagggcttcctggagctggagaaccagttcaagaagacccagagacccgcccacatcctgaacccccaccacctggagggcgacatgatgtgcgccctgctgaacagcatcagcgacaccaccaaggagtgcgacagcgacgacaacatgggcgccaagaacaccagcatcggcgaggagttcatcagcaccgaggacgtggagctggaggaggccatcagaagaagcctggaggagatgtag

SEQ ID NO: 187329 - DNA, 3042 bp, Artificial Sequence
  derived and/or modified sequence
atgggcgaccccggcagcgaaatcatagaaagtgtgccaccagccggccctgaggcctcggaatctaccaccgacgaaaatgaggacgacatccagttcgtgtcagaagggccactgagaccagtgttggagtacatcgacctagtttcatcagatgacgaggaaccatccacatcttacaccgatgagaatatcaagagaaaggaccacatcgactatcagaaggacaaggtggctctcactctcgcccgattggcccgacacgtcgaggtcgagaaacaacagaaagaagagaaaaacagagcctttcgggagaaaatcgattttcagcacgcccatgggctccaggagttggaatttatcaggggccacagtgataccgaggccgctagactgtgcgtagaccagtggctcaagatgcccgggctgaagaccgggaccatcaactgtggaaccaaatccagtttcagacgcggcggtcatacctgggtgtctgggaaacccattctgtgtccaataatgcattgtaacaaggagttcgacaatggccacttgctactgggccacctgaaacggtttgatcatagcccttgtgatccaaccatcacgcttcacggcccattctttagtagctttgcttgtgttgtctgctacaaaaaattcgtgactcagcagcagtatagagatcacctctttgataaagaggctactgatgacggacacaataataaccttttgccgcagataattcagtgctttgcatgtccaaattgcttcctccttttctcccggaaggaagagtgctcgaagcatatgtcaggcaagaaccacttccaccagtcctttaaactgggagacaataaagggattgctcatccaatttcgttcccgagtttcgcaaaaaagcttctgatctctctttgcaaagatgtcccgttccaagtaaaatgcgttgcatgccacaagacactgaggtcacacatggaattgaccgcccacttcagggttcattgtaggaacgcaggcccagtagcagtcgccgaaaagtccattacccaagtcgccgaaaaatttatactgcgcggatattgccccgactgtaaccaggtattcgtggacgagacctctacgcaaaaccacaaacagaacagcggccacaaagttagagtgatcaactcagtcgaggagagcgtcctgttgtactgccactcgtcagaaggcaataaggatccatcatccgacttgcacctgttactcgaccagagtaaattctccagtttgaaacgaaccatgtcaataaaagagtccagttctcttgagtgcatcgcaattcctaaaaagaagatgaatcttaaagataagagtcatgaaggcgtggcctgtgtgcagaaagagaaatccgtggtaaagacctggttttgcgagtgtaaccagagattcccgtccgaggacgctgtggagaaacacgtattttccgctaatacaatgggctataagtgtgtggtctgcggcaaggtttgtgatgactccggggttatcagattgcacatgagtcggatccacggaggcgctcatctaaataatttcctgttctggtgccgcacgtgcaagaaagaactgacgcggaaagatacgattatggcacacgttacggaattccataacggacacaggtacttctatgagatggacgaggtcgagggtgaaactctgccctcctcctccacgacacttgacaacctcaccgcaaacaaaccatctagcgctatcacagttatcgatcactcacctgccaactcgagtcctcgaggtaaatggcagtgccggatttgtgaagatatgtttgattcccaggagtacgtgaaacagcactgtatgagcctggctagccataagttccacagatattcgtgcgcccattgccggaagccctttcataaaattgagacgttataccgccactgtcaggatgagcacgacaatgaaattaaaataaaatatttttgcggcctatgcgaccttattttcaacgttgaggaggcctttctgtcacattatgaagagcatcacagcatcgactacgtatttgtgtccgaaaaaaccgagacttctatcaaaacggaagatgattttccagtcattgaaacttccaatcagctgacatgtgggtgccgcgagtcatacatatgcaaggtcaacaggaaagaagattattcaagatgcttgcagatcatgttggataaggggaagttgtggttccggtgttctctttgcagcgctacggcacagaacctcaccgacatgaatactcatattcatcaagtgcacaaggaaaaatctgacgaagaggagcagcagtacgtaattaagtgtggtacctgcacgaaagcatttcatgatccagagagtgcccagcagcattttcacaggaagcattgtttcctgcagaagccgtccgtcgcccactttggcagtgagaagtcaaacctgtataagttcacagctagcgcctcacataccgagcgcaagctgaaacaagcgatcaactattcgaagagtttggacatggaaaagggcgttgaaaatgatctgagttatcagaatattggtggcaatacgaattggaaaccccccttaaattgtaagatctacaattacctgaacaggattggatgcttcttccttcatcccagatgctcaaagcgtaaggatgccgcagatttcgcgatttgtatgcacgctggccgactagatgaacaactgcctaagcagatcccgtttactatactaagcggtgaccaagggtttctggagctggaaaaccaattcaaaaaaacccagcggccagcccatattcttaacccacaccacttggagggcgatatgatgtgcgctctccttaatagcattagtgacaccactaaggagtgtgactctgacgacaatatgggcgccaagaacaccagcattggagaagaattcatctccaccgaagatgttgagctcgaggaggcaatccggcgcagtctggaggaaatgtag

SEQ ID NO: 187330 - DNA, 3042 bp, Artificial Sequence
  derived and/or modified sequence
atgggagaccccggcagcgagatcattgaatctgtgcccccagctggccctgaggccagcgagagcaccacagatgaaaatgaagatgacatccagtttgtgtctgagggccccctgcggcctgtgctggagtacatcgacctggtgtccagtgatgatgaggagcccagcaccagctacacagatgagaacatcaagaggaaggaccacatcgactaccagaaggacaaggtggccctgaccctggcccggctggcccggcacgtggaggtggagaagcagcagaaggaggagaagaacagagccttccgggagaagattgacttccagcacgcccacggcctgcaggagctggagttcatccggggccacagcgacacagaagctgcccggctgtgtgtggaccagtggctgaagatgcctggcctgaagacaggcaccatcaactgtggcaccaagagcagcttcagaagaggaggccacacctgggtgtctgggaagcccatcctgtgccccatcatgcactgcaacaaggagtttgacaatggccacctgctgctgggccacctgaagagatttgaccacagcccctgtgaccccaccatcaccctgcacggccccttcttcagcagctttgcctgtgtggtgtgctacaagaagtttgtgacccagcagcagtacagagaccacctgtttgacaaggaggccacagatgatggccacaacaacaacctgctgccccagatcatccagtgctttgcctgccccaactgcttcctgctcttcagcaggaaggaggagtgcagcaagcacatgtctgggaagaaccacttccaccagagcttcaagctgggggacaacaagggcatcgcccaccccatctccttccccagctttgccaagaagctgctgatcagcctgtgcaaggatgtgcccttccaggtgaagtgtgtggcctgccacaagaccctgcggagccacatggagctgacagcccacttccgggtgcactgcagaaatgccggccctgtggccgtggccgagaagagcatcacccaggtggccgagaagttcatcctgcggggctactgcccagactgcaaccaggtgtttgtggatgagaccagcacccagaaccacaagcagaacagcggccacaaggtgcgggtcatcaacagcgtggaggagagcgtgctgctgtactgccacagcagcgagggcaacaaggaccccagcagtgacctgcacctgctgctggaccagagcaagttcagcagcctgaagaggaccatgagcatcaaggagagcagcagcctggagtgcatcgccatccccaagaagaagatgaacctgaaggacaagagccatgagggcgtggcctgtgtgcagaaggagaagtctgtggtgaagacctggttctgtgagtgcaaccagcgcttccccagtgaagatgctgtggagaagcacgtgttcagcgccaacaccatgggctacaagtgtgtggtgtgtgggaaggtgtgtgatgacagcggggtcatccggctgcacatgagccgcatccatggaggagcccacctgaacaacttcctgttctggtgcaggacctgcaagaaggagctgaccaggaaggacaccatcatggcccacgtgacagagttccacaacggccaccgctacttctatgagatggatgaggtggagggggagaccctgcccagcagcagcaccaccctggacaacctgacagccaacaagcccagcagcgccatcaccgtgattgaccacagccctgccaacagcagcccccggggcaagtggcagtgccgcatctgtgaggacatgtttgacagccaggagtatgtgaagcagcactgcatgagcctggccagccacaagttccaccgctacagctgtgcccactgcaggaagcccttccacaagattgagaccctgtaccgccactgccaggatgaacatgacaatgagatcaagatcaagtacttctgtggcctgtgtgacctgatcttcaacgtggaggaggccttcctgagccactatgaggagcaccacagcattgattatgtgtttgtgtctgagaagacagagaccagcatcaagacagaagatgacttccctgtgattgagaccagcaaccagctgacctgtggctgccgggagagctacatctgcaaggtgaacaggaaggaggactacagccgctgcctgcagatcatgctggacaagggcaagctgtggttccgctgcagcctgtgcagcgccacagcccagaacctgacagacatgaacacccacatccaccaggtgcacaaggagaagagtgatgaggaggagcagcagtatgtgatcaagtgtggcacctgcaccaaggccttccatgaccctgagagcgcccagcagcacttccacaggaagcactgcttcctgcagaagcccagcgtggcccactttggaagtgagaagagcaacctgtacaagttcaccgccagcgccagccacacagagaggaagctgaagcaggccatcaactacagcaagagcctggacatggagaagggcgtggagaatgacctgagctaccagaacattggaggcaacaccaactggaagccacccctgaactgcaagatctacaactacctgaaccgcatcggctgcttcttcctgcacccccgctgcagcaagaggaaggatgctgctgactttgccatctgcatgcacgccggccgcctggatgagcagctgcccaagcagatccccttcaccatcctgagcggggaccagggcttcctggagctggagaaccagttcaagaagacccagaggcctgcccacatcctgaacccccaccacctggagggggacatgatgtgtgccctgctgaacagcatcagtgacaccaccaaggaatgtgacagtgatgacaacatgggcgccaagaacaccagcatcggggaggagttcatcagcacagaagatgtggagctggaggaggccatcagaagaagcctggaggagatgtag

SEQ ID NO: 187331 - DNA, 3042 bp, Artificial Sequence
  derived and/or modified sequence
atgggcgaccccggcagcgagatcatcgagagcgtgccccccgccggccccgaagcttctgagtcaaccactgatgagaacgaggatgacatccagttcgtgagtgaagggccccttcggccagtgctggagtacattgacctcgtgtcgtctgatgatgaagaaccaagtacatcctacactgatgaaaatattaagagaaaggaccacatcgactaccagaaggataaggtggcactgacactggcccgtctggctaggcacgtcgaggttgagaaacagcagaaggaggagaagaacagagcatttagagagaagatcgacttccagcatgctcacgggctccaagaactcgaattcatccgcggccactccgacaccgaagcagcccgactctgcgtcgatcagtggctgaagatgcccggcttaaaaaccggaaccataaactgcggtaccaaatctagttttcggagaggcggccacacctgggtcagtggcaaaccaatcctatgccccatcatgcattgtaataaggagtttgacaatggacatctcctactcgggcatctcaagagatttgaccacagcccatgcgatcccacaattactctgcacggacctttttttagttcatttgcctgcgtcgtctgttacaagaagttcgtaacccagcagcaataccgcgatcacttatttgataaagaggccactgatgatggccacaataacaacctgctaccccagataatccagtgctttgcttgtccaaattgctttcttctgttttcacgcaaggaggaatgcagtaagcacatgtctgggaagaaccattttcaccagtcattcaagctgggagataacaaaggcatcgctcacccaatcagtttccctagttttgccaagaaattgttgatcagcctttgcaaggatgtgccattccaggtcaaatgtgtggcctgtcacaaaacgttgcgatcccatatggagctgaccgcacactttcgtgtgcattgcaggaacgccggtcctgtagccgtggctgaaaaatcaatcactcaggtggctgaaaagttcattctgagaggatattgcccagactgtaaccaggttttcgtcgacgaaacatctacccagaaccacaagcagaatagcgggcataaagtccgtgtcataaattccgtcgaggaaagcgttctcttatattgtcacagttccgaaggcaacaaagacccctcttctgacctgcatttactgctggaccagtcaaagtttagcagcctgaaaagaaccatgtccattaaggaatcttccagccttgagtgtatcgccatccccaagaagaaaatgaatctcaaagacaagtcccatgagggggtagcatgtgtccaaaaggaaaagtccgtggtgaagacctggttctgcgaatgcaaccagcgcttcccatccgaagatgccgtggagaagcacgttttttcagcaaacaccatgggctataaatgcgtggtctgcggcaaagtgtgtgacgattccggtgttatacgactacatatgagccgcatccacggaggagcccatttaaacaactttctgttctggtgcagaacctgtaagaaggagctgacacggaaagacaccattatggcccatgtaaccgagttccataacgggcacaggtacttttacgaaatggacgaagtggaaggagagacccttccatccagctccaccaccttggacaacttgacagcaaataagccaagctctgccatcacagtcattgatcactcacccgccaactcttccccccgaggaaagtggcaatgcagaatctgtgaagatatgtttgacagtcaggagtacgttaagcagcactgcatgagcttggccagccataagtttcacagatacagttgcgcacactgcaggaagcccttccataagattgagacgttataccgtcactgccaggacgagcacgacaatgagatcaagatcaagtatttttgcggtctgtgcgatttgatcttcaacgtggaagaggccttcctgtcccactacgaagagcaccacagtattgattatgtgtttgtgtctgagaagacggagacttcgatcaaaactgaagatgacttccctgtcatcgaaactagcaaccagttgacctgtggatgtcgcgaatcgtatatctgcaaggtgaatcgcaaagaggactactcaagatgccttcagattatgctggacaaggggaagttgtggtttaggtgcagtctttgttccgccaccgctcaaaatcttaccgacatgaatactcatatacaccaagtgcataaagagaagagcgacgaggaagagcagcaatatgttatcaaatgcggcacgtgcactaaggctttccatgaccccgagtcggcacagcagcacttccacagaaagcactgtttcctccagaagccctccgtggcacacttcgggagcgagaagagtaacttatataaattcactgcctcagcgtcccatacggagcggaagttgaaacaggccattaattattcaaagagtctggacatggaaaagggggtagagaacgacttgtcttaccagaacatcgggggcaacaccaactggaaacctcctctcaactgcaaaatatataactatctgaatcggatcggctgctttttcctccaccccaggtgctccaaaagaaaagatgccgcggacttcgcaatatgtatgcatgccgggagactggatgagcaactgccaaagcaaataccatttactatactgtctggagaccaagggtttctggagttggagaatcaatttaaaaaaacgcagcgccctgcacacatcctcaatccacaccacctggagggcgatatgatgtgcgcactcctgaatagcatttctgataccacaaaagaatgcgactctgacgacaatatgggagccaaaaataccagcattggagaagagtttatatctacagaggatgtggaactcgaggaggccatccgacgaagtctagaggaaatgtag

SEQ ID NO: 187332 - DNA, 3042 bp, Artificial Sequence
  derived and/or modified sequence
atgggcgatccaggcagcgaaataatcgaatccgtacctccagcagggccagaggctagcgagtcaaccaccgacgagaatgaggatgatatacagttcgtgagcgaagggcctctgaggcccgtgcttgagtatattgacctcgtgtctagtgacgacgaagagccttctacaagctacacagatgagaacattaaacgaaaagaccacatcgattatcagaaggacaaagtggcgcttaccctcgcccgtttggcaaggcacgtggaagttgaaaaacaacagaaggaggagaagaaccgagcctttagggaaaagatcgattttcagcatgcacatggacttcaagagctggagttcataagagggcacagcgatactgaggcagctcggttgtgcgtcgaccaatggctgaagatgcccggtttaaagacaggtactattaactgtgggactaaatcgagtttcagaaggggcggtcacacatgggtatctggtaagccaatcctatgccccattatgcattgcaacaaggaattcgacaacggacatctgctgctaggccatctcaaacgattcgatcactccccctgtgaccctaccatcacgctccacggcccatttttttcctcctttgcctgtgtggtgtgttacaaaaaatttgtgactcagcagcagtatcgggatcacctgttcgacaaagaagccaccgatgacggtcataataataatctgctgccacagattatccagtgctttgcctgtccaaactgtttccttttattcagccgtaaggaagagtgctctaaacatatgtctggaaagaaccatttccatcagagcttcaaattgggcgataacaaaggaatcgctcacccgatttcattcccttcctttgcaaagaaactgctcatttctctctgtaaagacgtgccatttcaggtgaaatgcgttgcctgccataaaacgctgaggagccatatggagctaacagcccatttccgtgtgcactgccggaatgctggtcctgtcgctgtcgccgaaaagtctatcactcaggtggctgagaaattcatcctgagaggttattgtccggactgcaaccaggttttcgtggacgagacttctacacagaatcataaacagaattcggggcacaaggtgcgcgtgattaacagcgtcgaggagtctgttttactgtactgtcacagcagcgaggggaacaaggacccaagtagcgatctacacctcttattggatcaaagcaagttttcttctctgaagagaactatgagtatcaaagaatcgagctctctagagtgcatcgccatccccaagaagaaaatgaacctcaaggacaagtcacacgaaggtgtggcctgtgtccaaaaagaaaaatccgttgtgaagacctggttttgcgagtgcaatcagaggttccctagcgaggacgctgtggaaaagcacgtattcagcgccaacacaatggggtataagtgtgtggtatgtggtaaagtctgtgatgacagtggagtaattcgcctccatatgtctcggatccacggaggagcccacttaaataactttctgttttggtgtcgcacatgcaaaaaggaacttaccaggaaagacacaatcatggcgcacgtgacggaatttcacaatggtcaccggtatttttacgagatggacgaggtcgagggtgagacgttgccaagcagttctacaaccctcgataacctgacagcaaataagccctctagtgctatcacagtcattgaccatagtccggctaactcatctcctagaggtaaatggcagtgtagaatctgcgaggatatgttcgactcacaggaatacgtgaaacaacactgcatgtcactggcctcccacaagtttcacagatatagctgcgcccattgcaggaaaccgtttcacaaaatcgaaaccctatatagacactgtcaagatgaacacgacaatgaaataaagatcaagtacttctgtggcctgtgtgatctcattttcaacgtggaagaggccttcttaagtcactacgaggaacaccacagcatcgattatgtgttcgtgtctgaaaagaccgagacttccatcaaaacagaagacgactttcctgtcatcgagaccagtaatcagctgacctgcggctgtcgcgagagctacatctgcaaagtgaaccgcaaggaagattatagccgatgcctacagatcatgttagataaggggaagttatggtttcgctgcagcctttgtagcgccacagcacagaacctcaccgatatgaacacccatatccaccaggtacacaaagagaaatccgacgaagaggagcagcagtacgtgatcaaatgtggaacttgtaccaaggccttccacgatcctgagagcgctcagcagcatttccaccgtaagcactgcttccttcagaaaccctctgtcgcccactttggcagtgagaagtccaatttgtataagtttacagcctccgctagccacaccgaaaggaagctcaaacaagctataaattattccaagtctctggacatggagaagggggtagagaatgatttgtcttaccagaatatcggtggcaatacaaattggaagccaccgctgaactgtaaaatctataattacctgaatagaatcggctgtttcttcttgcacccccgttgttctaagagaaaagacgcagcagacttcgccatctgcatgcatgccggaagattagatgaacagctgccgaaacagatacccttcaccatcctgtcaggagaccagggctttttagaactagaaaatcaatttaagaagacccagcggcctgctcatatcctgaacccacaccacctggagggcgacatgatgtgtgccctgctgaacagcattagcgatacaacaaaggagtgtgatagtgatgataacatgggcgcaaagaatacctcaatcggggaagaattcatttctactgaggatgtagagttagaggaagctattcggagaagtctcgaggagatgtag

SEQ ID NO: 187333 - DNA, 4998 bp, Artificial Sequence
  derived and/or modified sequence
ggaagcccgggagtgagagaaagcggctccgggggcatagcgggccagtaagggccgctcctcctttgaagaggttttgcgtctctttccgccggtggcgtcggcgctcacgcaggggcgggtcccggtagcgccaggcggtgcagggcgggaaggggattcgtggcgacggcggcggcagggacagcaggagcagtggtgctgtcagcgcggccgtcggagacatgggagacccggggtcggagataatagaatctgtccctccagctggccctgaggcatctgagtcaacaacggatgaaaatgaagacgacattcagtttgtcagtgaaggaccattacgacctgttcttgaatacattgatctggtcagcagtgatgatgaagagcctagcacctcttatactgatgagaatattaaacgtaaagaccatattgattatcagaaggataaagttgctttaactctggctcgtctagcccgccatgttgaagtggagaaacagcagaaagaagagaagaatagagcattcagagaaaaaattgattttcagcatgctcatgggttacaagaattggaatttattcgaggacattctgatacagaagcagcaagactgtgtgtggaccagtggctaaaaatgccaggactcaaaacaggcacaattaattgtggaacaaaaagttcattccgaagaggaggccacacgtgggtgtctgggaaaccaattttatgtcctataatgcactgtaacaaggagtttgacaatgggcaccttctcttaggacatttgaaaaggttcgatcactctccatgtgatccaacaattacactacatggacctttcttcagctcctttgcttgtgtagtatgttataaaaaatttgttactcaacaacaatatagagatcacctttttgataaggaagccacagatgatggacataacaacaaccttcttcctcagattattcagtgttttgcatgtccaaattgcttccttctttttagcagaaaggaggagtgttcaaagcatatgtctggaaagaatcatttccatcagagtttcaaactgggtgataacaaaggaattgcacatccaatatctttcccatcttttgcaaagaaacttttgatctctctgtgcaaagatgttccctttcaagttaagtgtgtggcctgccacaagacactgcgttcccacatggagctcactgcccatttcagagttcattgtcgaaatgctggacctgtagctgtagctgagaagagcattacccaggttgcagagaaattcatattaagaggttattgtccagattgcaatcaagtctttgtggatgaaaccagcacccaaaatcataagcagaattcaggacacaaagtccgagtcattaactcagtggaagaatcagtcttactctattgccacagcagcgaagggaacaaggatccttcttctgacttgcatttattgttggatcaatcaaaattttcatcacttaaaagaaccatgtctattaaagaatctagctcactggagtgcattgccattccaaaaaagaagatgaatttaaaagataaaagccatgaaggtgttgcttgtgtccagaaagaaaaatcagtagttaaaacctggttctgtgaatgcaatcagcgattcccaagtgaagatgcagtagaaaagcatgttttctcagcaaacacaatgggttataaatgtgtggtctgtggaaaggtatgtgatgattcaggggtcattcgtttacacatgagccggattcacggaggggcacatttaaataactttcttttctggtgtcggacatgcaaaaaggagttaacaaggaaagatactatcatggcacatgtgactgaatttcataatggacacagatatttttatgagatggatgaggtagaaggtgaaactttgccatcatcctctacaacattggataatttgactgctaacaagccttcatcagctattactgttattgatcattccccggcaaatagttctccgaggggtaaatggcaatgccggatttgtgaagatatgtttgattcccaggaatatgtaaaacagcactgcatgtctttggcaagccacaagtttcatagatacagctgtgctcactgcagaaagccttttcataagatagaaacattgtaccgacattgccaagatgagcatgacaatgagataaagattaaatacttctgtgggctttgtgatcttatctttaatgtggaagaagcatttctgagtcattatgaggagcaccacagcatagattatgtatttgtgtcagaaaaaactgaaacttcaattaaaaccgaagatgattttccagtaatagagaccagtaaccagttaacttgtggttgccgtgagagttacatctgtaaagtcaacagaaaagaagattatagcagatgtctccaaatcatgctggataaaggaaaactgtggtttcgctgcagtttatgttcggcaacagcacagaatttaaccgacatgaacactcatatccatcaagtgcacaaagaaaagagtgatgaggaggagcagcagtatgtaatcaagtgtggcacctgcaccaaagcatttcatgatcctgagagtgcacagcagcatttccatagaaaacattgcttcttacagaaacccagtgtggctcattttggatctgaaaaatcaaacctgtacaagtttactgctagtgcctcacatacagagagaaaactgaaacaggcaataaactattcaaaaagtttagacatggagaaaggagttgagaatgacctaagctatcagaatataggaggaaacaccaattggaagcctccgctcaactgtaagatttataactacctgaacaggattggatgcttcttccttcatcctcgctgtagtaaaagaaaagatgctgctgattttgccatatgtatgcatgctggccgtctagatgaacaactacccaagcaaattcctttcaccatcctctcaggagatcaaggttttctggagctagagaatcaatttaagaagactcagaggccagctcatatactaaaccctcaccacttagagggagatatgatgtgtgccttgttaaatagcatatctgataccaccaaagaatgtgacagtgatgataacatgggtgccaaaaatacttcaataggagaagaatttatatccacagaagatgtggaattagaagaagctattagaagaagtcttgaggaaatgtaattaaagatattaccacacaacatcaagtggccttgaagagactgagataacgaattcttgagtttgttttctaaaggagaccagaaatccactattacaaatgtatttgaaaacatgtttttgctttcatatgttcaaaatctgatctttgttttgtatttttgtgctaatgtgcaaacatgtacagaagaaatagaatacatgttcatgcaaatataaattatgtattctaatataggtgtaacagtttcccagttaactttgaatttatatatttagatttaaaggattaaaaaaaaggaaagctcttgacagttgtttcccaaatagcattagttctttaattttatttgtactgtacaaatgatgctagtttatttttttagcagtgaaaatgaatataaaaaaggtgacataggtcaagttttccataaattctacttctcatgtggcactattatataatacctttgagatctttgtttatgtttattagaagagggtaatggaaactgatcatggaaacatttaaaattttatcagcaatgttctttgtgggtgccatgcatatgtaaattattgctttaattagagcagcacattgctaaaataaaaaatacaccttaatttttaagaaataatttaaatgaaacaatttccattccttttacctgcttagacttttatgtgacttgtatggtctcctggttaaagggaatggtgtcagaatatttgcataaaattatttttcataacagtccttttttatatattggtgtaaacataatattcttcaagaaataatgttgaaagcctactcaggaataatcttccttaactctttaaatttttatttcatgtgaagtgttttcagtttagttattcactgaattgtcagtttccttcatttggtattacatatttaattcttaaatattgaggccccattgtgagtaataaaaaatacgacataagtagaagactaagaagggcttgtcatattatctttgtgtatatgcttcatgttatttaaccagaaatgtcttatctctaaaaatttttagtagtaattatttaccaaacttaaaaacatttctataaatataaagcttttctttatatttaagacaaaatataaaggctagaatttggttccttctctgtaacactaaatattttagtgtgaaattgaatttttttattactatagtcttttcaatctataatttgtgtttttaatttcttgatatgtcacttctgttcctccctgcttgcattttttaaaaactagacattgtggcttgagaatttatcaatcatctttccgaaatgaccacattgtgcttttagtttgtatgtttaagtggtcaagcaaggctctaggaggtagtcactgagctggaccttaaacacatctgcaggagctcacaaaatgggagcaaaagaggcattccagaaagaagagtagttaagcagatgtgggggcagggcaagaggagacagcaccttgttgccagagattctacacaaaggtgtgatggacactgatgctctattaagaagcttttgtggtgtgtgtggtagagaataattaaggcttctgataagacaggaaagggatatttcatcatgactgttaagaaaaggtaactgggttgtttaatgttttaattgataattgtcactgatcgtatttctacttgttaaataattaaaaatcatcttaaaattc

SEQ ID NO: 187334 - protein, 1596 aa, Artificial Sequence
  derived and/or modified sequence
MESRETLSSSRQRGGESDFLPVSSAKPPAAPGCAGEPLLSTPGPGKGIPVGGERMEPEEEDELGSGRDVDSNSNADSEKWVAGDGLEEQEFSIKEANFTEGSLKLKIQTTKRAKKPPKNLENYICPPEIKITIKQSGDQKVSRAGKNSKATKEEERSHSKKKLLTASDLAASDLKGFQPQAYERPQKHSTLHYDTGLPQDFTGDTLKPKHQQKSSSQNHMDWSTNSDSGPVTQNCFISPESGRETASTSKIPALEPVASFAKAQGKKGSAGNTWSQLSNNNKDLLLGGVAPSPSSHSSPAPPSSSAECNGLQPLVDQDGGGTKEPPEPPTVGSKKKSSKKDVISQTIPNPDLDWVKNAQKAFDNTEGKREGYSADSAQEASPARQNVSSASNPENDSSHVRITIPIKAPSLDPTNHKRKKRQSIKAVVEKIMPEKALASGITMSSEVVNRILSNSEGNKKDPRVPKLSKMIENESPSVGLETGGNAEKVIPGGVSKPRKPPMVMTPPTCTDHSPSRKLPEIQHPKFAAKRRWTCSKPKPSTMLREAVMATSDKLMLEPPSAYPITPSSPLYTNTDSLTVITPVKKKRGRPKKQPLLTVETIHEGTSTSPVSPISREFPGTKKRKRRRNLAKLAQLVPGEDKPMSEMKFHKKVGKLGVLDKKTIKTINKMKTLKRKNILNQILSCSSSVALKAKAPPETSPGAAAIESKLGKQINVSKRGTIYIGKKRGRKPRAELPPPSEEPKTAIKHPRPVSSQPDVPAVPSNFQSLVASSPAAMHPLSTQLGGSNGNLSPASTETNFSELKTMPNLQPISALPTKTQKGIHSGTWKLSPPRLMANSPSHLCEIGSLKEITLSPVSESHSEETIPSDSGIGTDNNSTSDQAEKSSESRRRYSFDFCSLDNPEAIPSDTSTKNRHGHRQKHLIVDNFLAHESLKKPKHKRKRKSLQNRDDLQFLADLEELITKFQVFRISHRSYTFYHENPYPSIFRINFDHYYPVPYIQYDPLLYLRRTSDLKSKKKRGRPAKTNDTMTKVPFLQGFSYPIPSGSYYAPYGMPYTSMPMMNLGYYGQYPAPLYLSHTLGAASPFMRPTVPPPQFHTNSHVKMSGAAKHKAKHGVHLQGPVSMGLGDMQPSLNPPKVGSASLSSGRLHKRKHKHKHKHKEDRILGTHDNLSGLFAGKATGFSSHILSERLSSADKELPLVSEKNKHKEKQKHQHSEAGHKASKNNFEVDTLSTLSLSDAQHWTQAKEKGDLSSEPVDSCTKRYSGSGGDGGSTRSENLDVFSEMNPSNDKWDSDVSGSKRRSYEGFGTYREKDIQAFKMNRKERSSYDSSMSPGMPSPHLKVDQTAVHSKNEGSVPTMMTRKKPAAVDSVTIPPAPVLSLLAASAATSDAVGSSLKKRFKRREIEAIQCEVRKMCNYTKILSTKKNLDHVNKILKAKRLQRQSKTGNNFVKKRRGRPRKQPTQFDEDSRDQMPVLEKCIDLPSKRGQKPSLSPLVLEPAASQDTIMATIEAVIHMAREAPPLPPPPPPPLPPPPPPPLPPPPPLPKTPRGGKRKHKPQAPAQPPQQSPPQQPLPQEEEVKAKRQRKSRGSESEVLP

SEQ ID NO: 187335 - protein, 137 aa, Artificial Sequence
  derived and/or modified sequence
MESRETLSSSRQRGGESDFLPVSSAKPPAAPGCAGEPLLSTPGPGKGIPVGGERMEPEEEDELGSGRDVDSNSNADSEKWVAGDGLEEQEFSIKEANFTEGSLKLKIQTTKRAKKPPKNLENYICPPEIKITIKQSG

SEQ ID NO: 187336 - DNA, 4791 bp, Artificial Sequence
  derived and/or modified sequence
atggagtctagggaaaccctcagttcctcacgtcagcgcggcggcgagagtgactttctgccggtttcgtccgcaaagcctcctgccgcccctggctgcgccggcgaacccctgctatctacccctggcccggggaagggaattccagtcgggggcgaacgcatggaaccagaggaggaagacgaactgggttcaggtcgggacgttgattctaatagtaatgccgactccgagaaatgggttgccggcgatgggcttgaggagcaggagttctccatcaaggaagcgaacttcaccgagggcagccttaaattgaaaatacagacaacaaagagagcgaaaaaaccgcctaaaaatttagagaattacatctgtcctcccgagataaagattacaattaagcagagtggcgatcagaaggtgagtcgtgcaggtaagaacagtaaggctaccaaggaagaggaaagatctcacagcaagaagaaactgctcactgcgtctgaccttgccgcctcagacttgaaaggtttccaaccccaagcgtatgagcgtcctcagaaacacagcaccctacattatgatacaggcctcccccaggatttcacaggtgataccttgaagcctaagcatcagcagaaatcctccagccagaatcatatggattggtcaacgaactctgactctggtccagtgacccagaactgcttcatttcaccagaatcagggagagagacagcttcaacaagcaagatccctgcacttgagccagtagcaagcttcgcgaaagcccagggcaagaaagggagcgctggaaatacctggtctcagctatccaacaacaataaagacttgctcctggggggcgtcgccccttctccttcctcacattcttcgcccgctccgccgagctcatctgctgaatgtaatggactccagcccttagtcgaccaggacggcggaggcacaaaagaaccaccggaaccccccacagtgggctcaaagaaaaagagcagcaagaaggatgtcatctcacagacaatccctaatcccgatctcgattgggtgaaaaacgcccagaaggcctttgataacaccgagggaaagagggaggggtacagtgcagattctgcccaagaagcttcacccgcccggcaaaacgtatctagtgcctctaatcctgaaaacgattcttcccacgtgaggataactatccctattaaggccccctcgctagaccctacaaaccacaaacggaagaagcgtcagtccatcaaggcagtggtcgagaagatcatgcctgaaaaggcacttgcaagtggtatcacgatgtcatcagaggtagtaaacaggatcctctctaattctgagggcaataagaaagatccacgagtgcctaagttatctaaaatgatagagaacgaatcgcctagcgtcggactggaaaccggaggaaatgcggagaaagtgatcccaggcggcgtttctaagcccagaaaacctcctatggttatgacgcccccgacatgtaccgaccatagtccttccagaaagcttccagagatccaacaccccaagttcgccgccaagcggagatggacttgttccaaaccaaagccgtccaccatgctgagagaagccgtcatggcaaccagtgacaaactgatgctcgagcccccaagtgcctaccctatcacccccagctcacccctgtatactaacaccgactctctgaccgtcattacccccgtgaaaaaaaaacgggggcgcccgaaaaaacagcctctgctaactgtggagaccattcatgagggaacatccacatctccagtcagtcccattagcagagagtttcctgggactaaaaaaaggaagagacgcagaaacctcgcaaagcttgcacaattggtacccggggaggataagccaatgtctgagatgaaatttcataagaaagtcggaaagctaggagtgctcgataagaagaccataaaaactattaataagatgaagactcttaaacgaaagaatattcttaatcaaatccttagctgtagctcatcggtcgctctgaaagctaaggccccaccagaaacttcccccggggccgccgccatagaatctaagctgggaaagcagatcaacgtgagcaagaggggcaccatatacattggcaaaaagcgaggaaggaaaccccgtgcagaactgccccctccatccgaggagcccaagaccgcaattaaacacccgcggcccgtgagttcccagcctgacgtaccagctgtgccaagtaacttccagtcgcttgtggcctcctcacccgccgctatgcacccactaagcacacaacttggggggtcgaacggtaatttatcaccggccagtaccgaaaccaacttctccgagctcaagaccatgcccaatctgcagcccatctcggccctgccaacaaagacgcagaaagggatccattccggcacttggaagctgtcgccacccagactcatggcgaattctcccagccatctctgcgaaatagggagtcttaaggagatcacgctgtctcccgttagtgaaagccattccgaagagaccattcctagtgattcaggaataggcacagacaacaattccacatccgaccaggcagagaagagtagtgaatcacggaggagatactcctttgatttttgctccctggacaatcccgaggcaatcccatctgacaccagcaccaaaaatcgacacgggcacagacagaagcacctcatcgtagataacttcctggctcacgaatcgcttaagaagcctaaacacaagcgaaaaaggaagtcgctccagaatagagacgatttacaatttctggcagacctggaggaactcatcacgaagttccaggtttttaggatcagccaccgctcatacaccttttaccatgaaaatccctacccaagcatctttagaatcaatttcgatcattactatcccgtcccctacattcagtacgacccattactctatctaagacggacgtccgacctcaagtcaaaaaaaaaaagggggagacctgccaaaacaaatgatactatgactaaggttcccttcctacagggcttttcctatccgattcccagcgggtcctactacgcaccgtacgggatgccgtatacctcaatgccaatgatgaacctgggttactatggccagtaccccgcacctttatacttatcccatactctaggagctgcttccccctttatgcgacccactgtgcctcctccccaattccacacaaactctcatgtaaagatgtctggcgcagccaagcacaaagccaaacacggcgtgcatttgcaagggcctgtcagtatgggcctgggggacatgcagccaagtctcaatccgcccaaagttggctcggcctcactgagctcgggccggcttcataaacgaaaacacaagcacaaacataaacacaaggaggatcggatcttaggaactcatgataatctgagtgggctctttgctgggaaagctaccgggttttcaagtcacatcctgagcgagcgattgagcagtgcagataaagagctacctctagtgtctgagaagaacaagcataaagagaagcagaagcatcaacattccgaagccggacataaagctagcaagaacaattttgaggtcgatacactttcaaccttgtccctttccgatgcccagcattggacgcaggccaaagagaagggggacctgtcctctgaacctgtggactcatgcaccaagagatactctggctcaggcggggacggtggaagtacacggtcggagaacctcgacgtgtttagtgagatgaatcctagtaatgataaatgggattccgatgtgtcaggatctaagagaaggtcatacgaggggttcggcacataccgcgaaaaagacattcaggccttcaagatgaataggaaggagcggtcttcctatgacagcagtatgtctccgggcatgccgtctccacacctgaaggtcgaccaaaccgcagtacacagtaaaaatgaagggagcgtcccaactatgatgaccagaaaaaagcctgcagcggtggatagcgttaccatcccgcccgcccccgtcctatctctgctcgccgcgtccgccgctacaagtgacgcagttgggagcagcctaaagaagagatttaagcgacgagaaatcgaagcgattcagtgcgaagtgaggaagatgtgcaattatacaaagattttgtcgactaagaagaacttggatcacgtcaacaagatcttgaaagcaaaaaggctgcagcgccagtccaaaacaggtaataattttgtcaaaaagcggagaggccggccccgcaagcagcccacccagtttgacgaagattcccgggaccagatgcccgtccttgaaaaatgcattgacttaccgagcaaaagaggccagaaaccaagcctcagcccactggtgcttgaacctgccgcctcccaagataccatcatggcaaccatcgaagcggtaatccacatggcacgtgaggcccctccactgcctcccccccccccccctccgctcccgccgcctcccccgccacccttaccaccaccgccgccccttcctaagactcccagagggggaaagaggaaacacaaacctcaggcccctgctcaacctccccagcagtcccctccgcagcagcctctccctcaggaagaggaggtcaaagcgaagagacagcggaaatcccggggctctgagtcagaggtgctcccctag

SEQ ID NO: 187337 - DNA, 4791 bp, Artificial Sequence
  derived and/or modified sequence
atggagagccgggagaccctgagcagcagccggcagaggggcggggagagtgacttcctgcctgtgagcagcgccaagcccccagctgcccctggctgtgccggggagcccctgctgagcaccccaggccctgggaagggcatccctgtgggcggggagaggatggagcctgaggaggaggatgagctgggcagcggcagagatgtggacagcaacagcaatgctgacagcgagaagtgggtggccggagatggcctggaggagcaggagttcagcatcaaggaggccaacttcacagagggcagcctgaagctgaagatccagaccaccaagagggccaagaagccacccaagaacctggagaactacatctgccccccagagatcaagatcaccatcaagcagagcggggaccagaaggtgtcccgggccggcaagaacagcaaggccaccaaggaggaggagaggagccacagcaagaagaagctgctgacagccagtgacctggccgccagtgacctgaagggcttccagccccaggcctatgaaagaccccagaagcacagcaccctgcactatgacaccggcctgccccaggacttcaccggggacaccctgaagcccaagcaccagcagaagagcagcagccagaaccacatggactggagcaccaacagcgacagcggccctgtgacccagaactgcttcatcagccctgagagcggccgggagacagccagcaccagcaagatcccagccctggagcctgtggccagctttgccaaggcccagggcaagaagggcagcgctggcaacacctggagccagctgagcaacaacaacaaggacctgctgctgggcggcgtggcccccagccccagcagccacagcagccctgccccacccagcagcagcgcagaatgtaatggcctgcagcccctggtggaccaggacggcggcggcaccaaggagcccccagagccccccaccgtgggcagcaagaagaagagcagcaagaaggatgtgatcagccagaccatccccaacccagacctggactgggtgaagaatgcccagaaggcctttgacaacacagagggcaagcgggagggctacagcgctgacagcgcccaggaggccagccctgcccggcagaatgtgtcctctgccagcaacccagaaaatgacagcagccacgtgcgcatcaccatccccatcaaggcccccagcctggaccccaccaaccacaagaggaagaagaggcagagcatcaaggctgtggtggagaagatcatgcctgagaaggccctggccagcggcatcaccatgagcagcgaggtggtgaaccgcatcctgagcaacagcgagggcaacaagaaggacccccgggtgcccaagctgagcaagatgattgaaaatgaaagccccagcgtgggcctggagaccggcggcaatgctgagaaggtgattcctggaggagtgtccaagcccaggaagccacccatggtgatgaccccacccacctgcacagaccacagccccagcaggaagctgcctgagatccagcaccccaagtttgctgccaagaggcgctggacctgcagcaagcccaagcccagcaccatgctgcgggaggccgtgatggccaccagtgacaagctgatgctggagccccccagcgcctaccccatcacccccagcagccccctgtacaccaacacagacagcctgaccgtcatcacccctgtgaagaagaagaggggccggcccaagaagcagcccctgctgactgtggagaccatccacgagggcaccagcaccagccctgtgagccccatcagccgggagttccctggcaccaagaagaggaagagaagaagaaacctggccaagctggcccagctggtgcctggagaggacaagcccatgtctgagatgaagttccacaagaaggtgggcaagctgggcgtgctggacaagaagaccatcaagaccatcaacaagatgaagaccctgaagaggaagaacatcctgaaccagatcctgagctgcagcagctctgtggccctgaaggccaaggcccctcctgagaccagccctggagctgctgccatcgagagcaagctgggcaagcagatcaacgtgtccaagaggggcaccatctacatcggcaagaagaggggcaggaagcccagggctgagctgcccccaccttctgaggagcccaagacagccatcaagcaccccaggcctgtgagcagccagccagatgtgcctgctgtgcccagcaacttccagagcctggtggccagcagccctgctgccatgcaccccctgagcacccagctgggcggcagcaatggaaacctgagccctgccagcacagagaccaacttcagcgagctgaagaccatgcccaacctgcagcccatcagcgccctgcccaccaagacccagaagggcatccacagcggcacctggaagctgagccccccccggctgatggccaacagccccagccacctgtgtgaaattggcagcctgaaggagatcaccctgagccctgtgtctgagagccacagcgaggagaccatccccagcgacagcggcattggaacagacaacaacagcaccagtgaccaggccgagaagagcagcgagagcagaagacgctacagctttgacttctgcagcctggacaaccctgaggccatccccagcgacaccagcaccaagaacagacatggccaccggcagaagcacctgattgtggacaacttcctggcccacgagagcctgaagaagcccaagcacaagaggaagaggaagagcctgcagaacagagatgacctgcagttcctggccgacctggaggagctgatcaccaagttccaggtgttccgcatcagccacaggagctacaccttctaccacgagaacccctaccccagcatcttccgcatcaactttgaccactactaccctgtgccctacatccagtatgaccccctgctgtacctgcggaggaccagtgacctgaagagcaagaagaagaggggccggcctgccaagaccaatgacaccatgaccaaggtgcccttcctgcagggcttctcctaccccatccccagcggcagctactatgccccctacggcatgccctacacctccatgcccatgatgaacctgggctactacggccagtacccagcccccctgtacctgagccacaccctgggcgccgccagccccttcatgaggcccaccgtgcccccaccccagttccacaccaacagccacgtgaagatgtctggggccgccaagcacaaggccaagcatggagtgcacctgcagggccctgtgtccatgggcctgggggacatgcagcccagcctgaacccccccaaggtgggcagcgccagcctgagcagcggccgcctgcacaagaggaagcacaagcacaagcacaagcacaaggaggaccgcatcctgggcacccatgacaacctgagcggcctgtttgctgggaaggccaccggcttcagcagccacatcctgtctgagcggctgagcagcgctgacaaggagctgcccctggtgtctgagaagaacaagcacaaggagaagcagaagcaccagcacagcgaggccggccacaaggccagcaagaacaactttgaggtggacaccctgagcaccctgagcctgagtgatgcccagcactggacccaggccaaggagaagggggacctgagcagcgagcctgtggacagctgcaccaagcgctacagcggcagcggaggagatggcggcagcaccaggtctgagaacctggatgtgttcagcgagatgaaccccagcaatgacaagtgggacagtgatgtgtctggcagcaagaggaggagctatgagggcttcggcacctaccgggagaaggacatccaggccttcaagatgaacaggaaggagaggagcagctatgacagctccatgagccctggcatgcccagcccccacctgaaggtggaccagacagctgtgcacagcaagaatgaaggctctgtgcccaccatgatgaccaggaagaagccagctgctgtggacagcgtgaccatccccccagcccctgtgctgagcctgctggccgccagcgctgccaccagtgatgctgtgggcagcagcctgaagaagcgcttcaagagaagagaaattgaggccatccagtgtgaggtgaggaagatgtgcaactacaccaagatcctgagcaccaagaagaacctggaccacgtgaacaagatcctgaaggccaagaggctgcagaggcagagcaagacaggcaacaactttgtgaagaagagaagaggccggcccaggaagcagcccacccagtttgatgaggacagccgggaccagatgcctgtgctggagaagtgcatcgacctgcccagcaagaggggccagaagcccagcctgagccccctggtgctggagcctgctgccagccaggacaccatcatggccaccattgaagctgtgatccacatggcccgggaggccccacccctgcccccacctcctcctccacccctgcccccacctcctcctccacccctgcccccacctccacccctgcccaagaccccccggggcggcaagaggaagcacaagccccaggccccagcccagcccccccagcagagccccccccagcagcccctgccccaggaggaggaggtgaaggccaagaggcagaggaagagccggggcagcgagagcgaggtgctgccctag

SEQ ID NO: 187338 - DNA, 4791 bp, Artificial Sequence
  derived and/or modified sequence
atggagagccgggagaccctgagcagcagccggcagcggggcggcgagtcagattttctgcccgtgtcatcagccaagcccccagctgctccaggctgcgcaggagagcctcttctcagcaccccaggtccaggcaagggcatcccagttgggggcgaacgcatggagcctgaggaggaagatgagctcggctcaggaagggacgtcgacagcaattcaaatgccgactccgagaaatgggtagccggggacggtttggaagaacaggaattcagcattaaggaggccaatttcactgaggggagcctgaaactgaaaatccagaccacaaagagagctaagaaacccccgaaaaatcttgagaactatatctgtcctccagagataaaaatcaccattaagcagtctggcgatcaaaaggtgtccagggccggaaagaatagcaaggccaccaaggaagaagaacggtctcactccaaaaaaaaactcctcaccgcaagcgaccttgctgctagtgacctgaaaggctttcagccccaggcctacgaaaggcctcaaaagcactccacactacattacgacacgggtctccctcaggatttcactggtgacaccctcaagcccaaacatcaacagaagtcctccagccaaaaccatatggactggagcacgaattcagactctggccccgtcacccagaactgttttatttccccggagtccgggagggagacggccagtacttccaaaattcccgctctcgagccggttgcaagcttcgctaaggcacaggggaagaagggatccgcaggcaatacatggtcccagcttagcaataacaacaaagatctgctcctggggggggttgccccctcaccttctagtcacagttcgccagctcctccctcaagttcagcggagtgcaacgggctgcagcctcttgtcgatcaagatggcggaggcaccaaggagccacctgagcctccaacagtaggttccaaaaagaagagttctaagaaggatgtgatttcccagaccattcccaaccccgatctggactgggttaagaacgctcagaaggcatttgataatacagagggcaaacgggaaggctatagtgctgatagtgctcaagaggcctcacccgcgaggcaaaatgtgagtagcgcttcaaaccctgaaaatgattccagccatgtgagaatcaccatcccaataaaggccccatccctggaccctactaaccacaagcggaagaaacggcagtcaatcaaagcggtggtggagaaaatcatgccggagaaggctttagcttcgggtataaccatgagctccgaggtggtcaaccggatcctttccaattctgaaggcaacaaaaaggacccacgcgtaccgaagcttagcaagatgatagaaaatgagtccccctccgtgggacttgagaccgggggcaacgctgagaaggtgattcccggcggcgttagtaaacctcggaaacctcctatggtgatgacccccccaacatgcaccgaccacagtccttctagaaagctgcccgagatacagcaccctaagttcgccgctaagcgccgctggacttgttcaaagccaaagccgagtacaatgttacgcgaagctgtgatggcgacctcagataagctcatgctggaacctccaagtgcttatccaatcactccttcttcccccctctacacgaacacagactctctaactgtcattaccccagtcaagaaaaagcggggtcgtcctaaaaagcagcctctgctgactgtcgagacaatccacgagggaacaagcaccagtcccgtcagccccatctctcgtgaatttccaggtacaaaaaagcggaagagacggcggaatctggcaaagctggcccaattagtccccggggaagataaacctatgtcagagatgaaatttcataaaaaagtggggaagcttggggtgcttgataaaaaaaccattaaaaccatcaataaaatgaagaccttgaaacgaaagaatattctgaatcagattctttcttgctccagctccgttgccctgaaggccaaagccccgcctgaaacttcacctggggcagcggccatcgagtcaaaactgggcaagcagatcaacgtatcgaagcggggcaccatttacatcggtaagaagagagggaggaagcctagggccgagctgccccctcccagcgaagagcccaaaactgccatcaaacacccgagacctgtgagttcacaaccagacgtgcccgctgtcccatccaattttcaaagcttggtcgcgagttcccctgctgctatgcatcctctaagcacacagcttggaggctcaaacggcaatctgtcaccagctagcacagagaccaatttttctgagctgaagaccatgcccaaccttcaacctattagcgctctgcccaccaagacacaaaaggggatccactcagggacatggaagttgagccctccgaggcttatggctaactcaccaagccacctctgtgagatcggttcccttaaggagattaccctctccccagtttccgaatcgcacagtgaggagactattccgtccgactccggcattggaacggataacaacagcaccagtgatcaggcagaaaaatcatcagagagtcgtaggcggtattcctttgacttttgctccctagacaatccggaagcgatacccagtgacacctctacaaaaaatcggcacggccatcggcaaaaacatttaattgtggataactttctcgctcacgaatcacttaaaaaacctaagcataagagaaagagaaagtcacttcagaaccgcgacgacttacagttcctcgcagatctcgaggagctgataaccaagttccaagtcttcaggatcagccatcgcagttacactttttatcacgaaaacccttatccatccattttccgaattaactttgaccactattaccctgtcccatacatccagtatgatcccctgctgtatctaaggcggacaagcgatttaaagagcaagaaaaagcgtggcagaccggcgaagacaaatgacacaatgactaaagtaccatttttacagggctttagttaccctattccatcaggcagctactatgccccttatgggatgccttacaccagtatgcccatgatgaatctaggctattatgggcaatatcccgcccctttgtatctgtcgcatactttgggggcagcctctccgtttatgcgccccacggtccccccaccacaattccacaccaattcacacgtcaagatgtccggagctgccaagcacaaagctaagcatggtgtgcacttacagggacctgtatccatgggactcggggacatgcaaccgtcattgaatcctcctaaggtgggctctgcatctctgtccagtggtcggctgcataagagaaagcacaaacacaagcacaaacacaaggaggaccgcatcctcggcacacacgacaacctttctggtctgtttgccggaaaggccacaggattcagctcccacatcttgtccgagagactgtcgagcgcggataaagagctccctttggtgtctgagaagaacaaacacaaggagaagcagaaacaccagcattccgaggccggccacaaggcctccaagaataattttgaagtggatactctgagcaccctgtctctgtccgacgcccagcactggacacaagccaaggagaagggcgacctctcaagcgaacccgtcgatagctgcactaaaagatattccggctctggtggagacggcgggtccaccaggtcggagaacctggatgtgttctccgagatgaaccccagtaacgacaagtgggactccgacgttagtggctctaagcggcgttcctatgagggatttggtacctaccgtgaaaaggatatccaggcattcaaaatgaataggaaggaaagatctagctacgattcaagcatgtcaccgggcatgccatccccgcatttaaaagtcgatcagaccgccgtgcatagcaaaaacgaaggctccgtgcccactatgatgacccggaaaaaacctgcagctgttgattctgtgacaatcccccctgcgccagtgctgagtttactcgcagcctccgctgccaccagtgacgcggtggggagttctttaaagaagaggtttaagcggagagagattgaggcaatccagtgcgaagtgaggaagatgtgcaattacacaaaaattctgtctacgaaaaagaatctcgatcatgtcaacaagattctgaaagccaagcgcctgcaacgccagtccaagaccggcaacaattttgtcaagaaacgccgtggacggcctcgtaagcagcccacccaattcgacgaggactcaagagaccagatgcctgtcctcgagaaatgtattgacctaccttctaaacgcgggcagaagccctcattgagtcctctcgttctggagcccgcagctagtcaggatacaatcatggccactattgaagccgttatacacatggctagagaagctcctcctctgcctcctccaccgcctcccccactgccgcctccacctcccccgccactgccgcccccacctccactccctaaaactccccgggggggcaaacgcaagcataaaccacaagcgcccgcccagcccccacagcaaagtccaccacagcagcctctgccccaagaggaggaagtcaaggcaaaaagacaacggaagagcagaggtagcgagtctgaggtgctgccatag

SEQ ID NO: 187339 - DNA, 4791 bp, Artificial Sequence
  derived and/or modified sequence
atggagagccgggagactctgagctcttcccgtcagagaggaggagagagcgactttctgccagtctcgtcagccaagcccccagcagcccctgggtgtgccggtgagccgctgctcagcactccgggtcccggaaaaggcataccagtggggggtgaaaggatggagccagaagaagaggatgagttaggttccggtcgtgatgtcgactccaattccaatgcagacagcgagaaatgggtagccggtgacggattggaggagcaagaatttagtattaaggaagcaaattttacagaaggatctttgaaactgaagattcaaactaccaagagagccaagaagcccccaaagaatctggagaattatatctgccctcccgagattaaaatcacaataaaacagtccggggatcagaaggttagcagggccggtaagaatagcaaggccactaaagaggaggagcgcagccacagcaagaaaaagctcctaactgcttctgacttggccgctagcgatctaaagggcttccaaccccaggcttatgaacgaccccagaagcattcaaccctgcactatgacactggtttaccacaggatttcaccggggatactttgaaaccaaaacaccagcagaagagctccagtcagaaccacatggactggagtactaactccgatagcggacccgttacacagaactgtttcatttcacccgagtctggcagggaaaccgcctctacttctaagattccagccctggagcccgtggcatctttcgccaaggcccagggtaagaaaggctctgccggaaatacttggagccagctcagcaataataataaggatttgctgctagggggtgtcgcaccttccccttcgagccatagctccccagcgcctccctcgtcctcggctgagtgcaacggcttacagcctcttgtggaccaggatggcggaggcacaaaggaaccccctgagcccccaacagtggggagtaagaagaaatcctccaagaaggatgtgatcagccagacaatccccaatcctgacttagattgggtgaaaaacgctcagaaagcattcgacaacaccgagggcaagagggaggggtactctgctgacagcgcccaagaggcttcccccgctcggcaaaacgtttcctccgctagcaaccctgagaacgattcgagccatgtgaggattaccattccaataaaagcccctagcctggatcctaccaaccacaagagaaaaaagcggcaatctataaaggcagtggttgagaagatcatgcctgagaaggcgctggcatcaggaataacgatgagcagtgaagtggtgaatcgcattctgagcaatagcgagggcaacaagaaggatcctagggttcccaaattaagtaagatgattgagaacgagagtccatcagtcggactcgaaaccgggggtaatgccgaaaaagtaatccccggtggcgttagtaagcctagaaagccccctatggtgatgacgccacctacctgcacagatcattccccttcaagaaaactgcccgaaattcagcaccccaagttcgccgctaagcgtagatggacgtgctcaaaaccaaaacccagcaccatgttgcgggaggctgttatggctacatcagacaaactcatgctggagcctccgagcgcctaccctatcactcctagtagtcctctctatacaaacaccgactccctcaccgttattactccagtgaaaaaaaaacggggtcggccaaagaagcagccacttcttactgtggagactatccatgagggtacgtcaacttctccagtaagtcccatctctagggagttccctgggactaaaaagcggaagaggcgaaggaacctcgccaagcttgcccaacttgttcccggagaggataagccaatgtccgaaatgaagttccataaaaaagttgggaagctgggggtgctggataagaaaactatcaagaccattaacaaaatgaaaaccctgaagaggaagaacatccttaatcagatacttagctgctccagcagcgtggcactgaaggctaaggcccctccagaaactagcccaggagccgctgctatcgaaagtaagctaggtaagcagatcaacgtgtccaagagaggcactatctacattgggaagaagcgcggtcgcaaacctcgggctgaactgccacctccgagcgaggagccaaaaaccgccattaaacacccacggcctgtttccagccagcctgacgttccagccgtcccctcaaactttcaatctctagtggcctcgtcccccgctgcaatgcatccccttagcacccaactgggaggcagtaatgggaacctgtctcccgcatctacagagacaaacttctctgaactgaaaactatgcccaaccttcaaccgatttctgcccttccgactaaaacgcagaagggaatacactccggcacttggaagctgagccctccacgactcatggctaatagcccttcccacctctgcgaaattggcagcctgaaggagatcaccctaagtcccgtatccgagtcacattctgaggaaactattccttctgacagcggtatcggtaccgacaataattccacatcggatcaggcagagaaatcctctgaaagccgtagaagatattcttttgacttttgctcattggataatcctgaggccattcctagtgatacgtccaccaagaatcggcacggacaccggcagaagcatctgattgttgacaatttcctggcccacgagagcctcaaaaagcctaagcataaacgtaaaaggaagagtctccaaaaccgcgacgatttgcaattccttgcagacctggaggagctaatcactaaatttcaagtcttcagaatctcacaccgctcatacaccttctaccatgaaaacccttacccttctatttttaggatcaactttgatcattattatccggtgccttatatccagtatgatcctctcctgtacttaaggcgaacctccgaccttaagtcgaagaagaagagaggccgacccgcaaaaaccaatgacacaatgaccaaggtcccattcctccagggcttcagctaccctataccctcgggcagttactacgccccttacggtatgccatataccagcatgcccatgatgaacctcgggtactatggccagtatcctgctcctctgtatctgagtcacaccctgggtgctgcaagcccgtttatgcggccaaccgtgccacctccacaattccatacgaactctcacgtcaagatgtctggtgccgctaaacataaagccaagcatggcgtacatttgcaggggccagtgagcatgggactgggggacatgcaacccagtctgaaccctccaaaagtgggatctgcctctctctcaagcggccgtcttcataaacgcaaacataaacacaaacataaacacaaagaagacaggattcttgggacccacgacaatctgagtggactctttgcaggcaaagcaactggttttagctcgcatatcctgtctgagaggctatcaagtgcggataaagagctccctctggtttccgagaaaaacaaacataaggagaagcagaaacatcagcatagcgaggccggtcataaagcctcaaaaaacaactttgaagtggatactctgagtactttatctctctcggacgctcagcactggacccaagccaaggaaaaaggggacctcagctccgaacctgtggattcatgtactaagcggtattccggcagcgggggagatgggggtagcacgcggtctgagaatctcgacgtgttctcggagatgaacccttccaacgacaaatgggatagtgacgtctctggctcgaagcggagatcctacgagggcttcggaacctatagggaaaaagacattcaggcctttaagatgaatagaaaggagcggtctagctatgacagttcaatgtctcctggaatgcctagtcctcacctcaaggtagatcagaccgctgtccatagtaaaaacgagggatcagtgcctacaatgatgacccgtaagaagcctgccgcagtggactccgtgaccatacctccagccccagtgctgagccttctcgctgcttccgccgcaacatccgatgcagtcggttctagcctcaaaaaaagattcaaaagaagagaaattgaagccattcagtgtgaggtgcggaaaatgtgcaactacacaaagattctgtcaactaagaaaaacttggaccatgtgaataagattctcaaggctaaacgcctccagcgccagagcaaaactggcaataacttcgtgaagaagagacgtggcaggccaagaaaacagcctacgcagttcgatgaggacagcagggatcaaatgccggtgctggagaagtgcatcgatctccccagcaagcggggtcagaagccaagcctgtctcccttggtgctggagccagccgcaagtcaggatactatcatggcgacaatcgaggccgtcatccacatggctcgcgaagccccacccctgcctcccccaccgcctccaccacttccaccgccaccccctccaccgcttcctccaccgccaccgctccccaagacccccaggggtggtaaacgcaagcataagccacaggcacccgcacagcctccgcagcaatcaccgcctcagcagccactaccccaggaagaggaggtgaaagctaagagacagaggaaatctagaggtagcgagagcgaggtgctgccgtat

SEQ ID NO: 187340 - DNA, 9899 bp, Artificial Sequence
  derived and/or modified sequence
ggttaagtggagctagagagctacattgtaacctagttggatttttttggggggggaatgtatcagaatctaacgtgtcgttaatagaaagaagaacaggcaagaagtggtccagccggcgaagttgcagatctgatctcttctgaacacctcatcgtgtctccatccctgggaatctgaccctagcaactggaccactttgttcttggaattttgggtgtcctcttttctcacctttcccttttcccttttccccttccccctcctgagaactccggaagactgtagagattgtcatggagtccagggaaaccttaagcagctcccggcaaagagggggcgagtcagacttcctgccggtctcctcagccaagcccccagctgctcctggctgtgcaggagaacctttgctctccactccaggacctgggaaggggatcccggtgggcggagagcgcatggagccagaggaggaggatgaactaggctcagggcgggatgtggattccaactccaacgcggacagtgagaaatgggtggcaggagatggtttggaagagcaggaattttctatcaaggaggcaaacttcacagagggaagtctgaagctaaagattcagaccacaaagcgggctaagaaacccccaaagaatttggagaactatatatgtccacctgagatcaagatcaccatcaagcagtctggggaccagaaggtgtcccgtgctggaaaaaatagcaaagccacgaaggaggaagaaagaagccactccaaaaagaagctcctcacagccagtgaccttgcagccagtgacctcaaaggatttcagccacaggcttacgagaggccccagaaacattcaactctccattatgacacgggcctcccacaggacttcaccggtgacaccttaaaaccaaagcaccagcaaaaaagcagcagccagaaccacatggactggtccaccaactctgacagcggacccgtcactcagaattgcttcatcagtccagagtctggcagagaaactgcaagcaccagcaagatccccgctcttgagcccgtggcttcctttgcaaaggcccagggtaagaaaggcagtgcagggaacacgtggagtcagttgtctaacaataacaaagatctgctcttgggaggtgtggctccatccccaagcagccacagctcaccagccccacccagcagctctgctgagtgcaacgggcttcagcccttggtggatcaagatggaggaggtacaaaggagcccccagaaccacctacggtgggcagcaagaaaaagtccagtaaaaaagatgtgataagtcagaccataccaaacccagacctggattgggtcaagaatgcccagaaagcatttgacaatacagaagggaaaagggaaggttattccgcagatagtgcccaagaggcatcaccagccaggcagaacgtgagttctgccagtaatcctgaaaatgactcaagtcatgtccggattactatccccatcaaggcaccctctctggatccaaccaaccataagaggaaaaaaagacagtccattaaagcggtggtggaaaagatcatgccagagaaagccttggcttctggaatcaccatgagcagtgaagtagttaacaggatactttccaactctgaggggaataagaaggatccccgtgtccctaagttgagtaaaatgatagagaatgagtccccctcagttggccttgaaactggtggaaatgctgagaaagttatcccaggaggtgtgtctaagccgcggaagccacccatggtcatgacacctccaacgtgcacagatcactctccatccagaaagctgccagaaatccagcatccaaaatttgctgcaaaacgaaggtggacttgcagcaaaccaaaacctagcaccatgcttcgagaggcagttatggccacctctgataaactgatgctggagcccccgtctgcatatcccatcaccccatccagccctctctacaccaacacagacagtcttactgtgatcactccagtcaaaaagaagcggggacgaccaaagaagcagcctttgctcacagtcgagacgattcatgagggaacttccaccagccccgtcagtcccatcagccgagagtttcctggcactaagaaaagaaagcgacgacgcaatttagcgaagttggcccagctagtgccgggagaggacaaacccatgagcgagatgaaatttcacaagaaagttggaaagctcggcgtgttggataagaagaccatcaaaactatcaataagatgaagacactcaagaggaaaaacatcttgaatcagatcttgtcctgttccagcagcgttgctctgaaggcaaaagctcccccagagaccagccctggggcagcagccattgaaagcaaactgggcaagcagattaatgtcagcaagaggggaaccatctacattggcaagaagcggggcaggaagccaagagcagagctgccacccccatccgaagaacccaaaacagccatcaagcaccccaggcctgtttctagccagccggatgttccagccgtgccttccaactttcagtcacttgtggcgtcttcaccagcagctatgcacccactttcaacacagttaggtgggtccaatggcaacctgagccctgccagcactgaaaccaatttttcagagttgaaaactatgccaaatctccagcccatcagtgctcttccaaccaaaacccaaaagggaatacacagtggaacctggaagctgtctccacccagactgatggccaactccccttcacacctgtgcgagattggctccctaaaggaaatcacgctgtcccctgtgagcgagtcccacagtgaggagacgatccccagcgacagcggcattgggacagacaacaacagcacttctgaccaagcggagaagagctcagaatcccgaaggaggtactcttttgatttctgctccctggacaacccggaggccattccgtccgacaccagcacaaagaaccggcatggccaccggcaaaagcatctcattgtggacaactttctggcccacgaaagcctcaagaagccaaagcacaagaggaaacggaaaagcctgcaaaaccgcgatgacctccagtttctggcagacctggaggagctaatcaccaagttccaagtgttcagaatctcccaccggagttacaccttctaccacgagaatccatatcccagcatttttcggattaattttgatcactattacccggtgccatatatccagtatgacccgttgctctatcttcgtaggacttcagacttgaagtcaaagaagaagcgtggtaggcctgcaaaaaccaatgacaccatgacaaaggtgccttttttacaagggttcagctaccctattcccagtggaagttactatgcaccctatggaatgccttacacatcaatgcctatgatgaaccttggttattacggtcagtacccagctcctttgtacctatcgcacacgcttggagcagcttccccattcatgaggccaacagtgccaccacctcagttccacacaaactcccacgtaaagatgtccggtgcagctaagcataaagccaagcatggagtacacctgcagggacctgttagcatgggccttggtgacatgcagccttctctgaaccctcccaaggtaggcagtgccagtctgtccagtggtcggctccataagaggaaacacaaacacaagcataagcacaaggaagaccggatcctagggacccatgacaacctgagtggtctttttgcaggcaaagccacaggcttctccagccacatcctgagcgagcggctgagtagcgcagacaaagagctcccgctggtgagtgagaagaacaagcataaggagaaacagaagcaccagcacagcgaagccggccacaaagcttctaagaacaactttgaggtggacaccctgtctacactgtcactttccgacgcccagcattggacacaggccaaggaaaaaggagacttgagcagtgagcctgtggactcatgcacgaaaagatactctggcagtggcggggatggtggcagcacgagatcagagaacctggacgtgttcagtgaaatgaacccttcgaatgacaagtgggacagtgacgtgagtgggagtaaaaggaggagctatgaaggctttggaacgtacagggaaaaggacatccaagccttcaagatgaaccgcaaggagagaagttcttatgactcctccatgtctccagggatgccaagtccccacttaaaagtggaccagacagcagtgcatagtaagaacgaaggctcagtgcccaccatgatgaccaggaagaagccagccgcagttgacagtgttacaattccaccagccccagtgttatctctccttgctgcatctgcagcaacgtcggatgcagtcggctcctccctgaagaagaggttcaagcggcgggagatcgaagccatccagtgcgaagtgcggaagatgtgcaactacaccaagatcctgtccaccaagaagaacctggaccacgtgaacaagatcctgaaggccaagcggctgcagagacaatcaaaaacaggcaacaacttcgtgaagaagaggcgcgggcgtcccaggaagcagcccacccagttcgatgaggactccagagaccaaatgccggtgctggaaaaatgcatcgacctgcccagcaaaagaggccagaagcccagcctgagcccgctggtgctggagcccgccgccagccaagacaccatcatggccaccatcgaggcggtcatccacatggcccgggaggcgccgcccctgcccccgccaccgccgccgcccctgccgccaccgccgccaccacccctgcccccgccaccccctctacccaagaccccccgaggcggaaagaggaaacacaaaccgcaggcccccgctcagcccccacagcagtcgcccccgcagcagccccttccccaggaagaggaggtgaaagccaaaaggcagaggaagtcccgagggagtgagagcgaggtccttccctagggcgggtctgggcgtctgcacctggggcctagggaactgacacgtgggaagcgcagtgagccggggcgggggcggaatcccccgctgcagggacacccacgcccttctctccagaagccgggcaggcagaatccggccagacgacggggctgagccatcaggagctcttgggaaagcaaagcagggagacaccttcagaagaagcttgtctgagcttcaccgcagctcccaccacgcggcgcttcagtacggctggatcctccgcaggcgagcggaaggcccccaggaggagcaggctggtggcactctcctgacctcacgctgccaaggtgcgccctcgactcccgatttcatttgctggccaggaaaatcgaaagggaaacaccctcaattaggaaacattccaaggggagaaaagctgcaaattgctcaactggcattgctgtaacccgttccatttaattggtttttatttcttttgattttcaagctctgctaagctttggggtaccaacgtcatcttcaggtgacctgaatctttcccttaaccgtacagtttctcgatggaattgtgtgatcagaaggtggaattctagtgataggcgacctcagacccgcattcatgttctgtgtgcctcttctattgcacatacactgatttttagcattgtctattcctatttttcctttgcccattgtacttccatatatcttttcattaacttacttgctgccttttttttttcttggtacacatttaaataaagtaatccttaacctgtgctgtaaagttcacccttggcatgctgttccaagaacctgggtttgaatcccaatcgttgtgaaacatactcagtattgataaaacctttttaataagtgatgcagagcagccaaggatatgttgacccagatgtcaaccaggctatttttatacttaaaacatgtcagcagagcataggcagaataaaatggtttaaataccccacagcaaatagagtaactgacaaaccaccaaaaactgaaaccccagacccaccagaaagacaagtgtctagcaatgccttggtacctgatctttttcattcaaataattgtcataggttgttcaaaaaaaaaaaaaaaaaggaaacaaaaacacaatagaagtccattatcccttgataattatttcttaaaagcaaatgggagtaagtgttcttatctggaaaaataaataaataaaatgctcaaagggtatcaccacttcaattttatcaagccaccttggacaaagtatccaaattgtggttgccttaataaactaaaacattattgtacataatgtaattataaatctatcagtctgcatggatgcaaactgtgtgtgacaaatcgtcttttaaatggtcaatttcagctgtacatttctcatccaagttgtactctagccattggtttagcgtggacagatactccatctctattatccatttccacagcccaaataaaatatgttaagcaggctcagaatgaatatgaagaattccatttccgtagatgttttctaaaagtcagattgtggaaatttcaaataagtattttcaatttcctccctcactccctcttaccttccccaagacatcaaacacctggcatggtagattatagaaagagacactgagagagagaattaaattttctaatgggaattagaatatctggtttacctccaaattaagtttctttacaggaagttgggaccagctggaaattgtattatcatttcggaacacaatattacttccttagagagagatggatttttgttggcaacataaaagaataagtgatggggtatctatgtgagtaaatttttaaattccaagttaatatgcttgcaaacattactgctgcgttatggcaccaagagttggttgaaattacccacgtagtcatactcctgtgctctgtcaccatggacttcacatcatttgctgcccactagttcaatcgcatttaatcctagcaatatgtaagtttaaaggactgcattcccctctactttaaagcttatatcctagatactcagtttgtgaccttggttgacctttggcatttcacgcaagttgaacagcaaaatcaaagcagccatttttaattcgtcattcccaagccctatctgagtggttccaaagtcacctgagaggaaggtttaaattagtccctctcaccccaccattgctataaaacagcaacgttttcattccaattcagccataaagaggtttctcttcttactgggttttgaaatcatttccttttttctttcgtttgcccttcttccttcctgtgttgtactatctctccaaccacgtctataagcagactcaatcttcttgcagaggaagatgagctggcactctgcaaacttctttaataaggacccaaagtttacttgacattaacctctagtaggtgagaaattccaaaaaagctttggggtacattagaatttccaaagctctgaaagatatttcaggagatttaacagcagagttgcaacttacacgtgaattctggtctatagtggtcatgtgagttaaattcgaatcctctacttgtatgaccctaggaatagattggaatactgcagaggaccaaagctgaggcatgctaaacagctgcttggaggtggaagcaagttcagtcacctactcagcttcctctctccaccacccagttcctccctcagtatcacattatttttttcttctgcttttcattaacctaactcatctcatcagtacaaccattttcttattctctaactacccccaattcctttagcctctccccacctgtccaaactcagctcagccgtgggccaatgcagcttacagacggttgcagagctaggaagaaaacccagctctcccaaccctgatcgtggaggtctctggccccccaacactgccttctgggggctgcattttttttttttttttgagaagaggtcttttgggatgcatggtgctccacatacagcttcacaaaatatttcattataagagaaaccccttgatttttatttctttttcttttgttttctggattacctgccttcagtaagcagatgcagacccacttgtaaggagtctggttagtgatgagaaaaggatgaaatctagatacaaaagtcaccttgaaggtgatgatggatctttaatccacttgactaagtgtctggaagagctacttgctcttccacccctcatctcaaatgagaggagcagaagtttaacttcctcaaatagcccagctctggctaaaacccaaagaagaaaggtcaaaggaagggaaagcatgtcaggggctggtttgtgacttggcaggaccaggaaacagcagccactgacagcccagagaaggtgactaagggctggcagaagattagaatgttaatttggctgctgtccggactaggaggccatgttcaatggcagtcagaatttgtgttctgcgcattgctgggtctataaatatgataagcaagtggtgacagaattatagtataaggtgatgtactacatgcagatcataaaggctttggttttaagacttaagtagaaaatccctctcctagcttattacccaacaatattcagataatgagcttttggagaatatctttttcctatcactagaaagatttacctgggaactgtctaaagtctacacacatatttccaaagcctttaaataccaactgcagcatggagagagaggggtggcagaagctgaaatgcctcaaaagccatttaagtgttacgttgcaggattttcagtccttctcgttatgtaaaagtagataaatatagacgttattctcaacactaccctatagtatcacagtggtccaaatgccagagcttacagataatgtcatcacagtgcctagaaactcgaactgtaatatatcgtagcattttcttggtgtttcttaaagtttctttccacaatacaaggtcctctctgcctcttgtttcttggagagttcaccccactgatgagtcttccttccctgttggactcagtcatttggggaacagtcttagaagcacatatcaaccaaggaagaaacttcctggatatctattgcccacttgcccaggtctaataaacactaaaggggggaaattgaaaggagctgccaactggtcaacgtggaagggcggttccaccctagattggtgtctttctttttcttcctttttttaaaaaaaatctatttcttaaataataataaatgcacatgatgtgttaaatatgtacatatatatttcaaaagaaaaaatggggcacaagattgtcttacaagtcgtgctggctaatttttagtttgtattcataagtggtttttaaaagccttttttaaagtgtaatttgcatgttctactttgattgtatgtaaacatattttagaacaaaaaatgtatttgtattttattgaatatagaggcaagaaaattgtacattgtttgaaatgttctttttgtaacagtttttattcataaagcatttttgtacatttaaaatgaacatggacttgctgttatttgaggcgtagatacatctagcatgcttactgtcatgctcctccatggtcttagatgttgggttttaaacatttttttctaaaagaaagctcagtcttttccgctaccagatcaggttagcacagtatagagcacttaactattaaaaaaaaaaagttaatcctattcatatgttattcattgtgtgaaattaaagacattcaattcagtctaa

SEQ ID NO: 187341 - DNA, 4791 bp, Artificial Sequence
  derived and/or modified sequence
atggagagcagagagaccctgagcagcagcagacagagaggcggcgagagcgacttcctgcccgtgagcagcgccaagccccccgccgcccccggctgcgccggcgagcccctgctgagcacccccggccccggcaagggcatccccgtgggcggcgagagaatggagcccgaggaggaggacgagctgggcagcggcagagacgtggacagcaacagcaacgccgacagcgagaagtgggtggccggcgacggcctggaggagcaggagttcagcatcaaggaggccaacttcaccgagggcagcctgaagctgaagatccagaccaccaagagagccaagaagccccccaagaacctggagaactacatctgcccccccgagatcaagatcaccatcaagcagagcggcgaccagaaggtgagcagagccggcaagaacagcaaggccaccaaggaggaggagagaagccacagcaagaagaagctgctgaccgccagcgacctggccgccagcgacctgaagggcttccagccccaggcctacgagagaccccagaagcacagcaccctgcactacgacaccggcctgccccaggacttcaccggcgacaccctgaagcccaagcaccagcagaagagcagcagccagaaccacatggactggagcaccaacagcgacagcggccccgtgacccagaactgcttcatcagccccgagagcggcagagagaccgccagcaccagcaagatccccgccctggagcccgtggccagcttcgccaaggcccagggcaagaagggcagcgccggcaacacctggagccagctgagcaacaacaacaaggacctgctgctgggcggcgtggcccccagccccagcagccacagcagccccgccccccccagcagcagcgccgagtgcaacggcctgcagcccctggtggaccaggacggcggcggcaccaaggagccccccgagccccccaccgtgggcagcaagaagaagagcagcaagaaggacgtgatcagccagaccatccccaaccccgacctggactgggtgaagaacgcccagaaggccttcgacaacaccgagggcaagagagagggctacagcgccgacagcgcccaggaggccagccccgccagacagaacgtgagcagcgccagcaaccccgagaacgacagcagccacgtgagaatcaccatccccatcaaggcccccagcctggaccccaccaaccacaagagaaagaagagacagagcatcaaggccgtggtggagaagatcatgcccgagaaggccctggccagcggcatcaccatgagcagcgaggtggtgaacagaatcctgagcaacagcgagggcaacaagaaggaccccagagtgcccaagctgagcaagatgatcgagaacgagagccccagcgtgggcctggagaccggcggcaacgccgagaaggtgatccccggcggcgtgagcaagcccagaaagccccccatggtgatgaccccccccacctgcaccgaccacagccccagcagaaagctgcccgagatccagcaccccaagttcgccgccaagagaagatggacctgcagcaagcccaagcccagcaccatgctgagagaggccgtgatggccaccagcgacaagctgatgctggagccccccagcgcctaccccatcacccccagcagccccctgtacaccaacaccgacagcctgaccgtgatcacccccgtgaagaagaagagaggcagacccaagaagcagcccctgctgaccgtggagaccatccacgagggcaccagcaccagccccgtgagccccatcagcagagagttccccggcaccaagaagagaaagagaagaagaaacctggccaagctggcccagctggtgcccggcgaggacaagcccatgagcgagatgaagttccacaagaaggtgggcaagctgggcgtgctggacaagaagaccatcaagaccatcaacaagatgaagaccctgaagagaaagaacatcctgaaccagatcctgagctgcagcagcagcgtggccctgaaggccaaggccccccccgagaccagccccggcgccgccgccatcgagagcaagctgggcaagcagatcaacgtgagcaagagaggcaccatctacatcggcaagaagagaggcagaaagcccagagccgagctgcccccccccagcgaggagcccaagaccgccatcaagcaccccagacccgtgagcagccagcccgacgtgcccgccgtgcccagcaacttccagagcctggtggccagcagccccgccgccatgcaccccctgagcacccagctgggcggcagcaacggcaacctgagccccgccagcaccgagaccaacttcagcgagctgaagaccatgcccaacctgcagcccatcagcgccctgcccaccaagacccagaagggcatccacagcggcacctggaagctgagcccccccagactgatggccaacagccccagccacctgtgcgagatcggcagcctgaaggagatcaccctgagccccgtgagcgagagccacagcgaggagaccatccccagcgacagcggcatcggcaccgacaacaacagcaccagcgaccaggccgagaagagcagcgagagcagaagaagatacagcttcgacttctgcagcctggacaaccccgaggccatccccagcgacaccagcaccaagaacagacacggccacagacagaagcacctgatcgtggacaacttcctggcccacgagagcctgaagaagcccaagcacaagagaaagagaaagagcctgcagaacagagacgacctgcagttcctggccgacctggaggagctgatcaccaagttccaggtgttcagaatcagccacagaagctacaccttctaccacgagaacccctaccccagcatcttcagaatcaacttcgaccactactaccccgtgccctacatccagtacgaccccctgctgtacctgagaagaaccagcgacctgaagagcaagaagaagagaggcagacccgccaagaccaacgacaccatgaccaaggtgcccttcctgcagggcttcagctaccccatccccagcggcagctactacgccccctacggcatgccctacaccagcatgcccatgatgaacctgggctactacggccagtaccccgcccccctgtacctgagccacaccctgggcgccgccagccccttcatgagacccaccgtgccccccccccagttccacaccaacagccacgtgaagatgagcggcgccgccaagcacaaggccaagcacggcgtgcacctgcagggccccgtgagcatgggcctgggcgacatgcagcccagcctgaacccccccaaggtgggcagcgccagcctgagcagcggcagactgcacaagagaaagcacaagcacaagcacaagcacaaggaggacagaatcctgggcacccacgacaacctgagcggcctgttcgccggcaaggccaccggcttcagcagccacatcctgagcgagagactgagcagcgccgacaaggagctgcccctggtgagcgagaagaacaagcacaaggagaagcagaagcaccagcacagcgaggccggccacaaggccagcaagaacaacttcgaggtggacaccctgagcaccctgagcctgagcgacgcccagcactggacccaggccaaggagaagggcgacctgagcagcgagcccgtggacagctgcaccaagagatacagcggcagcggcggcgacggcggcagcaccagaagcgagaacctggacgtgttcagcgagatgaaccccagcaacgacaagtgggacagcgacgtgagcggcagcaagagaagaagctacgagggcttcggcacctacagagagaaggacatccaggccttcaagatgaacagaaaggagagaagcagctacgacagcagcatgagccccggcatgcccagcccccacctgaaggtggaccagaccgccgtgcacagcaagaacgagggcagcgtgcccaccatgatgaccagaaagaagcccgccgccgtggacagcgtgaccatcccccccgcccccgtgctgagcctgctggccgccagcgccgccaccagcgacgccgtgggcagcagcctgaagaagagattcaagagaagagagatcgaggccatccagtgcgaggtgagaaagatgtgcaactacaccaagatcctgagcaccaagaagaacctggaccacgtgaacaagatcctgaaggccaagagactgcagagacagagcaagaccggcaacaacttcgtgaagaagagaagaggcagacccagaaagcagcccacccagttcgacgaggacagcagagaccagatgcccgtgctggagaagtgcatcgacctgcccagcaagagaggccagaagcccagcctgagccccctggtgctggagcccgccgccagccaggacaccatcatggccaccatcgaggccgtgatccacatggccagagaggccccccccctgcccccccccccccccccccccctgcccccccccccccccccccccctgcccccccccccccccctgcccaagacccccagaggcggcaagagaaagcacaagccccaggcccccgcccagcccccccagcagagccccccccagcagcccctgccccaggaggaggaggtgaaggccaagagacagagaaagagcagaggcagcgagagcgaggtgctgccctag

SEQ ID NO: 187342 - protein, 960 aa, Artificial Sequence
  derived and/or modified sequence
MWRLRRAAVACEVCQSLVKHSSGIKGSLPLQKLHLVSRSIYHSHHPTLKLQRPQLRTSFQQFSSLTNLPLRKLKFSPIKYGYQPRRNFWPARLATRLLKLRYLILGSAVGGGYTAKKTFDQWKDMIPDLSEYKWIVPDIVWEIDEYIDFEKIRKALPSSEDLVKLAPDFDKIVESLSLLKDFFTSGSPEETAFRATDRGSESDKHFRKVSDKEKIDQLQEELLHTQLKYQRILERLEKENKELRKLVLQKDDKGIHHRKLKKSLIDMYSEVLDVLSDYDASYNTQDHLPRVVVVGDQSAGKTSVLEMIAQARIFPRGSGEMMTRSPVKVTLSEGPHHVALFKDSSREFDLTKEEDLAALRHEIELRMRKNVKEGCTVSPETISLNVKGPGLQRMVLVDLPGVINTVTSGMAPDTKETIFSISKAYMQNPNAIILCIQDGSVDAERSIVTDLVSQMDPHGRRTIFVLTKVDLAEKNVASPSRIQQIIEGKLFPMKALGYFAVVTGKGNSSESIEAIREYEEEFFQNSKLLKTSMLKAHQVTTRNLSLAVSDCFWKMVRESVEQQADSFKATRFNLETEWKNNYPRLRELDRNELFEKAKNEILDEVISLSQVTPKHWEEILQQSLWERVSTHVIENIYLPAAQTMNSGTFNTTVDIKLKQWTDKQLPNKAVEVAWETLQEEFSRFMTEPKGKEHDDIFDKLKEAVKEESIKRHKWNDFAEDSLRVIQHNALEDRSISDKQQWDAAIYFMEEALQARLKDTENAIENMVGPDWKKRWLYWKNRTQEQCVHNETKNELEKMLKCNEEHPAYLASDEITTVRKNLESRGVEVDPSLIKDTWHQVYRRHFLKTALNHCNLCRRGFYYYQRHFVDSELECNDVVLFWRIQRMLAITANTLRQQLTNTEVRRLEKNVKEVLEDFAEDGEKKIKLLTGKRVQLAEDLKKVREIQEKLDAFIEALHQEK

SEQ ID NO: 187343 - DNA, 2883 bp, Artificial Sequence
  derived and/or modified sequence
atgtggcgcctgcgccgggcggctgtggcatgtgaggtctgccagtctctcgtgaagcattcctctggtatcaagggctctcttccgttacagaaattgcatctcgtgtccagatccatttatcacagccatcatccaaccctgaagttacagagaccgcaactcagaacctccttccaacagtttagcagtctaacaaatctaccactccggaaactgaaattctctcccattaagtacggctaccagccccgaagaaatttttggcccgccagactcgctacacgtctgctcaaactgagatatctgatcctaggctcagcagttggcggtggatacacagccaaaaagacatttgaccagtggaaagatatgatccccgatctgtccgagtataaatggatagtgcctgacatcgtctgggaaattgatgagtatattgacttcgaaaagataagaaaggcgctcccttcttctgaagatctggtgaagttagccccggacttcgataaaatcgtagagtctctgtcgctgttgaaggacttcttcaccagtgggagccctgaggagacagcgttccgcgcgaccgaccgtggcagcgaatcagataagcacttcaggaaggttagtgataaggagaagattgaccaattgcaagaagagctgctgcacacccagctcaaatatcagagaatattagagagactggaaaaggagaacaaggagctgcgtaagttagttctccagaaagatgataagggcatccaccacaggaaattgaagaagagtttaattgatatgtactcggaagtgctagatgtgctcagtgattacgacgcatcttataatacgcaagaccatctgcctagagtagtcgttgtcggggaccagagtgccggaaagacatctgtattagaaatgatcgctcaggcgcgcatttttccgagaggctctggcgagatgatgactcgatctcctgtcaaggtcacactcagtgagggcccccaccatgtagcactgtttaaagactcatccagggagttcgacctgaccaaagaggaagacctcgccgccctgcggcatgaaatagaactccgaatgcgcaaaaacgtcaaggagggttgcacagtttccccagaaacaatcagcctcaatgtaaagggccccgggctacagagaatggtccttgtggacctgcccggggtaattaatactgtaacatccggtatggcccccgatactaaagaaacaatcttctctatcagtaaggcttacatgcagaaccccaatgccataattctctgcattcaagatggaagcgtggacgcagagagaagtatagtgacagaccttgtgtcacagatggatccgcacggcagaaggactatctttgtgcttaccaaagtcgatctcgccgaaaagaacgttgcctctccttcgcgcattcaacagatcattgagggcaaactctttccaatgaaggctcttggttacttcgccgtcgtcaccggcaagggcaattcaagcgagagcattgaggctatccgtgagtacgaggaagagttcttccagaattctaagctgctgaagacatcaatgctgaaggctcaccaggtgactacccgtaatctatcccttgctgtgtccgattgtttttggaaaatggtgcgggaatccgttgagcagcaggcagactcctttaaggccacccggttcaatctggagacagagtggaaaaataattaccctcgcctgcgcgagctcgatcgcaacgaactgttcgagaaagctaagaatgagatcttggatgaagtgatttccctttcccaggtgacacccaaacactgggaagagatcctgcagcaaagcctttgggaaagggtgagtacccacgtcattgagaatatttacttgcccgcagctcagacaatgaattcaggcaccttcaacacaacagttgatataaaactcaagcaatggaccgacaagcagctccctaataaggcggtggaggtggcatgggagacgctgcaggaagagttttcacgcttcatgactgaaccaaagggtaaggagcacgatgacatttttgataagcttaaagaggcagtcaaagaggagtcaatcaaaaggcataagtggaacgatttcgccgaggacagtctgagagttatacaacacaatgcactcgaggacagatccattagtgacaagcaacagtgggatgcagctatttattttatggaggaggccctgcaggccagattaaaagacactgagaatgctatcgaaaatatggtgggaccagactggaaaaaaagatggttgtattggaaaaaccgcacccaggagcagtgcgtccacaacgagactaagaacgaactagagaaaatgctcaagtgcaacgaggagcaccctgcttacctggctagcgacgagatcacaaccgttagaaaaaatttagaatccagaggcgtggaagtggatcccagtctcattaaggacacgtggcaccaggtctatcgtaggcacttcctcaaaacagcactcaaccattgtaatttatgccgccgaggattctactactatcagcgccatttcgtggacagcgagttggaatgtaacgacgtcgtgctattttggcgaatacagcggatgctggctatcactgcgaacactttgcgacagcagctgactaatacagaggtaagaaggcttgagaaaaacgtgaaggaagtgctcgaggatttcgcggaggacggggaaaaaaaaataaagctgctcaccggaaaaagagttcagctcgctgaagatcttaaaaaggtccgggagattcaggagaagttagacgcttttatagaagccctccatcaggaaaagtag

SEQ ID NO: 187344 - DNA, 2883 bp, Artificial Sequence
  derived and/or modified sequence
atgtggaggctgcggcgggctgctgtggcctgtgaggtgtgccagagcctggtgaagcacagcagcggcatcaagggcagcctgcccctgcagaagctgcacctggtgagccgcagcatctaccacagccaccaccccaccctgaagctgcagaggccccagctgcggaccagcttccagcagttcagcagcctgaccaacctgcccctgaggaagctgaagttcagccccatcaagtatggctaccagcccaggaggaacttctggccagcccggctggccacccggctgctgaagctgcgctacctgatcctgggcagcgctgtgggcggcggctacacagccaagaagacctttgaccagtggaaggacatgatcccagacctgtctgagtacaagtggatcgtgcctgacatcgtgtgggagattgatgagtacatcgactttgagaagatcaggaaggccctgcccagcagcgaggacctggtgaagctggccccagactttgacaagatcgtggagagcctgagcctgctgaaggacttcttcaccagcggcagccctgaggagacagccttccgggccacagaccggggcagcgagagtgacaagcacttcaggaaggtgtctgacaaggagaagattgaccagctgcaggaggagctgctgcacacccagctgaagtaccagaggatcctggagcggctggagaaggagaacaaggagctgaggaagctggtgctgcagaaggatgacaagggcatccaccacaggaagctgaagaagagcctgattgacatgtacagcgaggtgctggatgtgctgagtgactatgatgccagctacaacacccaggaccacctgccccgggtggtggtggtgggggaccagagcgctgggaagacctctgtgctggagatgattgcccaggcccgcatcttcccccggggcagcggggagatgatgaccaggagccctgtgaaggtgaccctgtctgagggcccccaccacgtggccctcttcaaggacagcagccgggagtttgacctgaccaaggaggaggacctggccgccctgcggcatgaaattgagctgaggatgaggaagaatgtgaaggagggctgcaccgtgtccccagagaccatcagcctgaatgtgaagggccctggcctgcagaggatggtgctggtggacctgcccggggtcatcaacacagtgaccagcggcatggccccagacaccaaggagaccatcttcagcatcagcaaggcctacatgcagaaccccaatgccatcatcctgtgcatccaggacggctctgtggatgctgagaggagcatcgtgacagacctggtgtcccagatggacccccacggccgccgcaccatctttgtgctgaccaaggtggacctggccgagaagaatgtggccagccccagccgcatccagcagatcatcgagggcaagctgttccccatgaaggccctgggctactttgctgtggtgactggaaaaggaaacagcagcgagagcattgaggccatccgggagtatgaggaggagttcttccagaacagcaagctgctgaagacctccatgctgaaggcccaccaggtgaccaccaggaacctgagcctggccgtgtctgactgcttctggaagatggtgcgggagagcgtggagcagcaggccgacagcttcaaggccacccgcttcaacctggagacagagtggaagaacaactacccccggctgcgggagctggacagaaatgagctgtttgagaaggccaagaatgagatcctggatgaagtcatcagcctgagccaggtgacccccaagcactgggaggagatcctgcagcagagcctgtgggagcgggtgtccacccacgtgattgagaacatctacctgcctgctgcccagaccatgaacagcggcaccttcaacaccaccgtggacatcaagctgaagcagtggacagacaagcagctgcccaacaaggctgtggaggtggcctgggagaccctgcaggaggagttcagccgcttcatgacagagcccaagggcaaggagcatgatgacatctttgacaagctgaaggaggccgtgaaggaggagagcatcaagaggcacaagtggaatgactttgctgaggacagcctgcgggtcatccagcacaatgccctggaggacaggagcatcagtgacaagcagcagtgggatgctgccatctacttcatggaggaggccctgcaggcccggctgaaggacacagaaaatgccatcgagaacatggtgggccctgactggaagaagcgctggctgtactggaagaacagaacccaggagcagtgtgtgcacaatgagaccaagaatgagctggagaagatgctgaagtgcaatgaggagcacccagcctacctggccagtgatgagatcaccaccgtgaggaagaacctggagagcagaggagtggaggtggaccccagcctcatcaaggacacctggcaccaggtgtaccgccgccacttcctgaagacagccctgaaccactgcaacctgtgcagaagaggcttctactactaccagaggcactttgtggacagcgagctggagtgcaatgatgtggtgctcttctggaggatccagaggatgctggccatcacagccaacaccctgcggcagcagctgaccaacacagaggtgcggcggctggagaagaatgtgaaggaggtgctggaggactttgctgaagatggagagaagaagatcaagctgctgaccgggaagagggtgcagctggccgaggacctgaagaaggtgcgggagatccaggagaagctggatgccttcatcgaggccctgcaccaggagaagtag

SEQ ID NO: 187345 - DNA, 2883 bp, Artificial Sequence
  derived and/or modified sequence
atgtggcggctgcggcgggccgccgtggcctgcgaggtgtgccagagtctggtcaaacactcatcaggcattaaggggagtttgcctctgcaaaagttgcatttagtcagccgcagcatataccactctcaccacccaacactaaagttgcagagaccgcagctgcgcactagctttcagcagttcagtagcttgaccaatttaccactccgcaagctgaagttcagcccaatcaaatatggataccaaccccgaagaaacttctggccagccagactagccaccaggcttctcaaactgcgttatcttatcctgggatctgcggtggggggagggtatacagctaagaagaccttcgaccagtggaaggacatgattcctgatctctccgaatacaagtggattgtgccagatatagtttgggagattgatgagtatattgatttcgagaaaatccgcaaagccctcccaagttccgaagacctagtgaaactggcaccagactttgacaagatcgtggagagcctgtctttgctgaaagatttctttacctccgggtcgcctgaggaaaccgccttccgcgcaaccgaccgcggaagcgaatccgataaacacttccgtaaggtgtcagataaggagaagatcgaccaactgcaagaggaactgctgcatacgcagctcaaatatcagcgcatactagagcggctggagaaggagaacaaggaacttcgcaaactggtgctacagaaggatgacaagggcatccatcatcgcaaactgaagaaatcattgattgacatgtatagtgaagtcctggacgtgctgagcgactacgacgcatcctacaatacccaggatcacttgccaagggtggtggtggttggcgatcagagtgccggcaaaacgagtgtgctggagatgatcgcccaggctcgtatctttcctaggggatctggtgaaatgatgacaagaagtcctgtgaaggtcaccctctctgagggcccacaccacgtggccctgtttaaagacagttcaagggagtttgacctgacaaaagaagaagacctcgcggccctgcgccatgagatcgagctgcgcatgaggaagaacgtgaaggagggctgtaccgtgtcccctgaaacgatttccctcaatgtcaagggcccaggactgcaacggatggtgttagtggacctacctggagtgattaacacagttacatccgggatggcccccgacacgaaagagacaatcttttcgatatcaaaggcctacatgcagaacccaaacgccatcatcctgtgcattcaagatggatctgttgatgccgaacgtagtatcgttaccgacttagtgtcccagatggatccccacggacgccggactattttcgtcctaaccaaagtggacctagctgagaaaaatgtggcctcgccgagcagaatccagcagattatcgagggcaagctgttccctatgaaagcactcgggtacttcgccgtggtcacagggaaggggaactccagcgaaagcatagaggcgatccgagagtatgaggaagaatttttccagaattccaagcttttgaagacgtccatgctgaaagcccaccaggttaccacccgaaacctgagcctggcagtatccgattgcttttggaaaatggtgagagaatccgtggaacaacaggccgacagtttcaaggccactcgattcaatctagagaccgaatggaagaataactatcctcgcctgagggaactggatcggaatgaactctttgaaaaggctaagaacgaaatcctcgacgaagtcatcagtctctctcaggtgacgccaaaacactgggaggagattttgcagcaaagtctgtgggagcgggtgtccacccacgtgatcgagaacatctatctccctgcagcgcagactatgaattcaggaacatttaataccacagtggacattaaactgaagcaatggaccgataaacaactgccgaacaaggcggtagaagtggcctgggagactctgcaagaggaattctctcgattcatgaccgaaccaaaggggaaagagcacgacgatattttcgataaacttaaagaagcagtgaaggaagagagcattaagagacataagtggaacgatttcgctgaagatagtcttcgggtaattcagcataatgctctggaagaccggagcatttcagataaacagcagtgggacgccgccatctatttcatggaggaggctcttcaagccaggctgaaagatactgaaaacgctatcgagaatatggtcggacctgattggaagaaacgatggctgtattggaagaaccgtacacaggagcagtgtgtgcacaacgagactaaaaatgagctcgagaagatgttgaaatgcaacgaggaacatcccgcgtacctggcgagcgatgaaattaccacggttcgtaagaacctggaaagtcgtggcgtggaagttgacccttctttaattaaggacacatggcatcaggtgtatagaaggcacttcctgaaaaccgctttaaaccactgtaacctgtgtaggagaggcttttactattatcagaggcatttcgtggactccgagcttgagtgtaacgatgtggtgttgttctggaggatacagcgcatgctggctattacagcaaatacacttaggcaacaactgaccaacacggaagtcagacgtctggaaaagaacgttaaagaggtgctcgaggactttgcagaagatggagagaagaaaattaagctgttgactggtaagcgagtgcagctcgccgaggatctcaaaaaggttcgcgaaatccaagagaagctggacgcattcatcgaagctctgcaccaggaaaagtag

SEQ ID NO: 187346 - DNA, 6340 bp, Artificial Sequence
  derived and/or modified sequence
gtgctgcccgcctagaaagggtgaagtggttgtttccgtgacggactgagtacgggtgcctgtcaggctcttgcggaagtccatgcgccattgggagggcctcggccgcggctctgtgcccttgctgctgagggccacttcctgggtcattcctggaccgggagccgggctggggctcacacgggggctcccgcgtggccgtctcggcgcctgcgtgacctccccgccggcgggatgtggcgactacgtcgggccgctgtggcctgtgaggtctgccagtctttagtgaaacacagctctggaataaaaggaagtttaccactacaaaaactacatctggtttcacgaagcatttatcattcacatcatcctaccttaaagcttcaacgaccccaattaaggacatcctttcagcagttctcttctctgacaaaccttcctttacgtaaactgaaattctctccaattaaatatggctaccagcctcgcaggaatttttggccagcaagattagctacgagactcttaaaacttcgctatctcatactaggatcggctgttgggggtggctacacagccaaaaagacttttgatcagtggaaagatatgataccggaccttagtgaatataaatggattgtgcctgacattgtgtgggaaattgatgagtatatcgattttgagaaaattagaaaagcccttcctagttcagaagaccttgtaaagttagcaccagactttgacaagattgttgaaagccttagcttattgaaggacttttttacctcaggttctccggaagaaacggcgtttagagcaacagatcgtggatctgaaagtgacaagcattttagaaaggtgtcagacaaagagaaaattgaccaacttcaggaagaacttctgcacactcagttgaagtatcagagaatcttggaacgattagaaaaggagaacaaagaattgagaaaattagtattgcagaaagatgacaaaggcattcatcatagaaagcttaagaaatctttgattgacatgtattctgaagttcttgatgttctctctgattatgatgccagttataatacgcaagatcatctgccacgggttgttgtggttggagatcagagtgctggaaagactagtgtgttggaaatgattgcccaagctcgaatattcccaagaggatctggggagatgatgacacgttctccagttaaggtgactctgagtgaaggtcctcaccatgtggccctatttaaagatagttctcgggagtttgatcttaccaaagaagaagatcttgcagcattaagacatgaaatagaacttcgaatgaggaaaaatgtgaaagaaggctgtaccgttagccctgagaccatatccttaaatgtaaaaggccctggactacagaggatggtgcttgttgacttaccaggtgtgattaatactgtgacatcaggcatggctcctgacacaaaggaaactattttcagtatcagcaaagcttacatgcagaatcctaatgccatcatactgtgtattcaagatggatctgtggatgctgaacgcagtattgttacagacttggtcagtcaaatggaccctcatggaaggagaaccatattcgttttgaccaaagtagacctggcagagaaaaatgtagccagtccaagcaggattcagcagataattgaaggaaagctcttcccaatgaaagctttaggttattttgctgttgtaacaggaaaagggaacagctctgaaagcattgaagctataagagaatatgaagaagagttttttcagaattcaaagctcctaaagacaagcatgctaaaggcacaccaagtgactacaagaaatttaagccttgcagtatcagactgcttttggaaaatggtacgagagtctgttgaacaacaggctgatagtttcaaagcaacacgttttaaccttgaaactgaatggaagaataactatcctcgcctgcgggaacttgaccggaatgaactatttgaaaaagctaaaaatgaaatccttgatgaagttatcagtctgagccaggttacaccaaaacattgggaggaaatccttcaacaatctttgtgggaaagagtatcaactcatgtgattgaaaacatctaccttccagctgcgcagaccatgaattcaggaacttttaacaccacagtggatatcaagcttaaacagtggactgataaacaacttcctaataaagcagtagaggttgcttgggagaccctacaagaagaattttcccgctttatgacagaaccgaaagggaaagagcatgatgacatatttgataaacttaaagaggctgttaaggaagaaagtattaaacgacacaagtggaatgactttgcggaggacagcttgagggttattcaacacaatgctttggaagaccgatccatatctgataaacagcaatgggatgcagctatttattttatggaagaggctctgcaggctcgtctcaaggatactgaaaatgcaattgaaaacatggtgggtccagactggaaaaagaggtggttatactggaagaatcggacccaagaacagtgtgttcacaatgaaaccaagaatgaattggagaagatgttgaaatgtaatgaggagcacccagcttatcttgcaagtgatgaaataaccacagtccggaagaaccttgaatcccgaggagtagaagtagatccaagcttgattaaggatacttggcatcaagtttatagaagacattttttaaaaacagctctaaaccattgtaacctttgtcgaagaggtttttattactaccaaaggcattttgtagattctgagttggaatgcaatgatgtggtcttgttttggcgtatacagcgcatgcttgctatcaccgcaaatactttaaggcaacaacttacaaatactgaagttaggcgattagagaaaaatgttaaagaggtattggaagattttgctgaagatggtgagaagaagattaaattgcttactggtaaacgcgttcaactggcggaagacctcaagaaagttagagaaattcaagaaaaacttgatgctttcattgaagctcttcatcaggagaaataaattaaaatcgtactcataatcagctctgcatacatctgaagaacaaaaacatcaacgtcttttgtccagcctctttttcttctgctgttccacctttctaaacatacaataaagtcatgggataaaaataatcgatgtatgttacgggcgctttaaccatcagctgcctctcgaatggaagaacagtggtaatggattaacatcctattttgttgtactaaagtgacaaatcggaataatataattggtatggccattaggttcagtccttgaagataagaaacttgttctctgtttgttgtcttatttgtggtggcactcgtttaatggattaactgaggttgctcaatgttcagtttcttttccagaaatacaatgctaggtgttttgaaataaaacttatatagcaattgtttaaagttatcaattgtatataaaatcacagtagcctgctaaatcattgtatgtgtctgtagtattctattcccagaaactatttgaccatgataattcagtttatattcaccacatgaaagaaaaatgggtaacagaagaacccttaaaacaggttaatttggattgtaacgttcagtgaaagaaatttcaacccttcatagccagcgaagaaatttgccttggaagccaagtcagtaccagcttacctatttgattcagttgctgttttctcactctctatatccatttgaaattgatttattttagatgttgtatacttacgttaggctttctgttaatagtggtttttctcctgttgacagagccaccggattatgacacaggatgaggaagattaaggataatcaattgactaatttcatttagaatattatcaaacatttcaactaggtatcagaaaaaggctttctttcataagactattttaaatagaaattatttcaacaattaaagtaatgttgaccatccccctctcagctgaataaagaaaaatttagttcaatttattgcaatttaattacaatactaccttcacaacattttcatgtgttttaaataaatattttttaattggctaaaggacattcaagcaaagaaatgctttctttacttaaaatgtctatctcatttgctgccttttcactaagcctttactttgttaataaaagtgtccattgtgtgatgtttttgattttacagtttgctaaatcttattttcttggagttgctttttggtaacagccccattgctactccccattttattgttttacatcaatgcatgcttcgttgtgatccctcaagatgtaacacttggtatgctcggttgaggatatgaaaaaatacttccgaaaccaggaattcaatgtatgtttgttttatactgtttgataagaaaagtaggtccagccttaagcagcacagatgcgctggtagatgcatagtcaggaactttttttatttcttttaggtctagggacaggagtgaatagaaagggaggagagctctattatgttctatacacagattaggagatgaccttactgggtacacccctctaaccagtgcttacaggttaatgcatgttaatgaatatttttgcagttgtaaagcataacaattacaactacacatctatttctaaagaataaaacaggaccatatttatttacttctgtcaactatagaaagaaagaccttcagctgtatttccacagatttctcccaaggaaaaggctaatattagtcactactgttatcacatccctttgtataagttttaaaaagagatggagggagatcttcatttctttgaggagatcagtattgtaacgtatgtgaatagatgataacaattaatattactaaaagtcccacatgagagtcctgacgccctctccatgccccacagtaatgtggcttctttcatgggtttttttttcttctttttagctgatctcatcctaagcatgctttatttttccttgaaagctaggtatttatcaactgcagatgttattgaaagaaaataaaattcagtctcaagagtaaaccctgtgtcttgtgtctgtagttcaaaagtcagaaatgattctaatttaaacaaaaagatactaaatatacagaagttaaattcgaactagccacagaatcatttgtttttatgtcagaatttgcaaagagtggagtggacaaagctctgtatggaagactgaacaactgtaaatagatgatatccaaacttaatttggctaggacttcaattttaaaaatcagtgtacctaggcagtgcacagcacgaaataagtggcccttgcagcttccccgtttaacccactgtgctatagttgcgggtggaacagtcaacctttctagtagtttatgatattgccctctttgtattcccattttctacagttttttccgcagacttctttctgcaaattattcagcctccaaatgcaaatgaatgatataaaaataagtagggaacatggcagagagtggtgcttcccagcctcacaatgtgggaatttgacataggatgagagtcagagtataggtttaaaagataaaatctttagttaataattttgtatttatttattctagatgtatgtatctgaggaaagaaatctggtatttttgctttccaataaaggggatcaaagtaatggtttttctctcagttctctaagctggtctatgttatagctctagcagtatggaaatgtgctttaaaatatgcttaccttttgaatgatcatggctatatgttgttgagatatttgaaacttaccttgttttcacttgtgcactgtgaatgaactttgtattatttttttaaaaccttcacattacgtgtagatattattgcaacttatattttgcctgagcttgatcaaaggtcatttgtgtagatgagtaattaaaaaatatttaaatcacattataattctattattggagagcatcttttaaatttttttctgttttaacgagggaaagagaaacctgtatacctagggtcattatttgaccccatagtataaccagattcatggtctaacaagctctcagtgtggcttttctctgaatgcttgaatttcacatgccttgcatttcacagttgtactccatggtcaaccggtgctttttttcacatcgtggtacttgtcaaaacattttgttattttccttggtaaaatatataaaaaaggttttctaatttcactttgctgccaa

SEQ ID NO: 187347 - DNA, 2883 bp, Artificial Sequence
  derived and/or modified sequence
atgtggcgactgaggcgggctgcggttgcgtgcgaggtctgccagtccctcgtcaaacactccagtggcatcaagggtagtctgccgctacagaagctgcacctggtctcaaggtctatctaccattctcaccatcctacactcaaattacagagaccccaacttcggacatctttccagcagttctcgtcactcactaacctcccactgaggaaattaaaattctcaccgattaaatatggctatcagccgagacggaacttttggcctgcccgactggccacacgactcctgaagttgcgatacctaatcctggggtctgccgtaggaggcggatacactgctaagaagactttcgatcagtggaaggatatgatccccgatttgtcagaatataagtggatagtgccagatatagtttgggagatagacgagtatattgactttgaaaagattaggaaagccctgccctcttccgaggatctcgttaagctggctcccgatttcgataagattgtcgaaagcctctcattgttaaaagatttcttcaccagcggctctcctgaggaaacagcctttcgggcaaccgacagaggatccgagagcgataagcactttaggaaggtgagcgacaaagaaaaaatcgatcagttacaggaagagctgctgcacacccagctgaagtaccaacggattctggagaggctggaaaaggaaaacaaggagctgagaaaacttgttcttcagaaggacgataaggggattcaccaccggaagctgaagaagagcttaatcgacatgtattctgaggtcttagacgtgcttagtgactatgacgcttcttacaatacgcaagatcatcttccaagagtagtggtagtgggagatcagagtgccggaaagactagtgtcttagagatgattgcccaggctaggatcttccccagaggaagcggcgagatgatgactcgttcccccgtgaaagttactctatccgagggcccacatcacgtcgctctgtttaaggacagctctagggaatttgacctgactaaagaggaggatctcgccgctctgcgccatgaaattgagcttagaatgcggaagaacgtgaaggaaggttgcacagtcagtccagagacaatctcattgaatgtcaaggggcctggcttacaaagaatggtgcttgtcgatctgccaggggtcattaacaccgtcacttcgggtatggcacccgacacaaaggagactatttttagcataagcaaagcttatatgcagaaccccaacgccattatcctttgtatccaggacggcagtgtggatgctgaacgcagtatagtgaccgacctggttagtcaaatggacccccacggcagaaggactatcttcgtcctgactaaagtagatctcgcggagaagaatgtggcatccccctccaggattcaacagattatcgaaggcaaactatttccaatgaaagctctgggctatttcgccgttgtcactggcaaggggaatagctctgagtctatagaggcaatacgagaatatgaagaggagttcttccagaatagtaagctgcttaagactagcatgctgaaagcccaccaagtgacaactaggaatctgtctttggcggtttcggattgtttctggaagatggtgagagagtccgtggaacagcaggctgatagcttcaaggcaactaggttcaacctcgagacagagtggaaaaataactacccacgtttgagggagcttgatagaaatgaacttttcgagaaggccaagaatgaaatcctggatgaagttatttctctctcccaagtcacacctaagcactgggaagagatattgcagcagagcctgtgggaaagagtctctactcacgttatcgagaacatttacctccccgctgcccagacgatgaattccggcactttcaacaccactgtggatatcaaactgaagcagtggaccgataaacagttacccaataaggccgtcgaggtggcatgggagaccctacaagaggaattttccagatttatgacggaaccaaagggtaaggagcatgatgatatttttgataaactgaaggaggctgtcaaagaggagagtattaagcgtcataaatggaacgacttcgccgaggatagcctgcgtgtgatccagcacaacgccctggaagaccggtctatctctgacaagcagcagtgggacgcagctatctattttatggaggaggctcttcaggcgaggcttaaggataccgagaacgcgatagagaacatggtgggacccgattggaagaaacggtggctttactggaagaaccgcacacaagagcagtgcgtacataacgagacaaagaatgagctggaaaagatgctgaagtgtaacgaggaacatcccgcttacctggcgtcggacgaaataaccactgtgcggaagaaccttgaaagcagaggtgttgaggtggatccatcattgatcaaggacacatggcatcaggtctaccgtcggcacttccttaaaaccgcacttaaccattgcaacctttgcaggcggggtttttattactatcagaggcattttgtggattccgagctggagtgtaacgacgtggtgctcttctggcgcatccagcgaatgctcgctataaccgccaacaccctgagacaacagctaactaatacagaggtccgtaggctggagaaaaacgtgaaagaggtcctggaagacttcgccgaggacggggaaaaaaaaattaagttgttgactggcaagagggtgcagctggccgaggacctcaagaaggtcagggagattcaggaaaagctcgacgcatttattgaggcactacaccaggaaaagtag

SEQ ID NO: 187348 - DNA, 2883 bp, Artificial Sequence
  derived and/or modified sequence
atgtggagactgagaagagccgccgtggcctgcgaggtgtgccagagcctggtgaagcacagcagcggcatcaagggcagcctgcccctgcagaagctgcacctggtgagcagaagcatctaccacagccaccaccccaccctgaagctgcagagaccccagctgagaaccagcttccagcagttcagcagcctgaccaacctgcccctgagaaagctgaagttcagccccatcaagtacggctaccagcccagaagaaacttctggcccgccagactggccaccagactgctgaagctgagatacctgatcctgggcagcgccgtgggcggcggctacaccgccaagaagaccttcgaccagtggaaggacatgatccccgacctgagcgagtacaagtggatcgtgcccgacatcgtgtgggagatcgacgagtacatcgacttcgagaagatcagaaaggccctgcccagcagcgaggacctggtgaagctggcccccgacttcgacaagatcgtggagagcctgagcctgctgaaggacttcttcaccagcggcagccccgaggagaccgccttcagagccaccgacagaggcagcgagagcgacaagcacttcagaaaggtgagcgacaaggagaagatcgaccagctgcaggaggagctgctgcacacccagctgaagtaccagagaatcctggagagactggagaaggagaacaaggagctgagaaagctggtgctgcagaaggacgacaagggcatccaccacagaaagctgaagaagagcctgatcgacatgtacagcgaggtgctggacgtgctgagcgactacgacgccagctacaacacccaggaccacctgcccagagtggtggtggtgggcgaccagagcgccggcaagaccagcgtgctggagatgatcgcccaggccagaatcttccccagaggcagcggcgagatgatgaccagaagccccgtgaaggtgaccctgagcgagggcccccaccacgtggccctgttcaaggacagcagcagagagttcgacctgaccaaggaggaggacctggccgccctgagacacgagatcgagctgagaatgagaaagaacgtgaaggagggctgcaccgtgagccccgagaccatcagcctgaacgtgaagggccccggcctgcagagaatggtgctggtggacctgcccggcgtgatcaacaccgtgaccagcggcatggcccccgacaccaaggagaccatcttcagcatcagcaaggcctacatgcagaaccccaacgccatcatcctgtgcatccaggacggcagcgtggacgccgagagaagcatcgtgaccgacctggtgagccagatggacccccacggcagaagaaccatcttcgtgctgaccaaggtggacctggccgagaagaacgtggccagccccagcagaatccagcagatcatcgagggcaagctgttccccatgaaggccctgggctacttcgccgtggtgaccggcaagggcaacagcagcgagagcatcgaggccatcagagagtacgaggaggagttcttccagaacagcaagctgctgaagaccagcatgctgaaggcccaccaggtgaccaccagaaacctgagcctggccgtgagcgactgcttctggaagatggtgagagagagcgtggagcagcaggccgacagcttcaaggccaccagattcaacctggagaccgagtggaagaacaactaccccagactgagagagctggacagaaacgagctgttcgagaaggccaagaacgagatcctggacgaggtgatcagcctgagccaggtgacccccaagcactgggaggagatcctgcagcagagcctgtgggagagagtgagcacccacgtgatcgagaacatctacctgcccgccgcccagaccatgaacagcggcaccttcaacaccaccgtggacatcaagctgaagcagtggaccgacaagcagctgcccaacaaggccgtggaggtggcctgggagaccctgcaggaggagttcagcagattcatgaccgagcccaagggcaaggagcacgacgacatcttcgacaagctgaaggaggccgtgaaggaggagagcatcaagagacacaagtggaacgacttcgccgaggacagcctgagagtgatccagcacaacgccctggaggacagaagcatcagcgacaagcagcagtgggacgccgccatctacttcatggaggaggccctgcaggccagactgaaggacaccgagaacgccatcgagaacatggtgggccccgactggaagaagagatggctgtactggaagaacagaacccaggagcagtgcgtgcacaacgagaccaagaacgagctggagaagatgctgaagtgcaacgaggagcaccccgcctacctggccagcgacgagatcaccaccgtgagaaagaacctggagagcagaggcgtggaggtggaccccagcctgatcaaggacacctggcaccaggtgtacagaagacacttcctgaagaccgccctgaaccactgcaacctgtgcagaagaggcttctactactaccagagacacttcgtggacagcgagctggagtgcaacgacgtggtgctgttctggagaatccagagaatgctggccatcaccgccaacaccctgagacagcagctgaccaacaccgaggtgagaagactggagaagaacgtgaaggaggtgctggaggacttcgccgaggacggcgagaagaagatcaagctgctgaccggcaagagagtgcagctggccgaggacctgaagaaggtgagagagatccaggagaagctggacgccttcatcgaggccctgcaccaggagaagtag

SEQ ID NO: 187349 - protein, 516 aa, Artificial Sequence
  derived and/or modified sequence
MGLHFKWPLGAPMLAAIYAMSMVLKMLPALGMACPPKCRCEKLLFYCDSQGFHSVPNATDKGSLGLSLRHNHITELERDQFASFSQLTWLHLDHNQISTVKEDAFQGLYKLKELILSSNKIFYLPNTTFTQLINLQNLDLSFNQLSSLHPELFYGLRKLQTLHLRSNSLRTIPVRLFWDCRSLEFLDLSTNRLRSLARNGFAGLIKLRELHLEHNQLTKINFAHFLRLSSLHTLFLQWNKISNLTCGMEWTWGTLEKLDLTGNEIKAIDLTVFETMPNLKILLMDNNKLNSLDSKILNSLRSLTTVGLSGNLWECSARICALASWLGSFQGRWEHSILCHSPDHTQGEDILDAVHGFQLCWNLSTTVTVMATTYRDPTTEYTKRISSSSYHVGDKEIPTTAGIAVTTEEHFPEPDNAIFTQRVITGTMALLFSFFFIIFIVFISRKCCPPTLRRIRQCSMVQNHRQLRSQTRLHMSNMSDQGPYNEYEPTHEGPFIIINGYGQCKCQQLPYKECEV

SEQ ID NO: 187350 - DNA, 1551 bp, Artificial Sequence
  derived and/or modified sequence
atgggtttgcacttcaaatggccccttggtgctcccatgctggccgccatctacgctatgtccatggtgctgaaaatgctgcctgccctgggaatggcgtgcccgcccaaatgcaggtgcgagaaactcctcttttattgcgatagtcaggggttccatagtgtaccaaacgcgactgacaagggctctctagggctgtcacttcggcacaatcacattaccgaactcgagagggaccaattcgcttcgttctctcagctgacttggctgcatctggatcacaatcagatcagcactgtcaaggaagacgcctttcagggactctacaagttaaaggaattgattttaagttcgaacaagattttttatctacccaataccacttttacccagctgatcaatctacagaaccttgacctgtcatttaatcaattgtcctctctgcacccagaactcttctacggcctgcgtaaactccagacactccacctacggtccaattccctcaggacaatccccgtgcggctgttttgggattgcaggagcctcgaatttctggatctgtcaaccaacaggctcaggagcctggccagaaatggtttcgccggccttattaagctgagggaactgcatctagagcacaatcaactcactaagatcaatttcgcccacttccttcggctgagcagtctgcataccctcttcctgcagtggaataagattagtaacctgacatgcggaatggagtggacttggggcaccctggagaagttggatcttaccggcaacgagattaaggcgatagatctcactgtgttcgaaaccatgccgaatcttaaaattctcctaatggacaataacaaacttaactcactggacagtaagatcctgaacagtctgcgaagtttaaccacggtgggtctttcaggcaacctgtgggagtgctctgcccgcatttgcgctctggctagctggctgggaagcttccagggtcgctgggaacactcaattctttgccactcacccgaccatacacagggggaagacatactcgacgcggtgcacggttttcagctgtgctggaacctgtctaccaccgtcacagtgatggcaaccacatatagggatcctaccacagaatatacgaaacgcatttcttcatcatcctatcacgtcggcgacaaagaaatcccgacaaccgctggaattgcagtgaccacggaagagcatttcccagagcccgacaatgcaatatttacacaaagagtcattacaggaactatggctctcctatttagttttttctttataatttttattgtctttatctcccgtaagtgttgccctcccacactgcgccgtattcggcaatgttcaatggtgcagaaccaccggcaactgaggtcccagaccaggttacacatgagcaacatgagtgatcagggaccctataacgaatacgaacctacgcacgagggcccattcattattattaacggctacggccagtgtaagtgtcagcagctgccctacaaggaatgtgaggtatag

SEQ ID NO: 187351 - DNA, 1551 bp, Artificial Sequence
  derived and/or modified sequence
atgggcctgcacttcaagtggcccctgggcgcccccatgctggccgccatctatgccatgtccatggtgctgaagatgctgcctgccctgggcatggcctgcccccccaagtgccgctgtgagaagctgctcttctactgtgacagccagggcttccacagcgtgcccaatgccacagacaagggcagcctgggcctgagcctgcggcacaaccacatcacagagctggagcgggaccagtttgccagcttcagccagctgacctggctgcacctggaccacaaccagatcagcacagtgaaggaggatgccttccagggcctgtacaagctgaaggagctgatcctgagcagcaacaagatcttctacctgcccaacaccaccttcacccagctgatcaacctgcagaacctggacctgtccttcaaccagctgagcagcctgcaccctgagctgttctacggcctgaggaagctgcagaccctgcacctgcggagcaacagcctgcggaccatccctgtgcggctcttctgggactgccgcagcctggagttcctggacctgagcaccaaccggctgcggagcctggccagaaatggatttgctggcctcatcaagctgcgggagctgcacctggagcacaaccagctgaccaagatcaactttgcccacttcctgcggctgagcagcctgcacaccctcttcctgcagtggaacaagatcagcaacctgacctgtggcatggagtggacctggggcaccctggagaagctggacctgactggaaatgagatcaaggccatcgacctgactgtgtttgagaccatgcccaacctgaagatcctgctgatggacaacaacaagctgaacagcctggacagcaagatcctgaacagcctgcggagcctgaccaccgtgggcctgagcggcaacctgtgggagtgcagcgcccgcatctgtgccctggcctcctggctgggcagcttccagggccgctgggagcacagcatcctgtgccacagcccagaccacacccagggcgaggacatcctggatgctgtgcacggcttccagctgtgctggaacctgagcaccaccgtgacagtgatggccaccacctacagagaccccaccacagagtacaccaagaggatcagcagcagcagctaccacgtgggggacaaggagatccccaccacagctggcattgctgtgaccacagaggagcacttccctgagccagacaatgccatcttcacccagagggtcatcaccggcaccatggccctgctcttctccttcttcttcatcatcttcatcgtgttcatcagcaggaagtgctgcccccccaccctgcggcgcatccggcagtgcagcatggtgcagaaccaccggcagctgcggagccagacccggctgcacatgagcaacatgtctgaccagggcccctacaatgaatatgagcccacccatgagggccccttcatcatcatcaatggctacggccagtgcaagtgccagcagctgccctacaaggaatgtgaggtgtag

SEQ ID NO: 187352 - DNA, 2216 bp, Artificial Sequence
  derived and/or modified sequence
tgctgctccaggagctcttctctgcaacaagccacccatctgccatcaacaagttaagaccaagagaactaacggctgcggaaaggagactgaagctttgattaaccagctgagcagttagaggtggagaaatttaataacttatattcaaaactgatttagggatcagagcaatcacagaaaatgaaaccaatgctttccagagggatatcctaaggaaaaaacaactcgtcctggtggattcaattttacttggaaagcctgggacacagaaaacaggaaactggtcaaaggctcctacatgttagagccttttacagactcactgcgttgagtctaacaaccgcgactgaatgcagcctccaatgtgctcagaagaatgggcttacatttcaagtggccattaggggcccctatgctggcagcaatatatgcaatgagtatggttttaaaaatgctgcctgccctgggtatggcgtgtccacccaaatgccgctgcgagaagctgctcttctactgcgactctcagggcttccactcagtgccaaacgccacagacaagggctctctgggcctgtccctgaggcacaatcacatcacagagctcgaaagagatcaatttgccagcttcagtcaacttacttggctccacttagatcacaatcaaatttcaacagtaaaagaagatgcttttcaaggactatataaacttaaggaattaatcttaagttccaacaaaatattttacttgccaaacacaacttttacccaactgattaacctgcaaaatttggacctgtcttttaatcagctgtcatctctgcacccagagctcttctatggccttcggaagctgcagaccttgcatttacgttccaactccctgcggactatcccagtacgcctgttctgggactgtcgtagtctggagtttctggatttgagcacaaatcgtttgcgaagtttggctcgcaatggatttgcaggattaattaaactgagagagcttcacctagagcacaaccagctgacgaagattaattttgctcatttcctacggctaagcagtctgcacacgctcttcttacaatggaacaaaatcagcaacttgacatgtgggatggagtggacctggggcactttagaaaagctagacctgactggaaatgaaatcaaagccatcgacttgacagtgtttgaaacgatgcccaatcttaaaatactcctcatggataacaacaagttaaacagccttgattccaagatcttaaactccctgagatccctcacaaccgttggtctctctggcaatctgtgggaatgcagcgcccgaatatgtgctctggcctcctggctgggcagtttccaaggtcggtgggaacactccatcctatgccacagtcctgaccacacccaaggagaggatattctagatgcagtccatggatttcagctctgctggaatttgtcaaccactgtcactgtcatggctacaacttatagagatccaaccactgaatatacaaaaagaataagctcatcaagttaccatgtgggagacaaagaaatcccaactactgcaggcatagcagttactaccgaggaacactttcctgaaccagacaatgccatcttcactcagcgggtaattacgggaacaatggctttattgttttctttcttttttattatttttatagtgttcatctccaggaagtgctgccctcccactttaagaagaattaggcagtgctcaatggttcagaaccacaggcagctccgatcccaaacacgactccatatgtcaaacatgtcagaccaaggaccgtataatgaatatgaacccacccatgaaggacccttcatcatcattaatggttatggacagtgcaagtgtcagcagctgccatacaaagaatgtgaagtataatatctacccatcatcaaaaatcacatcagataagtaacctattttacatagtagaggctaaatacatatctaatttttaccaatggtgacattaagcctaattttccaaactaagtggagacttagtttttgaagtgttgaagtatttttaattttttaaatgaaaccatattttaagtgttaaatgaatcaatgctcacattaatttgcactcctgttggaaagtctaaaatgcttacttcaaaataagaaatgtatgtaattatatacaatcgtgtgtaaacct

SEQ ID NO: 187353 - DNA, 1551 bp, Artificial Sequence
  derived and/or modified sequence
atgggcctgcacttcaagtggcccctgggcgcccccatgctggccgcaatatacgcgatgtctatggttctgaaaatgctgcccgccttgggtatggcctgtccgccaaagtgtaggtgtgagaagctgctgttctattgcgactcacagggattccatagcgtaccaaatgctactgataagggatcactgggtctgtcccttaggcataaccatatcacagagttggagagggatcaattcgctagtttttctcaactcacttggctgcacctggatcacaatcagatcagcactgttaaagaggatgcttttcaagggctgtacaagctgaaggagctcattctgagctctaacaaaatcttctatctgccaaacactacttttacgcaacttatcaatttgcagaacctcgacctgtcttttaatcagttgagtagtctccatcctgagttgttttacggcctgaggaagctacaaacactacatctgaggtccaattcgctgcgaacaatccccgtaagactcttctgggactgtcggtccctcgagtttctagatctcagcaccaatagattgcgctcactggctcggaatggttttgccggattaattaaactccgagagctgcaccttgagcacaatcagttaacgaagatcaatttcgcccattttctacggctgtcttctctgcatacactttttcttcagtggaacaagatctccaacctgacatgcggcatggagtggacttggggtacccttgaaaagcttgatctaacaggtaacgaaatcaaggctatagatctgactgtcttcgagacgatgcctaacctgaagattctcttaatggacaataataaattaaattccctcgattctaaaattctcaacagccttcgctcactgactaccgtcggacttagcggcaatctgtgggagtgttcagcccgaatttgcgctctggcttcctggctcggctcgtttcaggggagatgggagcatagcatactgtgtcactcgcccgaccatacacaaggggaggatattctggatgcagtgcacggattccagctatgttggaacctgagcaccactgtgaccgtgatggctacgacgtacagagatccaactactgaatacactaaaaggattagctcctcttcataccatgttggggataaggaaatccccaccacggctggaatcgcggtgacaactgaagagcatttccccgaaccagataacgccatctttacccagcgggtcatcactggcactatggcactcctgttcagttttttcttcattatcttcattgtatttatttcccggaaatgctgtcccccaaccctgcggcgcattcgtcagtgtagtatggtgcagaaccatcgccagctcagaagtcagactcggcttcacatgtccaacatgagcgatcagggtccatacaacgagtacgagcccactcatgaaggcccatttatcatcataaacggctacggacagtgcaagtgccagcagcttccttacaaagagtgtgaggtctag

SEQ ID NO: 187354 - DNA, 1551 bp, Artificial Sequence
  derived and/or modified sequence
atgggcttgcactttaaatggccgctcggtgcccctatgctagccgcaatctatgctatgtccatggtgctgaaaatgttgcccgcactgggaatggcttgtccccctaagtgtcggtgtgaaaagctgcttttttactgcgacagtcagggcttccacagcgtgcccaatgcgaccgataagggcagtcttgggctcagcctgagacacaaccatatcactgagcttgagagagaccagtttgcttctttctctcaactgacttggttacacctggatcacaaccagatcagtaccgtcaaggaagacgcgttccaaggcctatataaactgaaagaacttatattgtccagcaacaagattttttatttgcccaataccactttcacccaactgattaatttgcagaaccttgatctctccttcaatcagttgtcaagcctgcacccagaactcttttacggtcttcggaagctccagactttacacctgcgcagcaatagccttaggaccattccggtgagactgttctgggactgccgctccttggaattcttagatctgtctacgaacaggctgagatccctggcacggaatggattcgcgggactcattaaactccgcgaacttcacctcgagcacaaccagctgaccaagatcaattttgcccactttttacgcctgtcaagtttgcacactctcttcctgcagtggaacaagatttccaatctgacatgtggcatggaatggacttggggaacattggaaaaactcgatctgacgggaaacgagatcaaggcgatagatctcactgtgtttgaaaccatgccaaatctcaaaattttactcatggataataacaaattgaattcactcgactccaaaatcctcaattccctcaggagcctgacgactgtcggcctgtcaggtaatctatgggagtgctccgcaagaatctgtgcgctcgctagctggctggggtctttccagggacgctgggagcacagcatcctctgtcattcgcctgatcacacccagggcgaggacattctggatgcagtgcacggctttcagctttgttggaacttgtccaccaccgtgacagtaatggccaccacctatagagaccctactactgaatataccaaaagaataagttcttcttcttatcacgtcggggataaggaaattcccacaacagctggaatcgccgtcacaacagaggaacactttcccgagccggacaacgccatttttacccaacgggtgatcacggggaccatggcccttttattcagtttttttttcatcatcttcatcgtgttcatctctcggaaatgctgtcctccaacacttagaaggatacgtcaatgtagcatggtccagaaccacaggcagcttcgcagccagaccaggctgcatatgtccaatatgagtgatcagggtccttataatgagtatgaaccaactcacgagggtcctttcattataattaacgggtatggtcagtgtaaatgccagcagctcccttataaggaatgcgaagtgtag

SEQ ID NO: 187355 - DNA, 1551 bp, Artificial Sequence
  derived and/or modified sequence
atgggcctgcacttcaagtggcccctgggcgcccccatgctggccgccatctacgccatgagcatggtgctgaagatgctgcccgccctgggcatggcctgcccccccaagtgcagatgcgagaagctgctgttctactgcgacagccagggcttccacagcgtgcccaacgccaccgacaagggcagcctgggcctgagcctgagacacaaccacatcaccgagctggagagagaccagttcgccagcttcagccagctgacctggctgcacctggaccacaaccagatcagcaccgtgaaggaggacgccttccagggcctgtacaagctgaaggagctgatcctgagcagcaacaagatcttctacctgcccaacaccaccttcacccagctgatcaacctgcagaacctggacctgagcttcaaccagctgagcagcctgcaccccgagctgttctacggcctgagaaagctgcagaccctgcacctgagaagcaacagcctgagaaccatccccgtgagactgttctgggactgcagaagcctggagttcctggacctgagcaccaacagactgagaagcctggccagaaacggcttcgccggcctgatcaagctgagagagctgcacctggagcacaaccagctgaccaagatcaacttcgcccacttcctgagactgagcagcctgcacaccctgttcctgcagtggaacaagatcagcaacctgacctgcggcatggagtggacctggggcaccctggagaagctggacctgaccggcaacgagatcaaggccatcgacctgaccgtgttcgagaccatgcccaacctgaagatcctgctgatggacaacaacaagctgaacagcctggacagcaagatcctgaacagcctgagaagcctgaccaccgtgggcctgagcggcaacctgtgggagtgcagcgccagaatctgcgccctggccagctggctgggcagcttccagggcagatgggagcacagcatcctgtgccacagccccgaccacacccagggcgaggacatcctggacgccgtgcacggcttccagctgtgctggaacctgagcaccaccgtgaccgtgatggccaccacctacagagaccccaccaccgagtacaccaagagaatcagcagcagcagctaccacgtgggcgacaaggagatccccaccaccgccggcatcgccgtgaccaccgaggagcacttccccgagcccgacaacgccatcttcacccagagagtgatcaccggcaccatggccctgctgttcagcttcttcttcatcatcttcatcgtgttcatcagcagaaagtgctgcccccccaccctgagaagaatcagacagtgcagcatggtgcagaaccacagacagctgagaagccagaccagactgcacatgagcaacatgagcgaccagggcccctacaacgagtacgagcccacccacgagggccccttcatcatcatcaacggctacggccagtgcaagtgccagcagctgccctacaaggagtgcgaggtgtag

SEQ ID NO: 187356 - protein, 958 aa, Artificial Sequence
  derived and/or modified sequence
MHTCCPPVTLEQDLHRKMHSWMLQTLAFAVTSLVLSCAETIDYYGEICDNACPCEEKDGILTVSCENRGIISLSEISPPRFPIYHLLLSGNLLNRLYPNEFVNYTGASILHLGSNVIQDIETGAFHGLRGLRRLHLNNNKLELLRDDTFLGLENLEYLQVDYNYISVIEPNAFGKLHLLQVLILNDNLLSSLPNNLFRFVPLTHLDLRGNRLKLLPYVGLLQHMDKVVELQLEENPWNCSCELISLKDWLDSISYSALVGDVVCETPFRLHGRDLDEVSKQELCPRRLISDYEMRPQTPLSTTGYLHTTPASVNSVATSSSAVYKPPLKPPKGTRQPNKPRVRPTSRQPSKDLGYSNYGPSIAYQTKSPVPLECPTACSCNLQISDLGLNVNCQERKIESIAELQPKPYNPKKMYLTENYIAVVRRTDFLEATGLDLLHLGNNRISMIQDRAFGDLTNLRRLYLNGNRIERLSPELFYGLQSLQYLFLQYNLIREIQSGTFDPVPNLQLLFLNNNLLQAMPSGVFSGLTLLRLNLRSNHFTSLPVSGVLDQLKSLIQIDLHDNPWDCTCDIVGMKLWVEQLKVGVLVDEVICKAPKKFAETDMRSIKSELLCPDYSDVVVSTPTPSSIQVPARTSAVTPAVRLNSTGAPASLGAGGGASSVPLSVLILSLLLVFIMSVFVAAGLFVLVMKRRKKNQSDHTSTNNSDVSSFNMQYSVYGGGGGTGGHPHAHVHHRGPALPKVKTPAGHVYEYIPHPLGHMCKNPIYRSREGNSVEDYKDLHELKVTYSSNHHLQQQQQPPPPPQQPQQQPPPQLQLQPGEEERRESHHLRSPAYSVSTIEPREDLLSPVQDADRFYRGILEPDKHCSTTPAGNSLPEYPKFPCSPAAYTFSPNYDLRRPHQYLHPGAGDSRLREPVLYSPPSAVFVEPNRNEYLELKAKLNVEPDYLEVLEKQTTFSQF

SEQ ID NO: 187357 - protein, 717 aa, Artificial Sequence
  derived and/or modified sequence
MGAGKHREGGGGDPTSLNGCADLIQRRTEISRDLDEVSKQELCPRRLISDYEMRPQTPLSTTGYLHTTPASVNSVATSSSAVYKPPLKPPKGTRQPNKPRVRPTSRQPSKDLGYSNYGPSIAYQTKSPVPLECPTACSCNLQISDLGLNVNCQERKIESIAELQPKPYNPKKMYLTENYIAVVRRTDFLEATGLDLLHLGNNRISMIQDRAFGDLTNLRRLYLNGNRIERLSPELFYGLQSLQYLFLQYNLIREIQSGTFDPVPNLQLLFLNNNLLQAMPSGVFSGLTLLRLNLRSNHFTSLPVSGVLDQLKSLIQIDLHDNPWDCTCDIVGMKLWVEQLKVGVLVDEVICKAPKKFAETDMRSIKSELLCPDYSDVVVSTPTPSSIQVPARTSAVTPAVRLNSTGAPASLGAGGGASSVPLSVLILSLLLVFIMSVFVAAGLFVLVMKRRKKNQSDHTSTNNSDVSSFNMQYSVYGGGGGTGGHPHAHVHHRGPALPKVKTPAGHVYEYIPHPLGHMCKNPIYRSREGNSVEDYKDLHELKVTYSSNHHLQQQQQPPPPPQQPQQQPPPQLQLQPGEEERRESHHLRSPAYSVSTIEPREDLLSPVQDADRFYRGILEPDKHCSTTPAGNSLPEYPKFPCSPAAYTFSPNYDLRRPHQYLHPGAGDSRLREPVLYSPPSAVFVEPNRNEYLELKAKLNVEPDYLEVLEKQTTFSQF

SEQ ID NO: 187358 - DNA, 2877 bp, Artificial Sequence
  derived and/or modified sequence
atgcacacgtgctgcccccccgttaccctggagcaggacctccacagaaaaatgcactcatggatgctgcagaccctggcctttgcagtcacatcgttggtgctctcttgcgcggaaacaattgattactatggagagatttgtgacaatgcctgcccctgtgaagaaaaggatgggatcctgacagtcagctgcgagaataggggaattatctcgctaagcgaaatcagtcccccacgattcccgatatatcatcttttgctctcagggaacctgctgaacaggctgtacccaaacgaattcgtgaattacaccggcgcgtctatattacatttaggttccaacgtgatccaggatatcgaaaccggcgctttccacggactgcgcggactgcgtagactccaccttaacaacaacaaattagaactacttcgggacgatactttcctgggcctcgagaatttggaatacctgcaggtggactacaattacatcagcgtgatcgaacctaatgcatttgggaagctccacctgttgcaggtattgatacttaatgacaatctactcagctcactgcccaataatctgttcaggttcgtgccccttacccatctcgacctcaggggaaacagactgaagcttctcccttacgtcggcctcttgcagcacatggataaggtggtggaattgcagctggaggaaaatccatggaattgcagttgtgagcttatttctttaaaggactggctggatagtatttcatactccgccttggttggtgacgtggtctgcgaaaccccatttcgcttgcacgggcgcgaccttgacgaggtttcaaaacaggaattatgtcctaggcgtctgatttccgactatgaaatgaggcctcagacgcctctgtccacaaccgggtatctgcacacaacccccgcttccgtgaatagtgtcgctacatcatccagtgccgtgtataaacccccactcaagcctccaaagggcaccagacagccaaacaaaccacgggtgcgcccgacttctagacaacccagcaaagacctgggttactccaactacgggccaagcatcgcttaccaaactaaaagcccagtacctctggagtgtcccaccgcttgttcatgcaatctgcaaatttccgatttgggtttaaatgtgaattgccaggagaggaagatcgaaagcatcgctgagttacagcctaaaccatacaaccctaagaaaatgtaccttacggagaactacatcgcggtggtgcggcggaccgacttcctagaagcgactggtctggatttgcttcatttggggaacaatcgcatatctatgatccaggatcgcgcctttggggatctgaccaatctgcgacgtttatatttgaacggcaaccggattgaaagattgtctcctgagctgttctacgggttgcaatcactgcaatatctgttcctccagtataatctgatccgggaaatccagtctggcacattcgatccagtacccaacctacaattgctgtttttgaacaataacctcttgcaggccatgccttcgggggtgttctcaggccttactcttctgaggcttaacctgcgatctaatcatttcaccagtctgcccgtctcaggggtactggaccagctgaagtccttgattcagatcgacctacacgacaacccctgggattgtacctgtgatattgtggggatgaagctgtgggtcgagcagctgaaggtaggcgtgcttgtggatgaagtgatctgtaaggcccccaagaaattcgcagaaactgatatgcgctcgatcaagagcgagctgctgtgcccagattatagcgacgtggtcgtgtcaacgcccacgccaagcagcatacaggtgcccgctcgcacatccgcagtcacccccgcagtgaggttaaacagcacaggcgcccccgccagcctgggtgccggcgggggagcatctagtgttcctcttagtgttcttatcttgtccctcctgcttgtatttattatgtctgtgtttgtggccgccgggttgttcgtgctggtgatgaagcgcaggaagaaaaaccagtccgaccatacctcgaccaataattctgacgtgtcttcatttaatatgcagtattccgtctacgggggagggggtggaaccgggggccacccacatgctcatgtgcaccatagaggcccggcgcttcccaaagtaaagacccctgcggggcacgtatacgaatacattcctcaccctcttggccatatgtgtaaaaacccaatttaccgctcccgggagggcaactccgttgaggactataaagacctgcacgagctgaaggtgacctactcctctaaccatcacttgcagcagcaacagcaaccgccaccccctcctcaacagccccagcagcagccacctccccagcttcagttacagcctggcgaagaagaaaggcgagaatcacaccacctgagatctcccgcttactcagttagtacgatagagccacgcgaagatctgctctccccagtacaggatgccgatagattctacagaggaatcttggaacccgacaagcactgtagcacaacgcctgccggcaattcccttcctgagtaccccaagtttccatgttctcccgcagcttatacattctctcctaactatgatttgcgacgcccgcatcagtatctgcatccgggggccggcgacagcagacttagagagccagtgctatatagtccacctagtgctgtgtttgtcgagcctaatagaaatgaatatctggagttgaaggctaagctgaacgtagagcctgattacctggaagtcttagaaaagcagaccaccttctcacagttctag

SEQ ID NO: 187359 - DNA, 2154 bp, Artificial Sequence
  derived and/or modified sequence
atgggagctggcaaacatcgggaaggaggcgggggggatcccacctccctgaacgggtgtgcagatctaatccaaaggcggactgagatcagcagggatcttgatgaggttagcaaacaggagctttgcccgcgcaggctcatcagcgattacgagatgcggccgcagaccccactgtccactactggttacctccacactactccagccagtgtgaacagcgtcgctacctcatcttctgcggtctacaaacctccactgaagcctcccaagggcacacggcagccaaataaacctcgcgtcagacctaccagcagacagccgtctaaggacctgggttactccaactatgggccttcaatagcctaccaaacaaaatctccagtacctttggaatgtcctactgcctgcagttgtaatcttcagatttctgatctgggtctcaacgtaaactgccaggagcgtaaaattgagtctattgcagaactccagcctaaaccttacaaccccaagaaaatgtatctaaccgagaattacatagccgtcgttaggagaaccgactttctggaggccaccggtttagacctgttgcatttaggaaataaccgtatatcaatgatacaggatcgtgctttcggggacctgaccaatctgagaagactgtacctcaacggtaatcgaatcgagcggttgtccccggaactattttatggcttgcaatccttgcagtatctatttcttcagtacaatctcattcgcgagatccagagcggcacctttgatccagtgcccaacctgcaactactgttcctgaataacaatctcttgcaagctatgccatctggcgtgttctctggactgacacttttgcgcctgaacctgaggagcaatcacttcacgtcgttgcccgtgtcaggagtgctcgaccaattgaaatctttgatccaaatcgatctgcacgacaacccttgggactgcacatgcgacattgttggtatgaaactgtgggttgaacagttaaaagtcggagttctcgtggacgaggtgatctgtaaagcccctaaaaaatttgctgagacagacatgcgcagcattaagtcggagttactgtgccccgactatagtgacgttgtagtgtccactcccactccttcatcgatacaggtgcctgcaagaacttcagccgtcacgcccgccgtacggctgaactcaaccggggcgcctgcctctctgggcgccgggggaggagcctcgtcagtgcccctttccgttctgatactgtcactcctgctggtgtttattatgtctgtcttcgtggccgctggattgtttgttcttgtgatgaagaggaggaagaagaaccaaagcgatcatacaagcaccaacaactctgacgtttccagctttaatatgcagtactcagtttacggcggaggagggggcaccgggggacacccccacgctcatgtgcaccataggggtcctgctctgcctaaggtaaagacgcccgctggccatgtgtacgagtacataccgcatcccctcggccatatgtgtaaaaaccccatctacagatcgagggaggggaactcagttgaagactacaaagacctgcacgagctcaaagtcacctactcatctaatcatcacttgcaacagcaacagcagccaccccccccgccccagcagcctcaacagcaacccccccctcagttacagttgcaacccggggaggaggaaagacgggagagccatcacctcaggtctcccgcctacagcgtgagtacaattgaaccacgtgaagatctgttgagccctgtccaggatgctgatcgcttctaccgcgggatactcgagcccgataaacactgcagtaccactccggctggaaactcgctcccggaataccctaagttcccatgcagccctgcggcctacacattctcaccaaattatgatctgagacgcccgcatcagtacctgcatccaggcgcaggtgattccaggctacgtgagcccgtgctctactcccctccatctgcagtgttcgtggagcctaaccggaatgaatacctggagcttaaagctaagctgaatgtcgagcccgactatctcgaggtgctggagaaacaaacaactttttctcaattttag

SEQ ID NO: 187360 - DNA, 2877 bp, Artificial Sequence
  derived and/or modified sequence
atgcacacctgctgcccccctgtgaccctggagcaggacctgcacaggaagatgcacagctggatgctgcagaccctggcctttgctgtgaccagcctggtgctgagctgtgccgagaccatcgactactacggggagatctgtgacaatgcctgcccctgtgaggagaaggatggcatcctgactgtgtcctgtgagaacagaggcatcatcagcctgtctgagatcagccccccacgcttccccatctaccacctgctgctgagcggcaacctgctgaaccggctgtacccaaatgaatttgtgaactacacaggagccagcatcctgcacctgggcagcaatgtcatccaggacatcgagaccggggccttccacggcctgcggggcctgcggcggctgcacctgaacaacaacaagctggagctgctgagagatgacaccttcctgggcctggagaacctggagtacctgcaggtggactacaactacatcagcgtcatcgagcccaatgccttcggcaagctgcacctgctgcaggtgctgatcctgaatgacaacctgctgagcagcctgcccaacaacctcttccgctttgtgcccctgacccacctggacctgcggggcaaccggctgaagctgctgccctacgtgggcctgctgcagcacatggacaaggtggtggagctgcagctggaggagaacccctggaactgcagctgtgagctgatcagcctgaaggactggctggacagcatctcctacagcgccctggtgggagatgtggtgtgtgagacccccttccggctgcacggccgggacctggatgaggtgtccaagcaggagctgtgcccccggcggctcatcagtgactatgagatgaggccccagacccccctgagcaccaccggctacctgcacaccaccccagcctctgtgaacagcgtggccaccagcagcagcgctgtgtacaagccacccctgaagccacccaagggcacccggcagcccaacaagccccgggtgcggcccaccagccggcagcccagcaaggacctgggctacagcaactacggccccagcatcgcctaccagaccaagagccctgtgcccctggagtgccccacagcctgcagctgcaacctgcagatcagtgacctgggcctgaatgtgaactgccaggagaggaagattgagagcattgctgagctgcagcccaagccctacaaccccaagaagatgtacctgacagagaactacatcgctgtggtgagaagaacagacttcctggaggccaccggcctggacctgctgcacctgggcaacaaccgcatctccatgatccaggaccgggcctttggagacctgaccaacctgcggcggctgtacctgaatggaaacagaattgagcggctgagccctgagctgttctacggcctgcagagcctgcagtacctgttcctgcagtacaacctgatccgggagatccagagcggcacctttgatcctgtgcccaacctgcagctgctcttcctgaacaacaacctgctgcaggccatgcccagcggggtcttcagcggcctgaccctgctgcggctgaacctgcggagcaaccacttcaccagcctgcctgtgtctggagtgctggaccagctgaagagcctcatccagattgacctgcatgacaacccctgggactgcacctgtgacatcgtgggcatgaagctgtgggtggagcagctgaaggtgggcgtgctggtggatgaggtgatctgcaaggcccccaagaagtttgctgagacagacatgaggagcatcaagtctgagctgctgtgcccagactacagtgatgtggtggtgtccacccccacccccagcagcatccaggtgcctgcccggaccagcgctgtgaccccagctgtgcggctgaacagcactggagccccagccagcctgggcgctgggggcggggccagctctgtgcccctgtctgtgctgatcctgagcctgctgctggtgttcatcatgtctgtgtttgtggccgccggcctgtttgtgctggtgatgaagaggaggaagaagaaccagagcgaccacaccagcaccaacaacagtgatgtgtcctccttcaacatgcagtacagcgtgtatggaggcggcggcggcactggaggccacccccacgcccacgtgcaccaccggggccctgccctgcccaaggtgaagaccccagctggccacgtgtatgagtacatcccccaccccctgggccacatgtgcaagaaccccatctaccgcagccgggagggcaacagcgtggaggactacaaggacctgcacgagctgaaggtgacctacagcagcaaccaccacctgcagcagcagcagcagcccccacctccaccccagcagccccagcagcagcccccaccccagctgcagctgcagcctggagaggaggagcggcgggagagccaccacctgcggagccctgcctacagcgtgtccaccatcgagccccgggaggacctgctgagccctgtgcaggatgctgaccgcttctaccggggcatcctggagccagacaagcactgcagcaccaccccagctggcaacagcctgcctgagtaccccaagttcccctgcagccctgctgcctacaccttcagccccaactatgacctgcggcggccccaccagtacctgcaccctggggccggggacagccggctgcgggagcctgtgctgtacagccccccatctgctgtgtttgtggagcccaacagaaatgagtacctggagctgaaggccaagctgaatgtggagccagactacctggaggtgctggagaagcagaccaccttcagccagttctag

SEQ ID NO: 187361 - DNA, 2154 bp, Artificial Sequence
  derived and/or modified sequence
atgggcgccggcaagcaccgggagggcggcggcggggaccccaccagcctgaatggctgtgccgacctgatccagaggagaacagagatcagccgggacctggatgaggtgtccaagcaggagctgtgccccaggaggctcatcagtgactatgagatgaggccccagacccccctgagcaccaccggctacctgcacaccaccccagcctctgtgaacagcgtggccaccagcagcagcgctgtgtacaagccacccctgaagccacccaagggcacccggcagcccaacaagccccgggtgcggcccaccagccggcagcccagcaaggacctgggctacagcaactacggccccagcatcgcctaccagaccaagagccctgtgcccctggagtgccccacagcctgcagctgcaacctgcagatcagtgacctgggcctgaatgtgaactgccaggagaggaagattgagagcattgctgagctgcagcccaagccctacaaccccaagaagatgtacctgacagagaactacatcgctgtggtgcggaggacagacttcctggaggccaccggcctggacctgctgcacctgggcaacaaccgcatctccatgatccaggaccgggccttcggggacctgaccaacctgcggcggctgtacctgaatggaaaccgcatcgagcggctgagccctgagctgttctacggcctgcagagcctgcagtacctgttcctgcagtacaacctgatccgggagatccagagcggcacctttgatcctgtgcccaacctgcagctgctcttcctgaacaacaacctgctgcaggccatgcccagcggggtcttcagcggcctgaccctgctgcggctgaacctgcggagcaaccacttcaccagcctgcctgtgtctggagtgctggaccagctgaagagcctcatccagattgacctgcatgacaacccctgggactgcacctgtgacatcgtgggcatgaagctgtgggtggagcagctgaaggtgggcgtgctggtggatgaagtcatctgcaaggcccccaagaagtttgctgagacagacatgaggagcatcaagtctgagctgctgtgcccagactacagtgatgtggtggtgtccacccccacccccagcagcatccaggtgcctgcccggaccagcgctgtgaccccagctgtgcggctgaacagcactggagccccagccagcctgggcgccggcggcggggccagctctgtgcccctgtctgtgctgatcctgagcctgctgctggtgttcatcatgtctgtgtttgtggccgccggcctgtttgtgctggtgatgaagaggaggaagaagaaccagagcgaccacaccagcaccaacaacagtgatgtgagcagcttcaacatgcagtacagcgtgtatggaggcggcggcggcaccggcggccacccccacgcccacgtgcaccaccggggccctgccctgcccaaggtgaagaccccagctggccacgtgtatgagtacatcccccaccccctgggccacatgtgcaagaaccccatctaccgcagccgggagggcaacagcgtggaggactacaaggacctgcacgagctgaaggtgacctacagcagcaaccaccacctgcagcagcagcagcagcccccacctccaccccagcagccccagcagcagcccccaccccagctgcagctgcagcccggggaggaggagcggcgggagagccaccacctgcggagccctgcctacagcgtgtccaccatcgagccccgggaggacctgctgagccctgtgcaggatgctgaccgcttctaccggggcatcctggagccagacaagcactgcagcaccaccccagctggcaacagcctgcctgagtaccccaagttcccctgcagccctgctgcctacaccttcagccccaactatgacctgcggcggccccaccagtacctgcaccctggagctggggacagccggctgcgggagcctgtgctgtacagcccccccagcgctgtgtttgtggagcccaacagaaatgagtacctggagctgaaggccaagctgaatgtggagccagactacctggaggtgctggagaagcagaccaccttcagccagttctag

SEQ ID NO: 187362 - DNA, 2877 bp, Artificial Sequence
  derived and/or modified sequence
atgcacacctgctgcccccccgtgaccctggagcaggacctgcaccgaaagatgcattcttggatgttacaaaccttagcctttgctgtgacttcactcgtgctctcatgcgctgagacaatcgactattacggtgaaatctgcgataatgcctgcccttgtgaggagaaggatggcattctgaccgtcagctgcgaaaacaggggtataatctccctatccgagatctcacctccccgttttcctatttaccacctgctgttatccggaaacctccttaatcggttgtaccctaacgagtttgtaaattacaccggagcttcaatcctgcacctgggatccaatgtgatccaggacatagagaccggcgcatttcacgggctgaggggcctgcggcggctgcacctgaataataataaactggaactcctacgtgacgacactttcctcggtctcgaaaacctcgaatacctgcaggtcgattataattacatatccgtgatcgagcccaacgcgttcggaaagctacatctcctgcaagtgctgatcctgaatgacaacctgctatctagtttaccaaataatctgtttaggttcgtgcctttaacccatctcgatctgaggggcaaccggctgaagctgcttccctatgtaggcctactgcagcacatggataaagttgtcgaacttcagctggaggagaatccctggaactgttcttgtgaattgatctcactcaaagactggctcgattccatttcttactctgccctggtaggagatgtcgtgtgtgagactccattccgccttcatggcagagatttagatgaagtctcaaagcaggagctatgcccaagaagactcatttccgactatgaaatgagaccccagacaccattgtccacaaccggctatttgcacaccacacctgcttcagtgaacagcgtggcaacatcctcttcagccgtttacaagccccctctcaagcccccgaagggaacccgccaaccgaacaagcctcgcgttcggcctacatccagacagcccagtaaggatcttgggtactccaactacggcccgtccatcgcttatcagacaaagtccccagtccctctagagtgtcctacggcctgctcatgcaacctccagatcagcgatcttggtctgaatgttaactgccaggagaggaaaatcgaatcaatcgccgagctgcagccaaagccgtacaaccctaaaaagatgtacctgaccgagaattatatcgcagttgtacgcagaacagattttctggaggcaaccggcctcgacctgctgcatctgggcaacaaccggatatctatgatacaggatagagcttttggtgacctgaccaatcttaggaggctgtatttgaatggtaatagaattgagcgtctgtccccggagcttttttatgggttacaaagcctccaatatctgttcctccagtataatctcattagggaaatccaaagtggaacatttgaccctgtacccaaccttcagcttctctttctcaacaacaacctacttcaagcgatgcctagcggcgtgttcagcgggctcaccctcctccggctgaatcttcgctccaatcacttcacatccctccccgtgtcaggagtgttagatcagctcaaatctctcattcaaatcgacctacacgacaatccttgggattgcacatgtgacatagttgggatgaagctgtgggttgagcagttgaaagttggagtcttggttgacgaggtcatttgcaaggcacctaaaaaatttgccgaaacagatatgcgttcgatcaagagcgaacttctctgtccagactacagcgacgtggtcgtgagtactccgacccctagttctatccaggtcccggccaggacttctgcggtgacacctgccgtgcgtctgaactcaacgggggccccggcttccctgggcgcaggaggtggggcctcctctgtgccattgagtgttctgattcttagcttactcctggtgtttatcatgtccgtgttcgtggccgctggacttttcgtcctggtcatgaaaaggagaaagaagaaccaatccgaccatacatctaccaataactcagacgtgagtagctttaatatgcaatactctgtctatgggggcggaggtgggacaggggggcatccgcatgctcacgtgcatcatcgaggccctgccctgccgaaagtgaaaacacctgcaggtcacgtgtatgaatacattcctcaccccctgggccatatgtgcaaaaatccaatctacaggagcagggaggggaatagcgtggaggactataaggacctgcatgagttgaaggttacttattcatcaaaccatcatctccaacaacagcagcagcctccccctcctccgcagcaacctcaacagcaacccccgccgcagcttcaattgcagcctggggaggaagaaaggagagagtctcatcatcttcggtcccctgcatacagcgtcagcacgattgagcccagggaagacctgttatcacctgtgcaagatgccgacaggttttaccgaggcatcctcgagcccgacaaacactgcagcaccacccctgctggtaattctcttccagagtacccaaagttcccttgttctcctgctgcttacacattcagtccgaattacgatctgcggagacctcaccagtatctccaccccggcgcaggggactcccggctgcgtgaacccgtcctgtacagccccccctccgccgtatttgtggagccaaacagaaacgagtatcttgaactgaaggccaagctgaacgtggaaccagactatcttgaggttctcgaaaagcagacaacattttctcaattttag

SEQ ID NO: 187363 - DNA, 2154 bp, Artificial Sequence
  derived and/or modified sequence
atgggcgccggcaagcaccgggagggcggcggcggcgaccccacctcgctgaacggctgcgccgatcttattcagcggcggaccgaaatttctcgggacctggatgaggtctcaaaacaggagctctgtccacgccgcctgattagtgactatgagatgcgtccccagacacccctctcaacaacagggtacttgcataccacgcccgcctctgtgaacagcgtagccactagctccagtgcagtgtataaaccccccctgaaacctcctaaaggcacccgacagcccaacaaacctagagttaggcccacatcacgacagccctctaaagatctgggatattcaaattacgggccttccatcgcgtatcaaacgaagtcccctgtgccactggaatgtcctactgcatgcagctgcaatcttcagatcagcgatttgggtctgaacgtcaactgccaggagcggaagattgaatctatcgccgagctgcagcccaagccatacaaccctaagaaaatgtatctgaccgagaactacattgcagttgtgagaaggaccgactttctggaagcaaccggtctcgatcttttgcacttggggaacaatcgaatctcaatgatccaggatcgagcctttggggaccttaccaacttgagacggctgtatctgaatgggaacagaatagaaaggctgtctccagagctgttttacggactccagtcccttcagtatctgtttctgcagtacaatcttattagagagattcagagtggcaccttcgatcctgttccaaacttgcagctcttgttcctcaacaacaacctactgcaggccatgccatctggtgtgttctcaggactgaccttactgcgccttaacctcaggagtaaccatttcacttctctgcctgtgagtggcgtgctagaccagctgaaatccctgatccagatagacctacatgataatccctgggattgcacttgcgatatagttgggatgaagctatgggtagagcagctgaaggtcggcgtgcttgtggacgaagtgatttgtaaggcccctaagaaatttgccgagaccgacatgcgcagcatcaaatccgagctgctttgccctgactatagtgatgtagtagtgtcaactcctactcctagctctatccaggtgccggcccgcacatctgccgtgacccctgctgtaaggctcaatagtacgggcgctccagcgtccttgggcgctgggggcggtgctagttccgtcccgctgtcggtccttattctgagccttttgttagttttcatcatgtctgtcttcgtggcagcgggcttgttcgtgctcgtgatgaaaagacggaagaagaatcagtctgaccataccagcactaataactcagacgtttcctcctttaacatgcagtactccgtgtacgggggtggcggtggcacaggtggccatccgcacgctcatgtacaccatcggggacctgctctacctaaagttaagacaccagctggacacgtatacgaatacattccccatccacttggtcatatgtgtaagaatccgatctacagatccagagagggtaactccgtcgaagactacaaggacctgcacgagctcaaggtgacttactcatccaaccaccacttgcagcaacagcaacagccgccccctccgccgcagcagccacagcaacagccacctcctcagcttcagctgcagcccggagaagaggagcgaagggagagccaccatctgcgcagccctgcctatagcgtcagcacaattgagccaagggaggacctgctctcccccgtgcaagacgccgatagattctatcgtgggatcctcgagcccgataaacactgttcgactacgccagccgggaattcgttgcctgagtatcctaagttcccttgctcccctgccgcttatactttttctcctaactatgacctcaggcgtccccatcaatacctgcatcctggagccggcgattccaggctgcgtgaacccgtcttatacagccctcctagcgccgtgttcgtggaaccaaatcggaacgaatacctcgaactcaaggccaagctcaatgtggagccagattacctggaggtgttggagaaacagactactttcagccagttctag

SEQ ID NO: 187364 - DNA, 2877 bp, Artificial Sequence
  derived and/or modified sequence
atgcatacctgttgtcctccagttacgctggaacaggatcttcacaggaagatgcatagttggatgctacagacactcgctttcgccgttacaagccttgtgctgtcttgcgccgagaccattgactattatggcgaaatctgcgacaatgcttgcccatgtgaggagaaagacgggatcctgactgtctcctgcgaaaatcggggaataatatctctgagcgaaatttcacctccacgctttcccatttatcacctgttgttaagcggcaacctgctgaatagactctaccctaacgagttcgtgaactatactggcgcttctatactgcacctgggatctaacgtgatccaagacatcgaaactggagcgtttcacgggctgcgcggactgaggcgacttcacctcaataataacaagctagaactgctccgggacgatacttttctgggactggagaacctggagtacctccaagtggattacaactacatttccgtgatcgagccaaatgcctttggaaaactgcacttattacaggtcctcattctgaacgacaatcttctctccagcctccctaacaatctgtttcgcttcgttcctctcacgcatctcgacctgagaggtaacagactcaagctcctcccttacgtgggtttgcttcagcatatggacaaggtcgttgagctgcagcttgaggagaatccctggaattgctcttgcgagcttattagtctgaaagattggctcgacagcatcagttattcagccctggtcggagatgttgtctgcgagactccttttaggttacatggacgggacctagacgaggtgagcaaacaggaactgtgtcctcgcagattgatttctgactacgagatgagaccccaaactcccctctctaccactggctacctgcacacaacacctgcctccgttaatagtgtggccacatcatcctctgcagtctacaaaccgcctttaaagcctcctaaaggaacccggcagcctaataaaccgagggtgcggcctactagtcgtcagccaagcaaggacctgggctactccaattacggaccttccattgcttatcagacgaagagccctgtgcctcttgaatgccctacggcctgcagctgtaacctgcagatctctgacttgggcttgaacgtcaactgccaggaacgaaagatagaatccatagcggaacttcagcccaaaccttacaacccaaaaaagatgtatctgaccgagaactatattgccgtggttagaagaaccgattttctggaggccacaggtttggacctcctgcacctgggaaataatcgaatctctatgatccaagacagagctttcggcgatctgaccaaccttaggcgcttgtacttgaatggaaatcggattgagagactctccccagagctattttacggtcttcagagtttacagtatctcttcctccagtataacctgattcgagaaatccagagcggaacctttgatccggttccaaacctgcaattattgttcctgaacaacaatttgctccaagccatgcccagcggtgttttttccggactgaccctgctgcgccttaacctccggagtaaccacttcacctccctgcccgtatccggtgtgctggaccaattgaaatctcttatacagattgatctgcacgacaatccatgggattgtacctgcgatatcgtgggtatgaaactgtgggtggaacagttgaaagtgggggtcctcgtggacgaggtcatttgtaaagccccaaagaagttcgcagagaccgacatgcgatcgatcaagtccgaattactctgcccggattactccgatgtggtggtcagcacccccactccgtcaagcattcaagttcctgcacggacgtctgccgtgactcccgctgtgagactcaattctacaggcgctccagcatctttgggcgcaggcggaggcgcaagcagcgtgccccttagtgtgctcatactctccctgctgctagtgtttataatgtcagtgttcgtcgctgccggactgtttgtcctggtgatgaagcgacggaaaaaaaatcaaagcgaccacacctctacaaataactctgatgtctccagtttcaatatgcagtactcagtttacggcggagggggaggcaccggcggacacccccatgctcatgtccaccaccggggacctgctctgcctaaggtaaaaaccccagccggtcatgtgtacgaatatattcctcatcccctggggcatatgtgcaaaaacccaatctatagaagccgagaaggaaattccgtggaagattataaagacctgcatgagctaaaagtgacgtattcttcaaatcaccaccttcagcagcaacagcagccacctcccccaccgcagcaacctcaacaacagcctccccctcaactgcagctacagccaggcgaggaggagcggagagagtcacatcatttgagatcccctgcctacagcgtgagtaccattgagccccgagaagacttactgtcgcccgtgcaggacgctgataggttttacaggggcatcctcgagcctgacaaacactgttccacaactccagccggaaacagcctgccagaatatcccaagtttccctgtagcccggctgcttacacgtttagtccaaattacgacttgcgtcgccctcaccagtacctgcacccgggagccggagactccaggttacgggagcctgttctgtacagccccccaagtgccgtgtttgtcgagcccaaccggaacgagtatctggaactcaaagccaagcttaacgtagaaccagactacctggaagtgctggagaaacagacaaccttttcccagttctag

SEQ ID NO: 187365 - DNA, 2154 bp, Artificial Sequence
  derived and/or modified sequence
atgggggctggaaaacacagggagggagggggaggggatcccacctcccttaacggatgcgcggacttaattcagcgaagaactgagatctcccgggacctggatgaagtgtctaagcaggagctgtgcccacggaggctcatcagcgactatgagatgcggcctcagacacccttaagcacgacagggtatctacataccactccagcgtcagttaactctgttgccacttccagtagcgctgtatataagcctcctctgaagcctcccaaggggacccggcagcctaataagccgcgagtacgacccacatcacgccagccaagcaaagacctgggctactccaattacgggccaagcattgcctaccagactaaatcgcctgtgcctttagaatgcccgaccgcctgcagttgcaatttacagatcagtgacttaggtctgaatgtcaattgccaggaacgcaaaattgagagcattgccgagctgcagccaaagccgtataaccccaaaaagatgtatctgaccgagaactacatcgccgttgtgcgcagaacagacttcctggaggccacaggcctggacctcctgcatctcgggaataaccgaatttctatgattcaggaccgcgcttttggtgatctcaccaatctcaggcggctgtacttgaatggaaatcgtatcgagcgtctgtcacctgaactgttttatgggttgcagagccttcagtatctgtttttacagtataacctgatcagagagatacagtcaggcaccttcgatccggtgccaaatttgcagctcttattcctgaataacaacttactgcaggccatgccatcaggagtgttctcgggcttgacattgctgcgattgaatctcagatccaatcacttcacgagcctgcccgtttcaggtgtcctcgatcaactgaagagtctgatccagatcgatctgcatgataacccttgggattgcacttgcgacattgtgggtatgaagctctgggtggagcaactgaaagttggggtgcttgtagacgaagtgatttgcaaggcaccgaaaaagttcgcagaaaccgatatgaggtctattaaaagcgaattgttgtgtcctgattactcagacgtcgtggtatccacgcccaccccgtcctccatacaggtccctgcccgaacgtctgccgtcacacccgcagtgaggcttaatagcaccggagctcccgctagtctgggcgcagggggaggagcctccagcgtgcccttgagtgtccttatcttgtccctgttgctggtatttattatgtctgtctttgtcgccgctggcttgttcgttctcgtgatgaaacggcgtaagaagaaccagtcagaccatacatccacaaataactccgacgtgagctcttttaatatgcaatactccgtgtacggcggagggggtggaactggcggtcacccccacgctcacgtacaccaccggggacccgcacttcccaaagtgaagacacctgcaggccacgtgtatgagtacatcccccaccccttaggacacatgtgtaagaaccccatttatagatccagagagggaaacagtgtagaggactataaagatctgcacgaattgaaggtgacctacagctctaaccaccacctacagcaacagcagcagcccccacctcctcctcagcaacctcagcagcagccccctccccagctgcaactccagccgggagaggaagagaggagagagtctcaccacctgaggagtcccgcttatagtgtgtccactatcgagcctcgggaggacctcctgtctcctgtccaggacgcagatcgattttacagaggtatactggaacctgacaagcactgcagtaccacacccgcaggaaactcactcccagaataccctaaattcccttgtagccccgctgcctacaccttttctcctaattatgatctccgtagaccccatcaatatctgcaccctggcgcaggtgatagccggctgagagaaccagtgctctacagcccaccgtcagctgtttttgtggaacccaatagaaatgagtaccttgagctgaaagccaaacttaatgttgaacccgattatctggaagtgcttgaaaagcagaccactttctcacagttctag

SEQ ID NO: 187366 - DNA, 4444 bp, Artificial Sequence
  derived and/or modified sequence
cccggaacccgcggtcgccaccgcggcggcggccccaggctggaggcgtccgggcgcctctttcctccagcctctgggactgcgctgctcgcagtctcctcgccctgcctgggcttgagaaacctagtgcataccccaaagagggtttttgtgtatgtgtgtgtttttaaagggtggctatgatgactgggccttggagatgtgagactgggaggtaaaatgcacacttgctgccccccagtaactttggaacaggaccttcacagaaaaatgcatagctggatgctgcagactctagcgtttgctgtaacatctctcgtcctttcgtgtgcagaaaccatcgattattatggggaaatctgtgacaatgcatgtccttgtgaggaaaaggacggcattttaactgtgagctgtgaaaaccgggggatcatcagtctctctgaaattagccctccccgtttcccaatctaccacctcttgttgtccggaaaccttttgaaccgtctctatcccaatgagtttgtcaattacactggggcttcaattttgcatctaggtagcaatgttatccaggacattgagaccggggctttccatgggctacggggtttgaggagattgcatctaaacaataataaactggaacttctgcgagatgataccttccttggcttggagaacctggagtacctacaggtcgattacaactacatcagcgtcattgaacccaatgcttttgggaaactgcatttgttgcaggtgcttatcctcaatgacaatcttttgtccagtttacccaacaatcttttccgttttgtgcccttaacgcacttggacctccgggggaaccggctgaaacttctgccctacgtggggctcttgcagcacatggataaagttgtggagctacagctggaggaaaacccttggaattgttcttgtgagctgatctctctaaaggattggttggacagcatctcctattcagccctggtgggggatgtagtttgtgagacccccttccgcttacacggaagggacttggacgaggtatccaagcaggaactttgcccaaggagacttatttctgactacgagatgaggccgcagacgcctttgagcaccacggggtatttacacaccaccccggcgtcagtgaattctgtggccacttcttcctctgctgtttacaaaccccctttgaagccccctaaggggactcgccaacccaacaagcccagggtgcgccccacctctcggcagccctctaaggacttgggctacagcaactatggccccagcatcgcctatcagaccaaatccccggtgcctttggagtgtcccaccgcgtgctcttgcaacctgcagatctctgatctgggcctcaacgtaaactgccaggagcgaaagatcgagagcatcgctgaactgcagcccaagccctacaatcccaagaaaatgtatctgacagagaactacatcgctgtcgtgcgcaggacagacttcctggaggccacggggctggacctcctgcacctggggaataaccgcatctcgatgatccaggaccgcgctttcggggatctcaccaacctgaggcgcctctacctgaatggcaacaggatcgagaggctgagcccggagttattctatggcctgcagagcctgcagtatctcttcctccagtacaatctcatccgcgagattcagtctggaacttttgacccggtcccaaacctccagctgctattcttgaataacaacctcctgcaggccatgccctcaggcgtcttctctggcttgaccctcctcaggctaaacctgaggagtaaccacttcacctccttgccagtgagtggagttttggaccagctgaagtcactcatccaaatcgacctgcatgacaatccttgggattgtacctgtgacattgtgggcatgaagctgtgggtggagcagctcaaagtgggcgtcctagtggacgaggtgatctgtaaggcgcccaaaaaattcgctgagaccgacatgcgctccattaagtcggagctgctgtgccctgactattcagatgtagtagtttccacgcccacaccctcctctatccaggtccctgcgaggaccagcgccgtgactcctgcggtccggttgaatagcaccggggcccccgcgagcttgggcgcaggcggaggggcgtcgtcggtgcccttgtctgtgttaattctcagcctcctgctggttttcatcatgtccgtcttcgtggccgccgggctcttcgtgctggtcatgaagcgcaggaagaagaaccagagcgaccacaccagcaccaacaactccgacgtgagctcctttaacatgcagtacagcgtgtacggcggcggcggcggcacgggcggccacccacacgcgcacgtgcatcaccgcgggcccgcgctgcccaaggtgaagacgcccgcgggccacgtgtatgaatacatcccccacccactgggccacatgtgcaaaaaccccatctaccgctcccgagagggcaactccgtagaggattacaaagacctgcacgagctcaaggtcacctacagcagcaaccaccacctgcagcagcagcagcagccgccgccgccaccgcagcagccacagcagcagcccccgccgcagctgcagctgcagcccggggaggaggagaggcgggaaagccaccacttgcggagccccgcctacagcgtcagcaccatcgagccccgggaggacctgctgtcgccggtgcaggacgccgaccgcttttacaggggcattttagaaccagacaaacactgctccaccacccccgccggcaatagcctcccggaatatcccaaattcccgtgcagccccgctgcttacactttctcccccaactatgacctgagacgcccccatcagtatttgcacccgggggcaggggacagcaggctacgggaaccggtgctctacagccccccgagtgctgtctttgtagaacccaaccggaacgaatatctggagttaaaagcaaaactaaacgttgagccggactacctcgaagtgctggaaaaacagaccacgtttagccagttctaaaagcaaagaaactctcttggagcttttgcatttaaaacaaacaagcaagcagacacacacagtgaacacatttgattaattgtgttgtttcaacgtttagggtgaagtgccttggcacgggatttctcagcttcggtggaagatacgaaaagggtgtgcaatttcctttaaaatttacacgtgggaaacatttgtgtaaactgggcacatcactttctcttcttgcgtgtggggcaggtgtggagaagggctttaaggaggccaatttgctgcgcgggtgacctgtgaaaggtcacagtcatttttgtagtggttggaagtgctaagaatggtggatgatggcagagcatagattctactcttcctcttttgcttcctccccctcccccgcccctgccccacctctctttctccccttttaagccatgggtgggtctaactggcttttgtggagaaattagcacaccccaactttaataggaaatttgttctctttttccgcccctctccttctctcctcccctcccctcccttctcattccttttctttgtttttaaaggatgtgtttgtatgcattctggacatttgaattaaaaaaaaagtattgtgatcctgtaaaggatcaccatagatgtggacaaatcattaaaattacagagctatatgatccataattgattagtcaaaataacttattgatgaaatatacaaatattttattgtagcacctatttttatatgcacatttagcattcctctttccttcactatttagcctatgattttgcagaggtgtcacactgtattaggatctgcatttctaaaactgacgtggtatcaggaaggcattttcaatcattcaaaatgtggagaatttaatggctaaatctttaaaagccaatgcaacccacccaattgaatctgcattttcttttaagaaaacagagctgattgtatcccaatgtattttaaaaaatagggcaattgattgggccattccgagagaattgtttgcaagttttgggttttattagaaaatatttgaaagtatttttattaatgaaccaaaatgacatgttcatttgactactattgtagccgattttcgattgtttaaccaaacccagttgcatttgtacagatccacgtgtactggcacctcagaagaccaaatcatggactgtacaagtctctatacaatgtctttatccctgtgggcagcaagcaatgatgataatgacaaacaggatatctgtaagatggggctactgttgttacagtctcatatgtatcccagcacatgtaattttttaaatagtttctgaataaacacttgataactatgtc

SEQ ID NO: 187367 - DNA, 2433 bp, Artificial Sequence
  derived and/or modified sequence
gcgaatttgcatcggaggtgcgtttccccgtcagaatgtcagcctccccaggctcattcaactttattttctcaaatttttggtctcctttgctagcaaggaggagggggaagggagtgggttgagaggaagctcttcgacccttgctaactagaactgaattaaagttgtaaacgctggagtttaatactggctggactgaatttgcaatgggctttcagatggggtgggaggtgaatgggggcggggaagcacagggagggagggggaggggacccaacctcgctgaatggatgtgcggatttgatccagcggagaactgaaatttcaagggacttggacgaggtatccaagcaggaactttgcccaaggagacttatttctgactacgagatgaggccgcagacgcctttgagcaccacggggtatttacacaccaccccggcgtcagtgaattctgtggccacttcttcctctgctgtttacaaaccccctttgaagccccctaaggggactcgccaacccaacaagcccagggtgcgccccacctctcggcagccctctaaggacttgggctacagcaactatggccccagcatcgcctatcagaccaaatccccggtgcctttggagtgtcccaccgcgtgctcttgcaacctgcagatctctgatctgggcctcaacgtaaactgccaggagcgaaagatcgagagcatcgctgaactgcagcccaagccctacaatcccaagaaaatgtatctgacagagaactacatcgctgtcgtgcgcaggacagacttcctggaggccacggggctggacctcctgcacctggggaataaccgcatctcgatgatccaggaccgcgctttcggggatctcaccaacctgaggcgcctctacctgaatggcaacaggatcgagaggctgagcccggagttattctatggcctgcagagcctgcagtatctcttcctccagtacaatctcatccgcgagattcagtctggaacttttgacccggtcccaaacctccagctgctattcttgaataacaacctcctgcaggccatgccctcaggcgtcttctctggcttgaccctcctcaggctaaacctgaggagtaaccacttcacctccttgccagtgagtggagttttggaccagctgaagtcactcatccaaatcgacctgcatgacaatccttgggattgtacctgtgacattgtgggcatgaagctgtgggtggagcagctcaaagtgggcgtcctagtggacgaggtgatctgtaaggcgcccaaaaaattcgctgagaccgacatgcgctccattaagtcggagctgctgtgccctgactattcagatgtagtagtttccacgcccacaccctcctctatccaggtccctgcgaggaccagcgccgtgactcctgcggtccggttgaatagcaccggggcccccgcgagcttgggcgcaggcggaggggcgtcgtcggtgcccttgtctgtgttaattctcagcctcctgctggttttcatcatgtccgtcttcgtggccgccgggctcttcgtgctggtcatgaagcgcaggaagaagaaccagagcgaccacaccagcaccaacaactccgacgtgagctcctttaacatgcagtacagcgtgtacggcggcggcggcggcacgggcggccacccacacgcgcacgtgcatcaccgcgggcccgcgctgcccaaggtgaagacgcccgcgggccacgtgtatgaatacatcccccacccactgggccacatgtgcaaaaaccccatctaccgctcccgagagggcaactccgtagaggattacaaagacctgcacgagctcaaggtcacctacagcagcaaccaccacctgcagcagcagcagcagccgccgccgccaccgcagcagccacagcagcagcccccgccgcagctgcagctgcagcccggggaggaggagaggcgggaaagccaccacttgcggagccccgcctacagcgtcagcaccatcgagccccgggaggacctgctgtcgccggtgcaggacgccgaccgcttttacaggggcattttagaaccagacaaacactgctccaccacccccgccggcaatagcctcccggaatatcccaaattcccgtgcagccccgctgcttacactttctcccccaactatgacctgagacgcccccatcagtatttgcacccgggggcaggggacagcaggctacgggaaccggtgctctacagccccccgagtgctgtctttgtagaacccaaccggaacgaatatctggagttaaaagcaaaactaaacgttgagccggactacctcgaagtgctggaaaaacagaccacgtttagccagttctaaaagcaaagaaactctcttggagcttttgcatttaaaacaaac

SEQ ID NO: 187368 - DNA, 2877 bp, Artificial Sequence
  derived and/or modified sequence
atgcacacctgctgcccccccgtgaccctggagcaggacctgcacagaaagatgcacagctggatgctgcagaccctggccttcgccgtgaccagcctggtgctgagctgcgccgagaccatcgactactacggcgagatctgcgacaacgcctgcccctgcgaggagaaggacggcatcctgaccgtgagctgcgagaacagaggcatcatcagcctgagcgagatcagcccccccagattccccatctaccacctgctgctgagcggcaacctgctgaacagactgtaccccaacgagttcgtgaactacaccggcgccagcatcctgcacctgggcagcaacgtgatccaggacatcgagaccggcgccttccacggcctgagaggcctgagaagactgcacctgaacaacaacaagctggagctgctgagagacgacaccttcctgggcctggagaacctggagtacctgcaggtggactacaactacatcagcgtgatcgagcccaacgccttcggcaagctgcacctgctgcaggtgctgatcctgaacgacaacctgctgagcagcctgcccaacaacctgttcagattcgtgcccctgacccacctggacctgagaggcaacagactgaagctgctgccctacgtgggcctgctgcagcacatggacaaggtggtggagctgcagctggaggagaacccctggaactgcagctgcgagctgatcagcctgaaggactggctggacagcatcagctacagcgccctggtgggcgacgtggtgtgcgagacccccttcagactgcacggcagagacctggacgaggtgagcaagcaggagctgtgccccagaagactgatcagcgactacgagatgagaccccagacccccctgagcaccaccggctacctgcacaccacccccgccagcgtgaacagcgtggccaccagcagcagcgccgtgtacaagccccccctgaagccccccaagggcaccagacagcccaacaagcccagagtgagacccaccagcagacagcccagcaaggacctgggctacagcaactacggccccagcatcgcctaccagaccaagagccccgtgcccctggagtgccccaccgcctgcagctgcaacctgcagatcagcgacctgggcctgaacgtgaactgccaggagagaaagatcgagagcatcgccgagctgcagcccaagccctacaaccccaagaagatgtacctgaccgagaactacatcgccgtggtgagaagaaccgacttcctggaggccaccggcctggacctgctgcacctgggcaacaacagaatcagcatgatccaggacagagccttcggcgacctgaccaacctgagaagactgtacctgaacggcaacagaatcgagagactgagccccgagctgttctacggcctgcagagcctgcagtacctgttcctgcagtacaacctgatcagagagatccagagcggcaccttcgaccccgtgcccaacctgcagctgctgttcctgaacaacaacctgctgcaggccatgcccagcggcgtgttcagcggcctgaccctgctgagactgaacctgagaagcaaccacttcaccagcctgcccgtgagcggcgtgctggaccagctgaagagcctgatccagatcgacctgcacgacaacccctgggactgcacctgcgacatcgtgggcatgaagctgtgggtggagcagctgaaggtgggcgtgctggtggacgaggtgatctgcaaggcccccaagaagttcgccgagaccgacatgagaagcatcaagagcgagctgctgtgccccgactacagcgacgtggtggtgagcacccccacccccagcagcatccaggtgcccgccagaaccagcgccgtgacccccgccgtgagactgaacagcaccggcgcccccgccagcctgggcgccggcggcggcgccagcagcgtgcccctgagcgtgctgatcctgagcctgctgctggtgttcatcatgagcgtgttcgtggccgccggcctgttcgtgctggtgatgaagagaagaaagaagaaccagagcgaccacaccagcaccaacaacagcgacgtgagcagcttcaacatgcagtacagcgtgtacggcggcggcggcggcaccggcggccacccccacgcccacgtgcaccacagaggccccgccctgcccaaggtgaagacccccgccggccacgtgtacgagtacatcccccaccccctgggccacatgtgcaagaaccccatctacagaagcagagagggcaacagcgtggaggactacaaggacctgcacgagctgaaggtgacctacagcagcaaccaccacctgcagcagcagcagcagccccccccccccccccagcagccccagcagcagccccccccccagctgcagctgcagcccggcgaggaggagagaagagagagccaccacctgagaagccccgcctacagcgtgagcaccatcgagcccagagaggacctgctgagccccgtgcaggacgccgacagattctacagaggcatcctggagcccgacaagcactgcagcaccacccccgccggcaacagcctgcccgagtaccccaagttcccctgcagccccgccgcctacaccttcagccccaactacgacctgagaagaccccaccagtacctgcaccccggcgccggcgacagcagactgagagagcccgtgctgtacagcccccccagcgccgtgttcgtggagcccaacagaaacgagtacctggagctgaaggccaagctgaacgtggagcccgactacctggaggtgctggagaagcagaccaccttcagccagttctag

SEQ ID NO: 187369 - DNA, 2154 bp, Artificial Sequence
  derived and/or modified sequence
atgggcgccggcaagcacagagagggcggcggcggcgaccccaccagcctgaacggctgcgccgacctgatccagagaagaaccgagatcagcagagacctggacgaggtgagcaagcaggagctgtgccccagaagactgatcagcgactacgagatgagaccccagacccccctgagcaccaccggctacctgcacaccacccccgccagcgtgaacagcgtggccaccagcagcagcgccgtgtacaagccccccctgaagccccccaagggcaccagacagcccaacaagcccagagtgagacccaccagcagacagcccagcaaggacctgggctacagcaactacggccccagcatcgcctaccagaccaagagccccgtgcccctggagtgccccaccgcctgcagctgcaacctgcagatcagcgacctgggcctgaacgtgaactgccaggagagaaagatcgagagcatcgccgagctgcagcccaagccctacaaccccaagaagatgtacctgaccgagaactacatcgccgtggtgagaagaaccgacttcctggaggccaccggcctggacctgctgcacctgggcaacaacagaatcagcatgatccaggacagagccttcggcgacctgaccaacctgagaagactgtacctgaacggcaacagaatcgagagactgagccccgagctgttctacggcctgcagagcctgcagtacctgttcctgcagtacaacctgatcagagagatccagagcggcaccttcgaccccgtgcccaacctgcagctgctgttcctgaacaacaacctgctgcaggccatgcccagcggcgtgttcagcggcctgaccctgctgagactgaacctgagaagcaaccacttcaccagcctgcccgtgagcggcgtgctggaccagctgaagagcctgatccagatcgacctgcacgacaacccctgggactgcacctgcgacatcgtgggcatgaagctgtgggtggagcagctgaaggtgggcgtgctggtggacgaggtgatctgcaaggcccccaagaagttcgccgagaccgacatgagaagcatcaagagcgagctgctgtgccccgactacagcgacgtggtggtgagcacccccacccccagcagcatccaggtgcccgccagaaccagcgccgtgacccccgccgtgagactgaacagcaccggcgcccccgccagcctgggcgccggcggcggcgccagcagcgtgcccctgagcgtgctgatcctgagcctgctgctggtgttcatcatgagcgtgttcgtggccgccggcctgttcgtgctggtgatgaagagaagaaagaagaaccagagcgaccacaccagcaccaacaacagcgacgtgagcagcttcaacatgcagtacagcgtgtacggcggcggcggcggcaccggcggccacccccacgcccacgtgcaccacagaggccccgccctgcccaaggtgaagacccccgccggccacgtgtacgagtacatcccccaccccctgggccacatgtgcaagaaccccatctacagaagcagagagggcaacagcgtggaggactacaaggacctgcacgagctgaaggtgacctacagcagcaaccaccacctgcagcagcagcagcagccccccccccccccccagcagccccagcagcagccccccccccagctgcagctgcagcccggcgaggaggagagaagagagagccaccacctgagaagccccgcctacagcgtgagcaccatcgagcccagagaggacctgctgagccccgtgcaggacgccgacagattctacagaggcatcctggagcccgacaagcactgcagcaccacccccgccggcaacagcctgcccgagtaccccaagttcccctgcagccccgccgcctacaccttcagccccaactacgacctgagaagaccccaccagtacctgcaccccggcgccggcgacagcagactgagagagcccgtgctgtacagcccccccagcgccgtgttcgtggagcccaacagaaacgagtacctggagctgaaggccaagctgaacgtggagcccgactacctggaggtgctggagaagcagaccaccttcagccagttctag

SEQ ID NO: 187370 - protein, 863 aa, Artificial Sequence
  derived and/or modified sequence
MGNREMEELIPLVNRLQDAFSALGQSCLLELPQIAVVGGQSAGKSSVLENFVGRDFLPRGSGIVTRRPLVLQLVTSKAEYAEFLHCKGKKFTDFDEVRLEIEAETDRVTGMNKGISSIPINLRVYSPHVLNLTLIDLPGITKVPVGDQPPDIEYQIREMIMQFITRENCLILAVTPANTDLANSDALKLAKEVDPQGLRTIGVITKLDLMDEGTDARDVLENKLLPLRRGYVGVVNRSQKDIDGKKDIKAAMLAERKFFLSHPAYRHIADRMGTPHLQKVLNQQLTNHIRDTLPNFRNKLQGQLLSIEHEVEAYKNFKPEDPTRKTKALLQMVQQFAVDFEKRIEGSGDQVDTLELSGGAKINRIFHERFPFEIVKMEFNEKELRREISYAIKNIHGIRTGLFTPDMAFEAIVKKQIVKLKGPSLKSVDLVIQELINTVKKCTKKLANFPRLCEETERIVANHIREREGKTKDQVLLLIDIQVSYINTNHEDFIGFANAQQRSSQVHKKTTVGNQVIRKGWLTISNIGIMKGGSKGYWFVLTAESLSWYKDDEEKEKKYMLPLDNLKVRDVEKSFMSSKHIFALFNTEQRNVYKDYRFLELACDSQEDVDSWKASLLRAGVYPDKSVGNNKAENDENGQAENFSMDPQLERQVETIRNLVDSYMSIINKCIRDLIPKTIMHLMINNVKDFINSELLAQLYSSEDQNTLMEESAEQAQRRDEMLRMYQALKEALGIIGDISTATVSTPAPPPVDDSWIQHSRRSPPPSPTTQRRPTLSAPLARPTSGRGPAPAIPSPGPHSGAPPVPFRPGPLPPFPSSSDSFGAPPQVPSRPTRAPPSVPSRRPPPSPTRPTIIRPLESSLLD

SEQ ID NO: 187371 - DNA, 2592 bp, Artificial Sequence
  derived and/or modified sequence
atgggcaacagagagatggaggagctgatccccctggtgaacagactgcaggacgccttcagcgccctgggccagagctgcctgctggagctgccccagatcgccgtggtgggcggccagagcgccggcaagagcagcgtgctggagaacttcgtgggcagagacttcctgcccagaggcagcggcatcgtgaccagaagacccctggtgctgcagctggtgaccagcaaggccgagtacgccgagttcctgcactgcaagggcaagaagttcaccgacttcgacgaggtgagactggagatcgaggccgagaccgacagagtgaccggcatgaacaagggcatcagcagcatccccatcaacctgagagtgtacagcccccacgtgctgaacctgaccctgatcgacctgcccggcatcaccaaggtgcccgtgggcgaccagccccccgacatcgagtaccagatcagagagatgatcatgcagttcatcaccagagagaactgcctgatcctggccgtgacccccgccaacaccgacctggccaacagcgacgccctgaagctggccaaggaggtggacccccagggcctgagaaccatcggcgtgatcaccaagctggacctgatggacgagggcaccgacgccagagacgtgctggagaacaagctgctgcccctgagaagaggctacgtgggcgtggtgaacagaagccagaaggacatcgacggcaagaaggacatcaaggccgccatgctggccgagagaaagttcttcctgagccaccccgcctacagacacatcgccgacagaatgggcaccccccacctgcagaaggtgctgaaccagcagctgaccaaccacatcagagacaccctgcccaacttcagaaacaagctgcagggccagctgctgagcatcgagcacgaggtggaggcctacaagaacttcaagcccgaggaccccaccagaaagaccaaggccctgctgcagatggtgcagcagttcgccgtggacttcgagaagagaatcgagggcagcggcgaccaggtggacaccctggagctgagcggcggcgccaagatcaacagaatcttccacgagagattccccttcgagatcgtgaagatggagttcaacgagaaggagctgagaagagagatcagctacgccatcaagaacatccacggcatcagaaccggcctgttcacccccgacatggccttcgaggccatcgtgaagaagcagatcgtgaagctgaagggccccagcctgaagagcgtggacctggtgatccaggagctgatcaacaccgtgaagaagtgcaccaagaagctggccaacttccccagactgtgcgaggagaccgagagaatcgtggccaaccacatcagagagagagagggcaagaccaaggaccaggtgctgctgctgatcgacatccaggtgagctacatcaacaccaaccacgaggacttcatcggcttcgccaacgcccagcagagaagcagccaggtgcacaagaagaccaccgtgggcaaccaggtgatcagaaagggctggctgaccatcagcaacatcggcatcatgaagggcggcagcaagggctactggttcgtgctgaccgccgagagcctgagctggtacaaggacgacgaggagaaggagaagaagtacatgctgcccctggacaacctgaaggtgagagacgtggagaagagcttcatgagcagcaagcacatcttcgccctgttcaacaccgagcagagaaacgtgtacaaggactacagattcctggagctggcctgcgacagccaggaggacgtggacagctggaaggccagcctgctgagagccggcgtgtaccccgacaagagcgtgggcaacaacaaggccgagaacgacgagaacggccaggccgagaacttcagcatggacccccagctggagagacaggtggagaccatcagaaacctggtggacagctacatgagcatcatcaacaagtgcatcagagacctgatccccaagaccatcatgcacctgatgatcaacaacgtgaaggacttcatcaacagcgagctgctggcccagctgtacagcagcgaggaccagaacaccctgatggaggagagcgccgagcaggcccagagaagagacgagatgctgagaatgtaccaggccctgaaggaggccctgggcatcatcggcgacatcagcaccgccaccgtgagcacccccgcccccccccccgtggacgacagctggatccagcacagcagaagaagccccccccccagccccaccacccagagaagacccaccctgagcgcccccctggccagacccaccagcggcagaggccccgcccccgccatccccagccccggcccccacagcggcgccccccccgtgcccttcagacccggccccctgccccccttccccagcagcagcgacagcttcggcgcccccccccaggtgcccagcagacccaccagagccccccccagcgtgcccagcagaagacccccccccagccccaccagacccaccatcatcagacccctggagagcagcctgctggactag

SEQ ID NO: 187372 - DNA, 7643 bp, Artificial Sequence
  derived and/or modified sequence
gcgggtcgttagctgtcagagccaagcggcgggctggcggcgggctccgacgtctgcgccaggacctggctggctgagcccggcgcagcagcagcagccagggcagcgcggcccctactccctgtcaggtcgtagaggcgagcagggaccagctggtcgccggcccctcgggcaagatggggaaccgggagatggaggagctgatcccgctggtgaaccgtctgcaggacgcgttttcggcgctgggacagagctgcctgctggagctgccgcagatcgccgtggtgggcggccagagcgccggcaagagctcggtgctcgagaacttcgtgggcagggactttctccctcgagggtcgggcattgtaacaagacgacctcttgtgctgcagcttgttacttctaaagcagaatatgccgagtttctacattgcaaaggaaagaaatttacagattttgatgaagttcgccttgagattgaagcagaaacagatcgcgtgactggaatgaataaaggcatttcctccatacccattaatttacgagtctattccccacacgtgttaaatctaacccttattgatctacctggaataactaaagtgcctgtgggagatcagccaccagatatcgagtatcagatcagagaaatgattatgcagttcatcacgagggagaactgtctgattttagctgttactccagccaacactgatcttgcaaactcagatgcgctgaagctagctaaagaagttgatcctcaaggtctgagaaccattggagttatcaccaaactggaccttatggatgaaggaacggatgccagggatgttctagagaacaaactgttgcctcttcgcaggggttacgtgggggtggtaaacagaagccagaaggacatagatgggaagaaggacataaaggcagccatgctggcagagaggaagtttttcctttcccacccggcttacagacatatcgctgaccgaatgggaaccccacacctgcagaaggtccttaatcagcaacttaccaaccacattcgggataccctaccaaacttcaggaacaaactacagggacagttgctctccatagaacatgaagtagaagcctacaaaaatttcaaaccagaagacccaacaaggaagaccaaagcattgctgcagatggttcagcaatttgctgtggactttgagaagagaattgaagggtcaggggatcaagtagataccctggaactctcaggtggtgctaaaatcaatcgtatttttcatgaacgctttccttttgagatagtaaagatggagttcaatgagaaagaattgcgaagagaaataagctatgcaatcaaaaacatacatggtatcaggacagggttgtttactccagacatggcatttgaagcgatagtcaagaaacagattgtaaagttgaaagggccttccttgaagagtgtggatctggtaatacaagaattaatcaacactgtgaagaagtgtaccaaaaaactggcaaacttccccagactctgcgaggaaacggaaaggattgttgctaaccacattcgtgagcgagaagggaagacaaaggaccaggtattgctattgattgacattcaagtctcttacatcaacaccaaccatgaagacttcattggcttcgcaaatgctcagcagaggagcagtcaggttcacaagaaaaccacagttggaaatcaggtgattcgcaaggggtggctcaccatcagcaacattggcatcatgaaaggcggctcgaagggatactggttcgtccttactgcggaaagcttgtcctggtataaagatgatgaggaaaaagaaaagaagtacatgcttcccttggacaacctgaaagttcgggatgtggaaaagagctttatgtctagcaagcacatctttgcactctttaatacagagcaaaggaatgtatacaaagactatcgcttccttgagctggcatgtgattcccaggaggatgtcgacagctggaaggcatctctactaagagctggggtctatcctgacaaatctgtagggaacaacaaagctgaaaatgatgagaatggacaagcagaaaacttttccatggacccacaattggagaggcaagtggagaccattcgcaacctcgtagactcctacatgtccattatcaacaaatgtatccgagatctaattccaaaaacaataatgcaccttatgatcaataacgttaaagatttcataaattccgagctcctagcacagttgtattcttcagaggaccaaaataccctgatggaggaatctgctgagcaggctcagcgccgggatgagatgcttcgaatgtatcaagcactgaaagaagcccttgggataattggggacatcagcacagccaccgtgtccactccggcaccccctccagtggatgactcctggatacagcactctcgcaggtcacctcctccaagccccacaacccaaaggaggccaacactaagtgctcccctcgcaaggcccacatccggccgaggaccagctcctgccattccctctcctggcccccactctggggctcctccagtcccattccgtccaggcccattacctcctttccccagcagcagtgactccttcggagcccctccacaagttccatctaggcctacgagggccccgcccagtgtcccaagccggagaccacccccatcaccaactcgtcccactataatccgcccactagaatcctccctgttagactaaacgaagtgtctggcatggcaattaatcactaatgaattatgcgaaagcaacatatttgataaccgttgcagtaaatcatgagtagtcgcatgtgtggacatcagtaggcaagtaaccagttttactaatgcattcatcgctcatcttcattgctcatggtatgtcaaacctttggggtttgactcagaaactgctaaccttttagaggctttatatgttgtactgaccaaggtaggtttgtatagcagccctatactttggggatcatttgcctaccatggcatatatttgaaattgctttggacaagttttctaggctatctaccaggtagctcattaaacgtaattcttcagatatgagatagtgggcttagacctaagccatacatatttcttttcccacattctgtttaggatgacagtaattctgttgtctaccattaatgctactacctactccataattgcctatttagctcctcttttcttcctttttatttcataagactgctaggaagtgattttttaaaattaggactccttaagaataaacttttccagaagcacgaggtagtttgcaaaggaaaagtctgcactgtttgctctaaagagcttctcctcattccaatgtgttttgcttcatgctagaagcatatgcaacagtgaataaaagcttctttttttgttaatcagtcaataaatttggctaattagtttcagagttcaaggaagaagcaaaatatcacatctctagaagtgttgggaaaaatataatttctttctttacttatattcacctcatggtaggttatattgaaggctgacatggagaatgtttacttttctatttggcatagctaactacactttgatactaactccagttttactattattattttggttggaaaaaaaattcactctttacgtgctaatttgtaatcttgttttgtaagaatttatcctacccttgaaacaggctcagtgtaactgtatatccattctaggctttcttaataaatcttgaggctatgggataatcacatttaaagaatggttcctgaaatgaagtcagtagaaatggcatgggataagagcagagctcacacttttacagttgcagtatttcaaagtccctatccaggtcactccagaaaagggtattgaaacgttgaaatctaaagcaaatttgcaatttcttaagatttctaaaatttaccagaacagtttagcctgggggttaatagttaagtcttgaggctaagttttggactaccaaggaccagatgattcacatgtaggaaacagccagaagccaactggaattttgtgtgctaactgttcccagacagcagagcaagtattcactgagtaggggtgtcccatgacactatttcatattctacagaagtaaatcaggtttcaccaactgaaatgtctccctttgaaagtagcaaacatgatttgtatgttaacttaactttaatttcctgtgtagtttacacccagagcagatactcataaagtataaagtaaaaacttttaaccattattaaacagagaacttgccatgttgagtgccattgtattgaacttattctaaaggcttatgctaacccatttataattggtaaaaatcagaaaatacaagatttacataaaggtcatttcaacttttaaggttaccagtgattgtataaaaacatcacaatcctaaatcctctcgtatctcaccccaaaccccaaactgggggaaaaaaagttaactctttgtgaatggaaccaatgtgcaagatacatactgcatttttaaaatagtgtctcagctaaatggaaaactgttaagcaaacatccatagtaaaacaaataatcttcagtgagatctttttataaaacttcttgtttttaggattccctttgcttcttcctttgaattctctaaaataggcagctaacggattatatacttcagggtttggctttgtgctaaatgtggttttgtgttttgctgtatttcaaaattttccttctgttaaaggaaaatattgtgaataaccactggtgtgttcttagatcagcacaaaccatgtcaaaaaaaattggagatttttttccaattttccttccactgatcttaggcagtaataaacaatggcatttgtcatctttggcacttgcttttagattatagtcccacagttgcactgccccaattgtctacctttgtgggtacatttttgttctttactcctaagttatttctcatagaacccagcctactctagaatttcagcagtgacattggagaatatttttaatttgctgcagtactatgtcatattattagtatgaatctcatttcccaaagggtttgtattctgctaaaaggagatgccaatgttgaatgaagtctgaaactctagtatgtgcatagtttgacgtgcagcatgcacaccaggccttaagatgggaatgtagcttaatgattttctgtttcccataccatttctaatcttttgtgtaattttctcttaactgattgctctgatattgtaaacacaatagatgtagctctatcatgtctagcataatttaaaaaatcagtgtttttaggatttgggaaaataaactgtaaatgtttatttgataggtaaatatagttttattgtcacatgctaaatattgcatgcatattgactaattggaataaccatttactcaattatggacagcttattgaaatagtattgatttagaaaaagtatattgcatttctaaaaaacatctaccaaggttactcgtctgaatattgcttttagccgtgttttataacatagacgagcagtagggtctgtttattagcaaatttcctatttgttccaatacaaactcactttattctaaagtatattaatgaaaccagttcctgtgatgtaactgtaagccttctcgacttagacttaaaaagtggtcacatagattaattttgtgactttttagtatagactgtagccataattctcaaatatgaaatgggacctaataccagtatgtgataaatgttgatgttttctgtgtacaaacacattttctatgcatgtgtctctgtgtatatggcatatacctagtaagtatgtttctgtaagtatgtgtattttatgtccatttgagtaggtaggtaggttttaaaaatactagttaaaatgccacaagcatgagtgtgattgtatgtgcactgtgtgtatatatataaatatatgtatatgtatggttgtaaatatctatgtatacatgtacttagtatgtgtggtatcaggatattttttaaactgtgataatacaacagatagctttgaatgatctgccataacatgtggtaacaatagttcatttctcataacatatatgaggtatacaaaattttctaactccagattgtagtcattttgagaggtacaaagctcataattaccatgacaacatggtaatgtccatagacatttgtatctgaatccacaagaagatctgaatctaagaaggaattacctttgacaatatttttcggtaagaagtaaaacctctggagacctatctttaagatctctaattggaattataaattatttttggattgctgagctgaatcttaaaaagccaagttgatatacatagtcatttttcctctatggtagaagtaaaaaaaaaaaaaaaggacatagcaacattaaagtagtggatttttctgagtaaatttgctgaaaatataagagagaagctatctaataccttggaggtaggtcatccactttttcaggtaaacatttttcatttggcaaatggcataattatttgaaagtgacaggaatctcctcagaatgaagaataaagcctactaggtctctaactgttgaactcatgaaagaagatagtgtatgagacttaagccatgagttttgtatcatttcaattagaagactactagctgtgagctcagagtttaatgtaaatgaatctagatgattttgaagaaatgattattcgttcaccagatcactcattgtacattctaaaaagctcaaatgagtcttctagatactcttactcatcctgtctggttgctatgtttaaaattatgtggtgctgtgtaggtgaaactttaagaatatttttgaagcatatgtaatatatgcactgctatttgtgtgtgtgtgtgtgtctttgtatatatgtaagaatgtgtgtatgtgtgagagcaagagagaggaaactcaaagaggagtgtttgtcttaagacctgttcatactggtatattggtgagacttctcacttctggttggaggtttcacatatggctcaactcaagtcattaatctctttttaatttttactcttgaattccttaaacttcgctcattatgaaatgttttaaaattatgacaaaaattactctgtctaaccacttgccttgtctgctaccagtttgttaaaaattattccccccaaccagtaattccaccagtactacttgatttgtgttatatttcctatgtacatgtacagcctttgttttgcttgcttgtctatttttactttcccttttttgggtcaaatttttcttttgctttgtttgaagaaggaatatacagaagtaaaatcttgtcttctctgctgattctttaattaatatgagccggatactttccactgtcttcttggcactttcaggatttcttaatgctgatatatggactcttagaatggaatttttgaagaaaaatctcaaagcctgtatcgttcttgaaggtcacatgtacctattgtgaaaatgtgaagctgtatttctgaagctgaaataaattataacatttgaagg

SEQ ID NO: 187373 - DNA, 2592 bp, Artificial Sequence
  derived and/or modified sequence
atgggaaaccgagaaatggaggaactgatccctctggtcaataggttgcaagatgcattctctgctttgggccagtcctgcctcctagagcttccacaaattgctgtcgtgggcggacaaagcgcagggaaatcatccgtcctggaaaatttcgtggggagagacttcttgccaaggggttcgggcatcgtgacacgtagaccactggtgcttcagttagtcacctccaaggcggagtacgccgagttcctgcactgcaagggcaagaagttcaccgatttcgacgaggtcagactggagatcgaggcggagactgatcgcgtcactgggatgaacaaaggcatcagttcaatccctatcaatctgcgggtctacagtccacacgttcttaacttgacacttatcgacctaccgggcatcaccaaggtgccggtcggtgatcaacctcccgacatcgagtatcagatccgggagatgatcatgcagtttatcacccgggagaattgtctcatcctagctgtgacccctgccaacacagacctcgccaattcagatgctctgaagctcgccaaagaagttgaccctcaaggcttgcgcacgatcggagtcattaccaagctcgacttgatggatgagggaaccgatgcaagagacgttcttgagaataaattgttacctctacgtaggggctacgtgggtgttgttaaccgtagccaaaaggacattgacgggaagaaggacattaaagccgccatgctggccgaacggaagttttttctcagtcaccccgcataccgccacatagctgatcggatggggacacctcatctccagaaggtgctgaaccagcagctgacaaatcatatacgcgacacccttcctaactttcgaaataagcttcagggccagctgttatccattgagcatgaagtggaggcttacaaaaacttcaagccggaggatccaacgcgaaaaactaaggcccttctccagatggttcaacagtttgccgtagactttgagaaacggatcgaaggcagtggagatcaggtggatacccttgagttatctggcggggccaaaattaatcgaatctttcacgaacggtttcccttcgagattgtgaagatggaatttaacgaaaaggagctcaggcgggaaatctcctacgcaatcaagaacatccacggaatccgtactgggctatttacaccagacatggcattcgaggcaattgtgaagaaacagatcgtgaagctgaagggcccaagcctgaagtctgttgatctcgtgatacaggagttaataaacacagtaaagaagtgcaccaaaaagctagccaactttccgagactgtgtgaagagacagagaggatagtggctaatcatattagggaacgagaaggtaaaacgaaggaccaggtcctgttactcatcgacatacaggtgtcatacattaacaccaaccatgaggacttcattggatttgccaatgctcagcaaaggtcctcacaggtgcacaagaagacaactgtcggcaaccaagtgattcgcaagggatggttgacgatcagtaatatcggcattatgaagggtggctccaaggggtactggttcgtgctgaccgcagagtctctgtcgtggtacaaggacgatgaagagaaggagaaaaaatatatgctccctctggataacctgaaagtcagggatgtagagaagtcgttcatgtcttccaagcacatattcgcactgttcaacaccgagcagaggaacgtgtacaaagactaccgcttcctggagctcgcctgcgattcccaggaggatgtggactcttggaaggcatcacttctgcgcgccggcgtctacccagacaaaagcgttgggaacaataaggcggaaaacgatgaaaatgggcaagccgaaaacttttccatggacccacagcttgaacgccaagtcgagacaattcggaaccttgttgacagctatatgtccatcattaataagtgtatcagagacctaatacccaaaactatcatgcacctaatgatcaataacgtgaaggattttattaattcagaactgctagcccagttatattcgagcgaagaccaaaatacactcatggaagagagtgcagagcaagcccagcgacgggacgaaatgttgcgaatgtaccaggctttaaaggaagctttaggcattatcggcgatattagtacggctacagttagtacccccgcgcccccgccggtagacgacagctggatccagcattccagacgatcccctcccccctctcctactacacagcgccgccctacactgagcgctcctctcgccaggcccacaagcgggcgcggacctgcaccagctatcccttctcctgggccacatagtggtgcaccacccgtgccgtttagacccgggccactgcctccatttccgagtagcagcgacagctttggcgccccacctcaggtgcctagtcgtcccacgcgcgcccctcctagtgtcccttctaggagacctcccccttctccgacgagacccacaatcattcgcccgctggaatcttccttgttggactag

SEQ ID NO: 187374 - DNA, 2592 bp, Artificial Sequence
  derived and/or modified sequence
atgggcaaccgggagatggaggagctgatccccctggtgaaccggctgcaggatgccttcagcgccctgggccagagctgcctgctggagctgccccagattgctgtggtgggcggccagagcgctgggaagagctctgtgctggagaactttgtgggccgggacttcctgccccggggcagcggcatcgtgacccggcggcccctggtgctgcagctggtgaccagcaaggccgagtatgcagagttcctgcactgcaagggcaagaagttcacagactttgatgaggtgcggctggagattgaagctgagacagacagagtgacaggcatgaacaagggcatcagcagcatccccatcaacctgcgggtgtacagcccccacgtgctgaacctgaccctgattgacctgcccggcatcaccaaggtgcctgtgggggaccagcccccagacatcgagtaccagatccgggagatgatcatgcagttcatcacccgggagaactgcctgatcctggccgtgaccccagccaacacagacctggccaacagtgatgccctgaagctggccaaggaggtggacccccagggcctgcggaccatcggggtcatcaccaagctggacctgatggatgagggcacagatgccagagatgtgctggagaacaagctgctgcccctgcggcggggctacgtgggcgtggtgaacagaagccagaaggacattgatggcaagaaggacatcaaggccgccatgctggccgagaggaagttcttcctgagccacccagcctaccgccacatcgctgacaggatgggcaccccccacctgcagaaggtgctgaaccagcagctgaccaaccacatccgggacaccctgcccaacttcaggaacaagctgcagggccagctgctgagcattgaacatgaggtggaggcctacaagaacttcaagccagaggaccccaccaggaagaccaaggccctgctgcagatggtgcagcagtttgctgtggactttgagaagagaattgagggcagcggggaccaggtggacaccctggagctgtctggaggagccaagatcaaccgcatcttccacgagcgcttcccctttgagatcgtgaagatggagttcaatgagaaggagctgcggcgggagatctcctatgccatcaagaacatccacggcatcagaacaggcctcttcaccccagacatggcctttgaggccatcgtgaagaagcagatcgtgaagctgaagggccccagcctgaagtctgtggacctggtgatccaggagctgatcaacacagtgaagaagtgcaccaagaagctggccaacttcccccggctgtgtgaggagacagaaagaattgtggccaaccacatccgggagcgggagggcaagaccaaggaccaggtgctgctgctgattgacatccaggtgtcctacatcaacaccaaccacgaggacttcatcggctttgccaatgcccagcagaggagcagccaggtgcacaagaagaccaccgtgggcaaccaggtgatcaggaagggctggctgaccatcagcaacatcggcatcatgaagggcggcagcaagggctactggtttgtgctgacagctgagagcctgtcctggtacaaggatgatgaggagaaggagaagaagtacatgctgcccctggacaacctgaaggtgagagatgtggagaagagcttcatgagcagcaagcacatctttgccctcttcaacacagagcagagaaatgtgtacaaggactaccgcttcctggagctggcctgtgacagccaggaggatgtggacagctggaaggccagcctgctgcgggccggcgtgtacccagacaagtctgtgggcaacaacaaggcagaaaatgatgaaaatggccaggccgagaacttctccatggacccccagctggagcggcaggtggagaccatccggaacctggtggacagctacatgagcatcatcaacaagtgcatccgggacctgatccccaagaccatcatgcacctgatgatcaacaacgtgaaggacttcatcaacagcgagctgctggcccagctgtacagcagcgaggaccagaacaccctgatggaggagagcgctgagcaggcccagaggagagatgagatgctgaggatgtaccaggccctgaaggaggccctgggcatcatcggggacatcagcacagccaccgtgtccaccccagcccctcctcctgtggatgacagctggatccagcacagcagaagaagccccccacccagccccaccacccagaggcggcccaccctgagcgcccccctggcccggcccaccagcggccggggccctgccccagccatccccagccctggcccccacagcggggcccctcctgtgcccttccggcccggccccctgccccccttccccagcagcagtgacagctttggagccccaccccaggtgcccagccggcccacccgggccccacccagcgtgcccagccggcggcccccacccagccccacccggcccaccatcatccggcccctggagagcagcctgctggactag

SEQ ID NO: 187375 - DNA, 2592 bp, Artificial Sequence
  derived and/or modified sequence
atgggcaaccgggagatggaggagctgatccccctggtgaaccggttacaggatgccttctccgcactcgggcagagttgcctcttggagttgcctcaaatagcagttgtgggcggccagagtgccgggaagagctcagttctagaaaactttgtaggtagggattttttgccccggggttcgggaattgtgacacggaggcctcttgtcctgcaactggtgacttccaaggcggagtacgcagaattcttacattgcaaaggtaaaaaattcacggactttgatgaggtgagactggagatcgaggccgagacagacagagtaactggcatgaacaaaggtatctccagcatccctattaacctacgggtgtactcgccccacgttctgaacctgacactgattgacctgccagggatcactaaggtacccgttggagaccagccccccgatattgagtatcagattcgcgagatgatcatgcagttcattacacgggaaaattgccttatcctggcagtgactcctgctaacaccgacttggctaacagcgatgcactaaagctcgctaaagaagtggatcctcaaggcctacgaacaattggggtcatcactaaactcgatctgatggacgagggtacagatgccagagacgtgctggagaataaattattgcctctaaggagaggttatgtgggggtggtaaataggtcacagaaggacatcgatgggaaaaaggacataaaggccgccatgcttgcagaacggaaattttttcttagtcaccctgcttaccgacacattgccgataggatggggaccccccacctgcaaaaggtgctgaatcaacagctgacaaaccatattcgagacactttgccaaactttcgtaacaaactgcagggccaacttctatcgatagagcatgaggtcgaagcttacaagaatttcaaacccgaggacccaacacgaaagaccaaggcccttctccagatggtgcagcaattcgccgtcgactttgagaagcgaattgaggggagcggggaccaggtcgatactctcgagcttagtggcggagctaaaattaacagaatcttccacgagcgctttccattcgaaatcgtgaagatggagtttaacgaaaaggagctccggcgggagataagctatgccattaaaaacatccacggcataagaaccgggcttttcactcccgacatggccttcgaagcaatcgtcaaaaagcagatcgtgaagctcaaagggccatctctgaagtctgtcgatctggtgatccaagaactgatcaatactgtcaaaaagtgcactaagaaactcgccaatttcccgcgcctgtgtgaagagactgagcgaattgtcgccaatcacatcagagagagagaaggaaagacgaaggatcaggtcttactgctaatcgacatccaggtcagttacataaacacaaatcatgaggactttattggttttgcaaacgctcagcagcgcagctcacaggttcacaagaaaaccacggtggggaaccaggttattcgtaaagggtggctgaccatttctaatatcggcattatgaagggcggtagcaaaggatattggttcgtccttactgccgagagcctcagctggtataaggacgacgaagaaaaggaaaagaaatacatgctgcctctggataatctcaaagtccgcgacgtcgaaaaatcttttatgagtagtaaacacatctttgcgctgttcaacacagaacaaagaaatgtgtacaaagattacagattcctagaattagcgtgtgactcccaagaggatgtggattcctggaaagctagtttgctccgagccggcgtctacccagacaagtctgtgggaaataacaaggccgagaatgatgaaaacggacaggccgagaacttcagcatggacccccagttggaaaggcaggtggaaaccatccggaaccttgtggactcttacatgagtataatcaacaagtgcatacgggatttaatccccaagaccatcatgcacttaatgattaacaacgtgaaggattttatcaactctgaattattagctcagctgtatagcagtgaagatcagaacaccttgatggaggagtccgcagaacaagcacagaggagggacgagatgctcagaatgtatcaggccctgaaagaggccctcggcataatcggcgacatatccaccgcaaccgtgagcactccggctccgcctccagtcgacgatagttggatccagcactcccggcgaagtccccctccatcccccacaacccagaggcgcccaactttgagtgcccctcttgccagacctacctcaggccgcggaccggcccccgccattccttctcctggccctcatagtggggccccaccagttccgttccggcccgggcccctgccccctttcccctcaagctctgacagctttggcgctcctccccaggttccctctcggccgactcgggccccaccatcagtgcctagtcgccgccctcccccgtcaccgactcgcccaaccatcatcaggcccctcgaatcaagcctgctggattag

SEQ ID NO: 187376 - DNA, 2592 bp, Artificial Sequence
  derived and/or modified sequence
atgggcaatagagagatggaggaacttattccgctggtcaacagacttcaagacgccttctcagctctgggccagagttgcctcctggagctgccacagatcgccgtggtcgggggacaatctgctggtaagagttccgtattggagaacttcgttggcagagactttctaccaagaggcagtggcatcgtgacaaggcgacctctggttctccagttagtcacttctaaagcggagtatgctgagttcttacactgcaaagggaaaaaatttacggattttgatgaagtcaggctcgagatcgaagccgagaccgatagagtgaccggcatgaacaagggaatcagctctatcccaatcaacctgcgagtttatagccctcatgtgttgaacttaaccctgatcgatttaccgggaataacaaaagtccctgtgggagaccagccaccagatattgagtaccagattcgggaaatgataatgcaatttatcaccagggaaaattgcctcattttggccgtgactcccgcaaacacagaccttgccaactctgatgcattgaaactcgctaaggaggtggacccccagggactccgcactattggggtcattactaagctggacctcatggacgagggtacagacgcacgcgatgtactcgagaacaaattgctccccttacggcgaggttacgttggggtcgtgaatagatcacagaaggatatcgacggaaaaaaagatattaaagcagcaatgctcgccgaacgcaagtttttcctatctcatcctgcctatcgacacatcgccgaccgaatgggaactccccacctccagaaggtgctgaaccagcagctgacaaatcatattcgggacacactgccaaattttagaaataagcttcagggtcaactgctatccatcgagcacgaggtggaggcttataagaactttaaaccggaagatccaactcggaagactaaggcattgcttcagatggtgcagcagttcgccgtagactttgaaaagagaatcgagggatctggggaccaggtggatacactagagcttagcgggggagctaaaattaaccggattttccacgagcgcttcccattcgagattgtgaagatggaatttaatgagaaggaacttaggcgtgagatttcgtacgccattaaaaatatacatggaatccgcacggggctgttcacacccgacatggcatttgaggctattgtaaaaaagcagatcgtcaagctcaagggtccaagcctgaagagtgtcgatctggtaatacaggagctgataaacactgtgaagaaatgtacaaagaaattggcaaacttcccaagactgtgtgaggaaacggaacgtatcgtggccaatcatattcgcgagagggaagggaagaccaaggaccaagttctcttgctgatcgatatccaggtttcttacatcaacacaaatcacgaagacttcatcggctttgctaacgcacaacagcggtcctctcaagtgcacaagaaaacaacggtcgggaatcaggttatccgaaagggttggttgacaatctcaaatatcgggattatgaaaggtggcagcaagggctattggttcgtcctgactgccgagtcactctcttggtacaaagacgatgaagagaaggagaagaaatatatgttgccattagacaacctgaaggtccgtgacgtcgaaaagtctttcatgtcctccaaacacatattcgccttatttaataccgaacaacggaacgtttacaaagattatcgctttctggaactggcttgtgacagtcaggaggacgtcgatagctggaaggcatccctgctccgtgcaggggtttatccggataagtctgtcggcaataacaaagctgagaacgatgagaacggccaagccgagaatttcagcatggatccgcagctggagcggcaggtcgaaactatccgaaacttggtggattcttacatgagtatcattaataagtgtattcgagaccttattcccaagaccatcatgcacctgatgataaacaatgttaaggattttatcaacagtgaattactggcccagctgtattctagcgaggatcaaaatacccttatggaagagagtgcggaacaggcccagagaagagatgagatgctgaggatgtaccaagcccttaaagaggccctcgggatcattggtgacatctccaccgccaccgtttcgaccccagcaccacctcctgtggacgatagttggatccagcactcacggagatcaccccctcccagcccaaccacacaacggcgaccgactctgtccgcacccctggccagacccactagcggaaggggaccagcccctgctatccccagccctggcccacattccggagctcctcctgttccatttcggccaggcccattgcctccgtttccttcaagctcagactcctttggtgcgcctcctcaagtgcctagtcgcccaaccagagcaccccctagtgtgcccagccgcaggccacctccctctcccacccggcctacgatcataagaccacttgaaagcagtcttctggactag

SEQ ID NO: 187377 - DNA, 1554 bp, Artificial Sequence
  derived and/or modified sequence
ctgcatcctactgctattttcattttatcgatggaatactttgaagcacgaaaaatcattatatcttgaaataatttttaaaataatccaataacaaactcagaactactgaagaataataaagaatatgccgagtttctacattgcaaaggaaagaaatttacagattttgatgaagttcgccttgagattgaagcagaaacagatcgcgtgactggaatgaataaaggcatttcctccatacccattaatttacgagtctattccccacacgtgttaaatctaacccttattgatctacctggaataactaaagtgcctgtgggagatcagccaccagatatcgagtatcagatcagagaaatgattatgcagttcatcacgagggagaactgtctgattttagctgttactccagccaacactgatcttgcaaactcagatgcgctgaagctagctaaagaagttgatcctcaaggtctgagaaccattggagttatcaccaaactggaccttatggatgaaggaacggatgccagggatgttctagagaacaaactgttgcctcttcgcaggggttacgtgggggtggtaaacagaagccagaaggacatagatgggaagaaggacataaaggcagccatgctggcagagaggaagtttttcctttcccacccggcttacagacatatcgctgaccgaatgggaaccccacacctgcagaaggtccttaatcagcaacttaccaaccacattcgggataccctaccaaacttcaggaacaaactacagggacagttgctctccatagaacatgaagtagaagcctacaaaaatttcaaaccagaagacccaacaaggaagaccaaagcattgctgcagatggttcagcaatttgctgtggactttgagaagagaattgaagggtcaggggatcaagtagataccctggaactctcaggtggtgctaaaatcaatcgtatttttcatgaacgctttccttttgagatagtaaagatggagttcaatgagaaagaattgcgaagagaaataagctatgcaatcaaaaacatacatggtatcaggacagggttgtttactccagacatggcatttgaagcgatagtcaagaaacagattgtaaagttgaaagggccttccttgaagagtgtggatctggtaatacaagaattaatcaacactgtgaagaagtgtaccaaaaaactggcaaacttccccagactctgcgaggaaacggaaaggattgttgctaaccacattcgtgagcgagaagggaagacaaaggaccaggtattgctattgattgacattcaagtctcttacatcaacaccaaccatgaagacttcattggcttcgcaaatgctcagcagaggagcagtcaggttcacaagaaaaccacagttggaaatcaggtgattcgcaaggggtggctcaccatcagcaacattggcatcatgaaaggcggctcgaagggatactggttcgtccttactgcggaaagcttgtcctggtataaagatgatgaggaaaaa

SEQ ID NO: 187378 - protein, 1259 aa, Artificial Sequence
  derived and/or modified sequence
MDGPTRGHGLRKKRRSRSQRDRERRSRGGLGAGAAGGGGAGRTRALSLASSSGSDKEDNGKPPSSAPSRPRPPRRKRRESTSAEEDIIDGFAMTSFVTFEALEKDVALKPQERVEKRQTPLTKKKREALTNGLSFHSKKSRLSHPHHYSSDRENDRNLCQHLGKRKKMPKALRQLKPGQNSCRDSDSESASGESKGFHRSSSRERLSDSSAPSSLGTGYFCDSDSDQEEKASDASSEKLFNTVIVNKDPELGVGTLPEHDSQDAGPIVPKISGLERSQEKSQDCCKEPIFEPVVLKDPCPQVAQPIPQPQTEPQLRAPSPDPDLVQRTEAPPQPPPLSTQPPQGPPEAQLQPAPQPQVQRPPRPQSPTQLLHQNLPPVQAHPSAQSLSQPLSAYNSSSLSLNSLSSSRSSTPAKTQPAPPHISHHPSASPFPLSLPNHSPLHSFTPTLQPPAHSHHPNMFAPPTALPPPPPLTSGSLQVAGHPAGSTYSEQDILRQELNTRFLASQSADRGASLGPPPYLRTEFHQHQHQHQHTHQHTHQHTFTPFPHAIPPTAIMPTPAPPMFDKYPTKVDPFYRHSLFHSYPPAVSGIPPMIPPTGPFGSLQGAFQPKTSNPIDVAARPGTVPHTLLQKDPRLTDPFRPMLRKPGKWCAMHVHIAWQIYHHQQKVKKQMQSDPHKLDFGLKPEFLSRPPGPSLFGAIHHPHDLARPSTLFSAAGAAHPTGTPFGPPPHHSNFLNPAAHLEPFNRPSTFTGLAAVGGNAFGGLGNPSVTPNSMFGHKDGPSVQNFSNPHEPWNRLHRTPPSFPTPPPWLKPGELERSASAAAHDRDRDVDKRDSSVSKDDKERESVEKRHSSHPSPAPVLPVNALGHTRSSTEQIRAHLNTEAREKDKPKERERDHSESRKDLAADEHKAKEGHLPEKDGHGHEGRAAGEEAKQLARVPSPYVRTPVVESARPNSTSSREAEPRKGEPAYENPKKSSEVKVKEERKEDHDLPPEAPQTHRASEPPPPNSSSSVHPGPLASMPMTVGVTGIHPMNSISSLDRTRMMTPFMGISPLPGGERFPYPSFHWDPIRDPLRDPYRELDIHRRDPLGRDFLLRNDPLHRLSTPRLYEADRSFRDREPHDYSHHHHHHHHPLSVDPRREHERGGHLDERERLHMLREDYEHTRLHSVHPASLDGHLPHPSLITPGLPSMHYPRISPTAGNQNGLLNKTPPTAALSAPPPLISTLGGRPVSPRRTTPLSAEIRERPPSHTLKDIEAR

SEQ ID NO: 187379 - DNA, 3780 bp, Artificial Sequence
  derived and/or modified sequence
atggacggccccaccagaggccacggcctgagaaagaagagaagaagcagaagccagagagacagagagagaagaagcagaggcggcctgggcgccggcgccgccggcggcggcggcgccggcagaaccagagccctgagcctggccagcagcagcggcagcgacaaggaggacaacggcaagccccccagcagcgcccccagcagacccagaccccccagaagaaagagaagagagagcaccagcgccgaggaggacatcatcgacggcttcgccatgaccagcttcgtgaccttcgaggccctggagaaggacgtggccctgaagccccaggagagagtggagaagagacagacccccctgaccaagaagaagagagaggccctgaccaacggcctgagcttccacagcaagaagagcagactgagccacccccaccactacagcagcgacagagagaacgacagaaacctgtgccagcacctgggcaagagaaagaagatgcccaaggccctgagacagctgaagcccggccagaacagctgcagagacagcgacagcgagagcgccagcggcgagagcaagggcttccacagaagcagcagcagagagagactgagcgacagcagcgcccccagcagcctgggcaccggctacttctgcgacagcgacagcgaccaggaggagaaggccagcgacgccagcagcgagaagctgttcaacaccgtgatcgtgaacaaggaccccgagctgggcgtgggcaccctgcccgagcacgacagccaggacgccggccccatcgtgcccaagatcagcggcctggagagaagccaggagaagagccaggactgctgcaaggagcccatcttcgagcccgtggtgctgaaggacccctgcccccaggtggcccagcccatcccccagccccagaccgagccccagctgagagcccccagccccgaccccgacctggtgcagagaaccgaggcccccccccagcccccccccctgagcacccagcccccccagggcccccccgaggcccagctgcagcccgccccccagccccaggtgcagagaccccccagaccccagagccccacccagctgctgcaccagaacctgccccccgtgcaggcccaccccagcgcccagagcctgagccagcccctgagcgcctacaacagcagcagcctgagcctgaacagcctgagcagcagcagaagcagcacccccgccaagacccagcccgcccccccccacatcagccaccaccccagcgccagccccttccccctgagcctgcccaaccacagccccctgcacagcttcacccccaccctgcagccccccgcccacagccaccaccccaacatgttcgccccccccaccgccctgcccccccccccccccctgaccagcggcagcctgcaggtggccggccaccccgccggcagcacctacagcgagcaggacatcctgagacaggagctgaacaccagattcctggccagccagagcgccgacagaggcgccagcctgggcccccccccctacctgagaaccgagttccaccagcaccagcaccagcaccagcacacccaccagcacacccaccagcacaccttcacccccttcccccacgccatcccccccaccgccatcatgcccacccccgccccccccatgttcgacaagtaccccaccaaggtggaccccttctacagacacagcctgttccacagctacccccccgccgtgagcggcatcccccccatgatcccccccaccggccccttcggcagcctgcagggcgccttccagcccaagaccagcaaccccatcgacgtggccgccagacccggcaccgtgccccacaccctgctgcagaaggaccccagactgaccgaccccttcagacccatgctgagaaagcccggcaagtggtgcgccatgcacgtgcacatcgcctggcagatctaccaccaccagcagaaggtgaagaagcagatgcagagcgacccccacaagctggacttcggcctgaagcccgagttcctgagcagaccccccggccccagcctgttcggcgccatccaccacccccacgacctggccagacccagcaccctgttcagcgccgccggcgccgcccaccccaccggcacccccttcggcccccccccccaccacagcaacttcctgaaccccgccgcccacctggagcccttcaacagacccagcaccttcaccggcctggccgccgtgggcggcaacgccttcggcggcctgggcaaccccagcgtgacccccaacagcatgttcggccacaaggacggccccagcgtgcagaacttcagcaacccccacgagccctggaacagactgcacagaaccccccccagcttccccaccccccccccctggctgaagcccggcgagctggagagaagcgccagcgccgccgcccacgacagagacagagacgtggacaagagagacagcagcgtgagcaaggacgacaaggagagagagagcgtggagaagagacacagcagccaccccagccccgcccccgtgctgcccgtgaacgccctgggccacaccagaagcagcaccgagcagatcagagcccacctgaacaccgaggccagagagaaggacaagcccaaggagagagagagagaccacagcgagagcagaaaggacctggccgccgacgagcacaaggccaaggagggccacctgcccgagaaggacggccacggccacgagggcagagccgccggcgaggaggccaagcagctggccagagtgcccagcccctacgtgagaacccccgtggtggagagcgccagacccaacagcaccagcagcagagaggccgagcccagaaagggcgagcccgcctacgagaaccccaagaagagcagcgaggtgaaggtgaaggaggagagaaaggaggaccacgacctgccccccgaggccccccagacccacagagccagcgagccccccccccccaacagcagcagcagcgtgcaccccggccccctggccagcatgcccatgaccgtgggcgtgaccggcatccaccccatgaacagcatcagcagcctggacagaaccagaatgatgacccccttcatgggcatcagccccctgcccggcggcgagagattcccctaccccagcttccactgggaccccatcagagaccccctgagagacccctacagagagctggacatccacagaagagaccccctgggcagagacttcctgctgagaaacgaccccctgcacagactgagcacccccagactgtacgaggccgacagaagcttcagagacagagagccccacgactacagccaccaccaccaccaccaccaccaccccctgagcgtggaccccagaagagagcacgagagaggcggccacctggacgagagagagagactgcacatgctgagagaggactacgagcacaccagactgcacagcgtgcaccccgccagcctggacggccacctgccccaccccagcctgatcacccccggcctgcccagcatgcactaccccagaatcagccccaccgccggcaaccagaacggcctgctgaacaagaccccccccaccgccgccctgagcgcccccccccccctgatcagcaccctgggcggcagacccgtgagccccagaagaaccacccccctgagcgccgagatcagagagagaccccccagccacaccctgaaggacatcgaggccagatag

SEQ ID NO: 187380 - DNA, 3780 bp, Artificial Sequence
  derived and/or modified sequence
atggatggccctacccgtggtcatggtctgcgaaagaagaggaggtccaggtcacagcgggatcgcgagcggcggagccgcggaggattgggcgcgggcgctgcaggtggtgggggagccgggagaacccgcgcgctgtcattggcatcatctagcggaagcgataaagaggataatggcaaacctcctagctcagcaccttcccgtcctcgcccgccgcgcaggaagagaagggagtctaccagcgcggaggaggacatcatcgatggctttgcaatgactagctttgtgacattcgaggcactggagaaggacgtggcgctgaagcctcaggagagagtcgaaaaacgacagacccctcttacaaagaagaaaagggaggccctcaccaacggcttgtccttccactctaagaagtcccgtctatcacacccacaccactattcatctgatagggaaaatgacaggaacctctgccaacatctgggaaagcggaaaaagatgccaaaggcactcagacagctgaagccaggccagaattcttgccgagacagcgacagcgagagtgcatcaggcgagtccaaaggctttcataggtcttcctcaagagaacggttatcagattcaagcgcaccgtctagtctcggcactggctatttctgtgattccgatagcgatcaagaagagaaagcatctgacgcttcaagcgagaagctgttcaatacagtgatcgtaaacaaggatcccgagctgggcgtcgggaccttacccgagcatgattctcaggacgctggtccgatcgtccctaaaataagcggactggagcggtctcaagagaagtcacaagactgttgcaaggaacctatcttcgagcctgtagtgctgaaggacccctgtccccaggtcgcccagcctatcccacagccccagactgagccccagctaagagcaccatctccagacccagacctggtgcagcgcacggaagccccacctcagcccccacctctgagtacccagcccccacaaggtccaccagaagctcagctccaacccgccccccagccacaggtacagaggccgccccggcctcagagccctacacagcttcttcaccagaacctccccccggtacaggcccatccctccgctcaatcattaagccagccattaagtgcttacaattctagttcgctctctctgaacagcctgagcagttcccgctcttcgactcctgctaaaactcagcccgcgccaccccacatatcacatcatccaagcgccagcccttttcccctgtccctgccaaaccatagtccgttacactcgttcaccccaacactgcagcctccagcgcactctcaccatcccaatatgttcgcgcccccaacagccctgccacccccaccaccacttactagtgggagtttgcaagtggcagggcatccggccgggtcaacttacagtgaacaggatattctgcgtcaagagttgaatactcgcttcttagcaagccagtcagcggaccgcggggcatcgcttggaccaccaccctaccttagaactgagttccatcagcaccaacatcagcaccagcacacccaccagcacacacaccagcacacattcactcctttcccacacgccataccgcccacagcaatcatgcccaccccggccccacctatgttcgacaagtatcctactaaggtggaccctttttaccgccattcgctgtttcattcataccctcctgccgtgtctggcatacctcccatgattccacctaccggaccatttgggtccttgcaaggagctttccagcccaaaactagcaatccaatagacgtcgctgctcggcctggcaccgtcccccacaccttgctccagaaagacccacgcctcaccgatccatttaggccgatgctcaggaagccagggaaatggtgtgcaatgcatgtacacatcgcatggcagatttaccaccatcagcagaaggttaaaaaacagatgcagtctgatcctcacaagctagacttcggactgaaaccggagtttctatccagaccacccggtcctagcttgttcggcgcaattcaccacccccatgatctggccaggccctcaaccttattttctgccgctggcgccgcccaccccactgggaccccgttcggcccacctcctcatcattccaactttttaaacccagccgcgcatcttgagcccttcaacagaccaagcaccttcacaggattagctgcagtggggggaaacgcgtttggcgggctgggaaaccctagcgtaactcccaattcaatgtttggtcacaaagatggtccctcagtgcaaaattttagcaatccccatgaaccctggaacaggctgcatcggactcctccatcctttcccacgccaccaccttggctgaaacctggcgaactggaacggtccgcgagtgcagctgcacatgatagggatagggatgtggataaaagagactcctcagtttccaaagacgataaggagcgggagtccgtggaaaaaaggcactcttcccaccccagtccggcaccagtcctgccggtaaacgccctcggacacaccagatcttcaaccgaacagattagagcccacctcaatactgaggctagagaaaaagataagcccaaggaaagggagagggatcatagcgaaagtaggaaagacttggccgccgatgaacataaggccaaagagggccacttacctgagaaggacggacatggacacgaaggccgtgcggccggcgaagaggcgaagcagctcgcccgggtgccctcaccctacgtccgcacgcctgtggtggagagcgcccgtcccaacagcacgagcagtagggaagctgagccgagaaagggcgaacccgcttacgaaaaccctaaaaagtcttcggaggtgaaagtgaaggaagaacggaaggaggatcatgacttgcctccagaggctccacagactcatagagcctcagagcctccacccccaaatagcagtagctcagtacatcctgggcccctggcttccatgcccatgactgtgggcgtgaccggcatacacccaatgaactctatctcatcccttgacagaacaagaatgatgacaccctttatgggtatcagtcctctgccagggggtgagagatttccttaccccagttttcactgggatccaatccgggacccgctgcgtgacccatacagggaactggacatccacaggagggacccactggggcgggattttttgttgcggaacgacccattgcaccgactcagcacaccacgcttatatgaggccgataggagcttcagggatcgcgaaccgcatgattactctcatcatcatcatcatcaccaccaccccctgagcgtggacccaaggcgcgagcacgagaggggggggcacctggatgagagggagagactgcacatgctgagagaggattacgaacacaccaggttgcattcggtccatccagcttctctggacggccatctgccacacccgagtttgatcacaccaggacttccctccatgcattacccgagaatttccccgaccgcagggaatcagaatggccttctgaacaaaactcctcccactgccgcgttgtcagctcccccccctcttatttctaccctgggagggagacccgtatctcctcgccgaactacccccctgtccgccgagatcagggaacggccacctagccatactctcaaagacatcgaggccagatag

SEQ ID NO: 187381 - DNA, 3780 bp, Artificial Sequence
  derived and/or modified sequence
atggatggccccacccggggccacggcctgaggaagaagaggaggagccgcagccagagggaccgggagcggcgcagccggggcggcctgggcgctggagctgctgggggcggcggggccggccgcacccgggccctgagcctggccagcagcagcggcagtgacaaggaggacaatggcaagccacccagcagcgcccccagccggccccggccccccaggaggaagagaagagagagcaccagcgctgaggaggacatcattgatggctttgccatgaccagctttgtgacctttgaggccctggagaaggatgtggccctgaagccccaggagcgggtggagaagaggcagacccccctgaccaagaagaagcgggaggccctgaccaacggcctgtccttccacagcaagaagagccggctgagccacccccaccactacagcagtgacagagaaaatgacaggaacctgtgccagcacctgggcaagaggaagaagatgcccaaggccctgcggcagctgaagccaggccagaacagctgccgggacagcgacagcgagagcgccagcggggagagcaagggcttccacaggagcagcagccgggagcggctgagtgacagcagcgcccccagcagcctgggcaccggctacttctgtgacagcgacagcgaccaggaggagaaggccagtgatgccagcagcgagaagctgttcaacacagtcatcgtgaacaaggaccctgagctgggcgtgggcaccctgcctgagcatgacagccaggatgctggccccatcgtgcccaagatcagcggcctggagaggagccaggagaagagccaggactgctgcaaggagcccatctttgagcctgtggtgctgaaggacccctgcccccaggtggcccagcccatcccccagccccagacagagccccagctgcgggcccccagcccagaccctgacctggtgcagaggacagaggccccaccccagcccccacccctgagcacccagcccccccagggccccccagaggcccagctgcagcctgccccccagccccaggtgcagaggcctccccggccccagagccccacccagctgctgcaccagaacctgccccctgtgcaggcccaccccagcgcccagagcctgagccagcccctgagcgcctacaacagcagcagcctgagcctgaacagcctgagcagcagccgcagcagcaccccagccaagacccagcctgccccaccccacatcagccaccaccccagcgccagccccttccccctgagcctgcccaaccacagccccctgcacagcttcacccccaccctgcagcccccagcccacagccaccaccccaacatgtttgccccacccacagccctgcccccacctccacccctgaccagcggcagcctgcaggtggccggccaccctgctggcagcacctacagcgagcaggacatcctgcggcaggagctgaacacccgcttcctggccagccagagcgctgacagaggagccagcctgggccccccaccctacctgaggacagagttccaccagcaccagcaccagcaccagcacacccaccagcacacccaccagcacaccttcacccccttcccccacgccatccccccaacagccatcatgcccaccccagccccacccatgtttgacaagtaccccaccaaggtggaccccttctaccgccacagcctcttccacagctaccccccagctgtgtctggcatcccccccatgatccccccaacaggccccttcggcagcctgcagggcgccttccagcccaagaccagcaaccccattgatgtggccgcccggcccggcaccgtgccccacaccctgctgcagaaggacccccggctgacagaccccttccggcccatgctgaggaagccaggcaagtggtgtgccatgcacgtgcacatcgcctggcagatctaccaccaccagcagaaggtgaagaagcagatgcagagcgacccccacaagctggactttggcctgaagccagagttcctgagccggcccccaggccccagcctgtttggagccatccaccacccccatgacctggcccggcccagcaccctcttctctgctgctggagctgcccaccccaccggcaccccatttggacctccaccccaccacagcaacttcctgaacccagctgcccacctggagcccttcaaccggcccagcaccttcaccggcctggccgctgtgggcggcaatgcctttggaggcctgggcaaccccagcgtgacccccaacagcatgtttggccacaaggatggccccagcgtgcagaacttcagcaacccccatgagccctggaaccggctgcacaggaccccacccagcttccccaccccaccaccctggctgaagccaggagagctggagaggtctgccagcgctgctgcccatgaccgggacagagatgtggacaagagggacagctctgtgtccaaggatgacaaggagcgggagagcgtggagaagaggcacagcagccaccccagccctgcccctgtgctgcctgtgaatgccctgggccacaccaggagcagcacagagcagatccgggcccacctgaacacagaggcccgggagaaggacaagcccaaggagcgggagcgggaccacagcgagagcaggaaggacctggccgcagatgagcacaaggccaaggagggccacctgcctgagaaggatggccacggccacgagggccgggctgctggggaggaggccaagcagctggcccgggtgcccagcccctacgtgaggacccctgtggtggagagcgcccggcccaacagcaccagcagccgggaggccgagcccaggaagggggagcccgcctatgagaaccccaagaagagcagcgaggtgaaggtgaaggaggagaggaaggaggaccatgacctgcccccagaggccccccagacccaccgggccagcgagcccccaccacccaacagcagcagctctgtgcaccctggccccctggcctccatgcccatgacagtgggcgtgacaggcatccaccccatgaacagcatcagcagcctggacaggaccaggatgatgacccccttcatgggcatcagccccctgcccggcggggagcgcttcccctaccccagcttccactgggaccccatccgggaccccctgcgggacccctaccgggagctggacatccaccggcgggaccccctgggccgggacttcctgctgagaaatgaccccctgcaccggctgagcaccccccggctgtatgaggccgaccgctccttccgggaccgggagccccatgactacagccaccaccaccaccaccaccaccaccccctgtctgtggacccccggcgggagcacgagcggggcggccacctggatgagcgggagcggctgcacatgctgcgggaggactatgagcacacccggctgcacagcgtgcacccagccagcctggatggccacctgccccaccccagcctcatcaccccaggcctgcccagcatgcactacccccgcatcagccccacagctggcaaccagaatggcctgctgaacaagaccccacccacagctgccctgagcgcccctcctcctctcatcagcaccctgggcggccggcctgtgagccccaggaggaccacccccctgtctgctgagatccgggagcggccccccagccacaccctgaaggacatcgaggccaggtag

SEQ ID NO: 187382 - DNA, 3780 bp, Artificial Sequence
  derived and/or modified sequence
atggacggccccacccggggccacggcctgcggaagaagcggcggagccggtcacagcgtgaccgtgagaggcggagccgcgggggtttgggtgcgggtgccgccgggggaggcggggccggcagaacccgggccctgtccttagctagctcttccgggtcagacaaggaagataacggaaaaccacctagtagcgccccaagtagacccaggcccccaaggaggaagcgcagagagagcacaagcgccgaggaagacataatagacggcttcgccatgacaagctttgtcacatttgaagccctggaaaaggacgtcgctctcaagccccaggagcgggtggagaagagacagaccccattaacgaagaagaaaagggaagcattgactaatggcctgtccttccacagcaagaaatcaaggcttagtcatccgcatcattactctagcgatagggaaaatgaccgtaacctgtgtcagcatctcggtaaacgcaagaaaatgccaaaggccctccggcagctcaaacctgggcagaatagttgccgcgacagcgactccgagagcgcatccggcgagtccaaaggcttccaccggtcaagtagccgggagaggctctccgatagttccgcccctagctccctcggtaccgggtatttctgtgatagcgatagcgaccaagaagaaaaggcctcagatgctagctcagaaaagctcttcaataccgtcatagtcaacaaggaccctgaactgggagttggcacgctgccggagcacgacagtcaagacgccggacctatcgtgcctaagattagcgggctcgagaggtcgcaagagaagtctcaggactgctgcaaagaacctatttttgaacctgtggtcctcaaagatccctgtccgcaagtggctcagcccattcctcaacctcagaccgaaccccagctgcgagctcctagccctgacccagacctcgtacaaagaacagaagctcctccccaaccacccccccttagcactcaaccacctcaggggccaccagaagcacaactgcagcctgcaccgcagccgcaggtgcagaggcctcctcgcccgcagagccccacccagctcttgcatcagaatctaccaccagttcaagcacacccatccgcccaatcactgagccagcccttgagtgcctataactcatctagcctgagcctgaattccttgtctagctctaggagctccactcccgccaaaacccagccagcccccccacatatctcacatcatccctcagcctctccgttcccactcagcttgcctaaccacagccctctgcacagtttcacacctacactacagccaccagctcactctcatcatccaaatatgttcgccccacctaccgctttaccccctcccccaccactcacatctgggagccttcaggtggctgggcaccccgcaggtagcacctattcagaacaagacattctgaggcaggaattgaatacaaggttcctggccagccagtccgccgaccgaggggctagcctcgggcccccaccttatctgaggactgagttccaccagcatcagcaccaacatcagcacacccaccaacatactcaccaacacaccttcacccctttcccacacgctattcctcctaccgccattatgcctactcccgccccgcctatgtttgacaaatatcccacaaaggtcgatcctttttacaggcactctctttttcactcatacccacctgccgtttccgggatccctccaatgattccccccactgggccatttggcagtctgcagggggcctttcaaccaaaaacttctaatcccattgatgtcgctgcccgcccagggactgttcctcataccctgcttcagaaggatccgcggctgacagatccttttcgcccaatgctgcggaagccgggcaaatggtgcgcgatgcacgtccatattgcctggcagatataccatcaccaacagaaggtcaagaagcaaatgcagagcgaccctcataaactggacttcggtcttaaaccagaattcctgtcaaggccacctggccccagcctattcggagccattcaccacccacacgatttggctcgccctagtactctcttctctgcagcgggagctgctcatcctactggtaccccttttgggccacccccccatcattcaaatttcttaaacccagccgcccacctagagccatttaaccgccctagtacatttaccggcctggcagccgtgggtggcaatgctttcggaggactgggtaacccctcagttacgcccaactccatgtttggtcataaggacggaccatccgttcagaactttagtaaccctcacgagccctggaatcgactgcataggacacctccttccttccctaccccaccgccatggttgaagccaggcgagttagagcgctcggcgtctgccgctgctcatgacagggatagggacgtggataagcgggactcgagtgtgtccaaagatgacaaggaaagagagagcgtggagaaaaggcattctagccaccccagtccagcccccgtgttgccagtgaacgcactgggacatactcggtcctctactgaacagatacgggctcacctcaacaccgaggctcgggagaaggacaagcctaaggaacgtgaacgtgaccactctgagtctcggaaagacctggccgccgatgagcataaggccaaagaggggcatctgccggagaaggacggccacggacatgaaggccgcgcggccggcgaagaagcgaagcagttggctagagtgccttctccttatgtgaggacccctgttgttgagtctgcgcgaccgaatagcacctcatcacgagaagctgagccgaggaaaggggagcccgcctacgagaacccaaaaaagagttcagaagtgaaggttaaggaagagcgcaaagaagatcatgatctgccaccagaagccccgcagacgcaccgcgcgagcgaaccaccaccacctaactcttcctcctcggtgcaccccggccctctggcaagtatgcccatgactgtgggcgtgaccgggattcacccaatgaacagcatctctagtctggaccgaaccagaatgatgactcctttcatgggcatctccccactgcccggcggcgagcgctttccctacccgagtttccactgggaccctattagggacccccttcgcgacccctatcgggaacttgatattcacagaagagatccgctaggccgggatttcttgctacgcaatgatcccctgcaccgcttatcaacacccagattgtatgaggcagaccgctctttcagagatagggagccccacgattattcacatcaccaccatcatcatcaccacccactgagcgtcgatcctaggcgcgagcacgaaagaggtgggcaccttgacgaaagagagcggctacatatgctgcgggaagattacgagcacactcgtctgcactccgtgcacccagcctctctcgacggccacctccctcatccctccctgatcacccccggacttcctagcatgcattatcccagaatttctccaacggctgggaaccagaatgggttactcaacaagacacctccaacagcggctctgagtgcgccacctcctttgatttccactcttggaggtaggccggtgtccccgagacgtacaacccccttgtcagcagagataagagagcgtccgcctagtcacactctgaaagatatcgaggcaagatag

SEQ ID NO: 187383 - DNA, 3780 bp, Artificial Sequence
  derived and/or modified sequence
atggatggcccaacccggggacatggcctgagaaagaagcgtagatcacggtcccagagggaccgcgagcggaggtcgagagggggtctgggagcgggtgccgcaggcggaggtggcgctggcaggaccagggctttgtcccttgcctcatctagcggatcagataaagaggacaatggcaaacccccttcctccgcccctagcagaccgagacctcctaggagaaagcgtagagagagtacgagtgctgaagaggacataatcgatgggttcgccatgacatctttcgtcacttttgaagccttggagaaagacgtggctctcaagcctcaggagcgggtggagaaacggcaaactcctctaactaagaagaaaagagaggccctcacgaacggattgtctttccatagcaagaaatcacgtctaagccacccacaccactatagctccgacagagaaaacgatcggaacctatgtcagcatctgggaaaaagaaagaaaatgcccaaggctttacggcagctaaaacctggccagaacagctgcagggactctgactcagaaagcgcttccggcgagtcaaagggattccacaggtcttcgagtcgcgagcgcctcagtgattcgagcgcccctagttctctgggaaccggctacttttgtgacagtgactctgaccaggaagagaaggccagtgatgctagctccgagaaactctttaataccgttatcgttaataaggatcctgaactgggcgtgggcacactgcccgagcatgactctcaagatgcaggccctatcgtgcctaagatctcaggcctggagcgcagtcaggagaagtcccaggactgttgcaaggagccgatctttgagcccgtcgtgctcaaggatccttgcccacaggtggcccagcccattcctcagccgcagactgagccgcaacttagggcgcctagtccggaccccgacctggttcagcgcactgaagcacccccacaaccaccacccctgtctactcagcccccacaggggccaccagaggcacagttgcagccagcacctcagcctcaggtgcagcgtcctccacgcccacaatcccctactcagctgcttcaccagaacctgccccctgtccaggctcatccctcggctcaatctttatcgcagccactgtctgcttacaattccagcagcctttcactgaactctctgtcgagcagccgatcgagcacacctgctaagacccaaccagcccctccccatattagccatcacccgtctgcatcaccattcccactctccttgccaaaccacagccccctgcattcattcactcctaccctgcagccacctgcccattctcaccaccctaacatgtttgcgcctccaaccgctctgcccccacccccaccactcacctctggtagcttgcaggtagcgggtcatcccgcaggatctacatactcagagcaggatatcctccgtcaagagcttaacactcgatttctggcttcgcagtccgcagacagaggggctagcctgggccctccaccgtacctaagaaccgagttccatcagcatcagcatcagcaccagcacacccatcagcacacacatcagcacaccttcacgccttttcctcatgcgatccccccaactgcaatcatgccaaccccagcccctcccatgtttgacaagtaccccacaaaagtggatccgttctaccggcatagcctgttccatagctacccacccgctgtgtcaggcatccctccaatgattcccccaactgggccattcgggtccctgcaaggcgctttccagccaaagaccagtaaccctattgatgtcgccgcacgtccagggacagtcccacatactcttctgcagaaggacccaaggcttactgacccctttcgacccatgctgcgtaaaccagggaaatggtgtgccatgcacgttcacattgcatggcagatttatcatcatcagcagaaggtgaagaagcagatgcaatctgatcctcataagctggacttcggcctaaaacccgaatttctatcacgaccccctggaccatctttgttcggtgccatccatcatccccacgacctggctcggccaagtactctcttcagtgccgctggtgctgctcatccgaccggaactccattcggtcccccaccccatcatagcaactttctcaaccccgcagctcatttggaaccctttaaccggccatcaacattcaccggcctggccgcagttggtggcaatgcatttggaggactcggcaatccctccgtgactccaaactctatgtttggccataaagacggcccttccgtccagaattttagcaacccacacgagccgtggaacaggttgcaccggacacccccttcatttccaactcctccgccatggcttaagcctggcgagctcgagcggagcgcatcagcggctgcccacgatcgtgatagagatgtagacaagagagacagctccgtgagcaaagatgataaagagcgcgagtctgttgaaaagcgccattccagccacccatccccagccccagtactaccggtgaatgctcttgggcacaccaggtcaagcaccgagcagattcgggctcacctcaacactgaggcgagagaaaaggacaagccaaaagagcgggaaagggatcacagcgagtcccgaaaggaccttgctgctgacgagcacaaggccaaagaaggtcacctccccgaaaaggacggacacgggcatgaaggccgagccgcaggtgaagaggccaagcagctagcgcgagtcccttctccctatgtccggacccctgtggtggagtccgccaggcccaattccacctcaagtcgggaagcggagcccagaaagggtgagcctgcatatgagaatccaaagaaatccagtgaggtgaaagttaaagaagagcggaaggaagaccacgatctgccgccagaagcaccccaaacacatagagcctctgaaccgccacctcccaacagttcctcaagcgtccatcccggaccgttagcctcgatgccaatgaccgtgggcgttaccggtatacatccaatgaacagtatttccagcttggaccgcacgagaatgatgaccccgtttatgggcattagtccactccccggaggggagagatttccctatccttcattccactgggatcccataagagacccgcttcgggacccctatcgggagcttgatattcatcggcgtgatccgttgggtcgtgattttcttcttcggaacgatccactgcaccggttatctactcctagactgtacgaagccgatcggtcctttagggaccgggagccccatgactatagtcaccatcatcaccaccatcatcacccattgagtgtggatccgaggagagagcacgaacgcggaggtcacctcgacgaacgggagcggctgcacatgctgcgcgaggactacgagcacacccgtcttcattcggtacaccccgcttcactggatgggcacttacctcacccatccctcatcacaccaggtctgccctcaatgcattacccaagaatcagccctactgccggaaatcagaacgggctgctcaacaagactccgccaacagccgctcttagcgctcctccaccgcttatctccactctcggtggccgacctgtatctcccaggcgcaccaccccactgtcggccgagattagggagaggcccccttcacatactttaaaggatatcgaagccagatag

SEQ ID NO: 187384 - DNA, 6173 bp, Artificial Sequence
  derived and/or modified sequence
ctgtgtgttcagccattactttgctcggcgctgctcccaggcatctccgaccctcggtgctgtggggagccccacacttgggctcctcgcctctcgccctcgctccccgtccctcctcccctctctccgccccttcccccttttctttctcctctctttcttcccctctctcccttctttcggccgccgtctcccccgcgccctcctcggggcggagggaagccgtgaagggggagggagggctcggtgtcaatttttttttgtgtggctgcggccgtagcctgtggcgggcaagcggggagaccccggcgcagcagaaccatggatggcccgacgcggggccatggactccgcaaaaagcggcggtcgcggtcgcagcgagaccgggagaggcgctcccggggcgggctgggggccggcgcggccggcggcggcggggctggccggacccgggcgctctcactcgcctcgtcgtcgggctccgacaaggaagacaatgggaagcccccgtcctccgccccgtcccggcccagacccccgcggaggaagcggagagagtccacctcggcagaagaggacatcattgatggatttgccatgaccagctttgtcacttttgaagcgctggagaaagatgtagcacttaagcctcaggaacgtgtggagaaacgccagacgcccctgaccaagaagaaacgagaagcacttaccaatggcttgtcctttcattcaaagaagagcagactcagccacccacaccactacagctcagatcgagaaaatgaccgcaatctctgccagcaccttgggaagagaaagaaaatgccgaaggcactcagacagctcaagccaggacagaacagctgcagggacagtgacagtgaaagtgccagtggagaatccaagggcttccaccggagcagctctcgggaaaggctcagtgatagttcagctccttccagcttgggaacaggctacttctgtgacagtgacagtgaccaggaagagaaggcatcagatgccagctctgaaaaactcttcaacactgttattgtaaacaaagatccggagttaggtgttggcacgctaccagaacatgacagccaggatgcagggccgattgtccccaagatatcgggtctagagagaagccaggagaagagccaggactgttgcaaagagccaatctttgagcctgtggtgcttaaagacccctgccctcaggtcgcacagccaataccccagccgcagacggagccccaactccgagctccttctccggaccctgacttggtgcagcgcacagaggccccacctcaacccccacctctgagtacacagccaccacagggccctcctgaggcccagctccagcctgccccgcagcctcaggtgcagaggccacccaggccacagtcccccacccagctgctccatcagaacctcccacctgtgcaggcccacccctctgctcagagcctctcccagccattgtcagcctacaacagcagtagcttaagcctcaacagtttaagcagcagcagaagcagcactccagcgaagactcagcccgccccacctcacatctcccaccacccctctgcctccccgttccccctctccctgcccaaccacagccccctgcacagcttcacacccaccctccagccccccgcacactcacatcaccccaatatgtttgcccctcccactgctctgcctcctccaccaccactgacatcaggaagtctgcaggtggccggacacccggccgggagcacttactcagagcaagacatcttgcgacaggaactgaacactcgttttttggcctctcagagtgctgaccgcggggcttccctgggccctccgccctacctgcggaccgagttccatcagcaccagcaccagcaccagcacacccaccagcacacgcaccagcacaccttcacgccgttcccccacgccatcccacccaccgccatcatgccgacgccagcacctcccatgtttgacaaataccctacaaaagttgacccattctaccggcacagtctcttccattcctatcctcctgcagtgtcgggcatcccccctatgatcccacccactggcccttttggttcactacaaggagcatttcagccgaagacatccaaccctatcgatgtcgctgctcggcctgggacagtcccacacactttactccaaaaggacccgaggttgacagatcctttcagacctatgttaaggaaaccagggaagtggtgtgctatgcatgttcacatcgcctggcagatttaccaccaccaacagaaagtcaagaaacagatgcagtcagacccacataagctggactttggactgaaacctgagttcctgagccgccctccaggccccagtctttttggagccatccaccacccccatgacctggcacggccttcaactttgttctctgccgctggtgctgcacacccaactgggaccccttttgggccacctcctcatcacagcaacttcctcaaccctgctgcccacctagagccttttaatcggccgtctacattcacaggcctagcagcagttggtggcaatgccttcgggggacttggaaatccttccgttacacccaactcaatgttcggccacaaggatggccccagtgtgcagaactttagcaaccctcacgaaccctggaaccggctgcaccgaacgcctccgtcgttcccgacccctccgccctggctgaagccaggggagctggagcgcagcgcgtccgctgcagctcatgacagagatagagatgtagataaacgagactcatctgttagtaaagatgacaaagaaagggaaagcgtcgagaagagacactccagccacccttcaccagcacctgtcctcccggtgaatgccctgggacatacccgcagctccactgaacagatccgggctcatctgaacactgaggctcgggagaaggacaaacccaaagagagggagagagaccactcggaatcccgcaaggacctggccgccgacgagcacaaggcgaaagagggccacctgcccgagaaggacgggcacggccacgaggggcgcgccgcgggcgaagaggccaagcagctggcccgggtgccgtctccctacgtgcggaccccggtggtggagagtgccaggcccaacagcacctcgagccgggaggccgagccgcgcaagggtgagccggcctacgagaaccccaagaagagctccgaggtcaaggtgaaggaggagcggaaggaagaccatgacctgcctccagaggccccgcagacccaccgggcctcggagccgccgcctcccaactcctcgtccagcgtgcacccggggcccctggcctcgatgcccatgacggtgggggtgacgggcattcaccccatgaacagcatcagcagcctggacaggactcgcatgatgacccccttcatgggcatcagccccctcccgggcggagagcgcttcccgtacccttctttccactgggaccccatccgggaccccttgagggatccttaccgagaacttgacattcaccggagagacccgctgggcagggacttcctgctaaggaacgacccgctccaccggctctcgactccccggctgtacgaagccgaccgctccttcagggaccgggagcctcacgactacagccaccaccaccaccaccaccaccacccgctgtctgtggaccctcggcgggagcacgagcggggaggccacctggacgagcgggagcgcttgcacatgctcagagaagactacgagcacacgcggctccactccgtgcaccccgcctccctcgacggacacctcccccaccccagcctcatcaccccgggactccccagcatgcactatccccgcatcagccccaccgcgggcaaccagaacggactcctcaacaagacccctccgacagcagcgctgagcgcacctcccccgctcatctccacgctggggggccgcccggtctctcccagaaggacgactcctctgtccgcagagataagggagaggcccccttcccacacgctgaaggatatcgaggcccgataagccgagaacaggagcaagaacgaggaagaagaaaccctaggcagacaccaggccaggcttgagagacagaactcctgcatggctcacacagactgggggggaaagccccaccccttccccttgtaaaaaatgtatagactcagtgcacattttgaaatgttttgtatattatatgttgagatttttcagatcttttagcccagtcatatgttctcacgtctcctactttttgtttctcgtataaaactttttgatttgaaccaaaacagtgaagatgacaacacacaccaattggatgataattgtagcgggggcggtgggggggagaagtccacgccatccatcatgcaaaattctttcagatgaggtgggaaggccgtgtacatagttatgtaaaaagagattgcttcatgagctaatggttcatatatgcaaaagggtaagatgaaagctttactttgtacaaatgtaaatagataaagtaacataatacattaatacttcttaaaatgtgctatttgcaaacttacttaatatcagtgaacacagtcggctaaagctgtgttcccatatattgttatagacagctaaacccttcaactatgcaatgaatgttcgggcttttcacaaaagcccgcctaactcaaaggagccttttcaaatccatttacagcatacttaaggtcatattttccctgaacaagcgcttacgtgatatgactctgttttccttgcttgttttttttcaaacggagaaacatcctgttttgcaaattggaccccaggctggaacttagcatctgaagttgccgcttgtgggctctgggggaaagtgtagccccggagaggtaactgaggacatgagcaaccagtgccagggagggtgggatttgccagatgccaaaatcaggggacgggtggtggtgtctgtcagacacacacaggtcgccagtgacttcacacacacctcatgtgagaaccatgccttttttagtgtgtcctatttcatacctgtacacacttcctcgttttgtaatgagatttacttacacccaaacagatcctgaaagaaagcttcaagttttctcagatgatggatatgttttcactgtattcaataactgacggatgtaaggtgcacgtttcctgatgtgacgcactgtattccagctggtgatcaagtctgggaacagccgtaacaggtcaaccttgtggagccatcgcgagttagagggtgaaagatggcagaaaaaaaagtcttgtgtgtgagtgtgttttttgagtttgcatcaatcttaatgtctcttcataatacttttataatacattaagcctcttgtctacatatttggagagaatatgactttactagcagagaaatacaatatatcttgtctactggactgtaaaatatatgtatgaaataaaattagttccatttggtcttctagtatattaaagtgctatctgacgttgttatcctgtttttgcaaaaaaaaaaaaaaaaaaaagttaactacagaccattgtttctaataagcagagagatctattttagtagtaaactgaaggtttagttgtgagcttcagattttgtgaactccagatgttgtgcggtgtttttttttttttttaagacaacaactaaaaaaaatgcaaggaatatgtacactggaactgtagtggtagctttcagtattgtaaagagattgttctatacggacctttttgctgtttatcctgtatgtaataaagtcctttctagatcctatgtgaaaagaaaagtgaagcaactgaatcttcagcatgttctcatcggcggagccttcttgtgtaatgtaaactgtgccatgttattaaaaaatgtgaactaagcttccagctgcttgtttgtgtgaggtgaccatcattaccttagggaagaagccatacctgtacaagaccgggctcttgaaaagaaacacctcgaacccagcccgtgtaagaacagaaggctcacctgcagtggctgaccaccctacccaactcggttagtgtctcaccaatttgttactataaacatttgcacccca

SEQ ID NO: 187385 - protein, 1112 aa, Artificial Sequence
  derived and/or modified sequence
MAAGKSGGSAGEITFLEALARSESKRDGGFKNNWSFDHEEESEGDTDKDGTNLLSVDEDEDSETSKGKKLNRRSEIVANSSGEFILKTYVRRNKSESFKTLKGNPIGLNMLSNNKKLSENTQNTSLCSGTVVHGRRFHHAHAQIPVVKTAAQRLLSNQILKEYPPHVQKVEINPVRLSRLQGVERIMKKTEESESQVEPEIKRKVQQKRHCSTYQPTPPLSPASKKCLTHLEDLQRNCRQAITLNESTGPLLRTSIHQNSGGQKSQNTGLTTKKFYGNNVEKVPIDIIVNCDDSKHTYLQTNGKVILPGAKIPKITNLKERKTSLSDLNDPIILSSDDDDDNDRTNRRESISPQPADSACSSPAPSTGKVEAALNENTCRAERELRSIPEDSELNTVTLPRKARMKDQFGNSIINTPLKRRKVFSQEPPDALALSCQSSFDSVILNCRSIRVGTLFRLLIEPVIFCLDFIKIQLDEPDHDPVEIILNTSDLTKCEWCNVRKLPVVFLQAIPAVYQKLSIQLQMNKEDKVWNDCKGVNKLTNLEEQYIILIFQNGLDPPANMVFESIINEIGIKNNISNFFAKIPFEEANGRLVACTRTYEESIKGSCGQKENKIKTVSFESKIQLRSKQEFQFFDEEEETGENHTIFIGPVEKLIVYPPPPAKGGISVTNEDLHCLNEGEFLNDVIIDFYLKYLVLEKLKKEDADRIHIFSSFFYKRLNQRERRNHETTNLSIQQKRHGRVKTWTRHVDIFEKDFIFVPLNEAAHWFLAVVCFPGLEKPKYEPNPHYHENAVIQKCSTVEDSCISSSASEMESCSQNSSAKPVIKKMLNKKHCIAVIDSNPGQEESDPRYKRNICSVKYSVKKINHTASENEEFNKGESTSQKVADRTKSENGLQNESLSSTHHTDGLSKIRLNYSDESPEAGKMLEDELVDFSEDQDNQDDSSDDGFLADDNCSSEIGQWHLKPTICKQPCILLMDSLRGPSRSNVVKILREYLEVEWEVKKGSKRSFSKDVMKGSNPKVPQQNNFSDCGVYVLQYVESFFENPILSFELPMNLANWFPPPRMRTKREEIRNIILKLQEDQSKEKRKHKDTYSTEAPLGEGTEQYVNSISD

SEQ ID NO: 187386 - protein, 1112 aa, Artificial Sequence
  derived and/or modified sequence
MAAGKSGGSAGEITFLEALARSESKRDGGFKNNWSFDHEEESEGDTDKDGTNLLSVDEDEDSETSKGKKLNRRSEIVANSSGEFILKTYVRRNKSESFKTLKGNPIGLNMLSNNKKLSENTQNTSLCSGTVVHGRRFHHAHAQIPVVKTAAQSSLDRKERKEYPPHVQKVEINPVRLSRLQGVERIMKKTEESESQVEPEIKRKVQQKRHCSTYQPTPPLSPASKKCLTHLEDLQRNCRQAITLNESTGPLLRTSIHQNSGGQKSQNTGLTTKKFYGNNVEKVPIDIIVNCDDSKHTYLQTNGKVILPGAKIPKITNLKERKTSLSDLNDPIILSSDDDDDNDRTNRRESISPQPADSACSSPAPSTGKVEAALNENTCRAERELRSIPEDSELNTVTLPRKARMKDQFGNSIINTPLKRRKVFSQEPPDALALSCQSSFDSVILNCRSIRVGTLFRLLIEPVIFCLDFIKIQLDEPDHDPVEIILNTSDLTKCEWCNVRKLPVVFLQAIPAVYQKLSIQLQMNKEDKVWNDCKGVNKLTNLEEQYIILIFQNGLDPPANMVFESIINEIGIKNNISNFFAKIPFEEANGRLVACTRTYEESIKGSCGQKENKIKTVSFESKIQLRSKQEFQFFDEEEETGENHTIFIGPVEKLIVYPPPPAKGGISVTNEDLHCLNEGEFLNDVIIDFYLKYLVLEKLKKEDADRIHIFSSFFYKRLNQRERRNHETTNLSIQQKRHGRVKTWTRHVDIFEKDFIFVPLNEAAHWFLAVVCFPGLEKPKYEPNPHYHENAVIQKCSTVEDSCISSSASEMESCSQNSSAKPVIKKMLNKKHCIAVIDSNPGQEESDPRYKRNICSVKYSVKKINHTASENEEFNKGESTSQKVADRTKSENGLQNESLSSTHHTDGLSKIRLNYSDESPEAGKMLEDELVDFSEDQDNQDDSSDDGFLADDNCSSEIGQWHLKPTICKQPCILLMDSLRGPSRSNVVKILREYLEVEWEVKKGSKRSFSKDVMKGSNPKVPQQNNFSDCGVYVLQYVESFFENPILSFELPMNLANWFPPPRMRTKREEIRNIILKLQEDQSKEKRKHKDTYSTEAPLGEGTEQYVNSISD

SEQ ID NO: 187387 - DNA, 3339 bp, Artificial Sequence
  derived and/or modified sequence
atggccgccggcaagagcggcggcagcgccggcgagatcaccttcctggaggccctggccagaagcgagagcaagagagacggcggcttcaagaacaactggagcttcgaccacgaggaggagagcgagggcgacaccgacaaggacggcaccaacctgctgagcgtggacgaggacgaggacagcgagaccagcaagggcaagaagctgaacagaagaagcgagatcgtggccaacagcagcggcgagttcatcctgaagacctacgtgagaagaaacaagagcgagagcttcaagaccctgaagggcaaccccatcggcctgaacatgctgagcaacaacaagaagctgagcgagaacacccagaacaccagcctgtgcagcggcaccgtggtgcacggcagaagattccaccacgcccacgcccagatccccgtggtgaagaccgccgcccagagactgctgagcaaccagatcctgaaggagtaccccccccacgtgcagaaggtggagatcaaccccgtgagactgagcagactgcagggcgtggagagaatcatgaagaagaccgaggagagcgagagccaggtggagcccgagatcaagagaaaggtgcagcagaagagacactgcagcacctaccagcccaccccccccctgagccccgccagcaagaagtgcctgacccacctggaggacctgcagagaaactgcagacaggccatcaccctgaacgagagcaccggccccctgctgagaaccagcatccaccagaacagcggcggccagaagagccagaacaccggcctgaccaccaagaagttctacggcaacaacgtggagaaggtgcccatcgacatcatcgtgaactgcgacgacagcaagcacacctacctgcagaccaacggcaaggtgatcctgcccggcgccaagatccccaagatcaccaacctgaaggagagaaagaccagcctgagcgacctgaacgaccccatcatcctgagcagcgacgacgacgacgacaacgacagaaccaacagaagagagagcatcagcccccagcccgccgacagcgcctgcagcagccccgcccccagcaccggcaaggtggaggccgccctgaacgagaacacctgcagagccgagagagagctgagaagcatccccgaggacagcgagctgaacaccgtgaccctgcccagaaaggccagaatgaaggaccagttcggcaacagcatcatcaacacccccctgaagagaagaaaggtgttcagccaggagccccccgacgccctggccctgagctgccagagcagcttcgacagcgtgatcctgaactgcagaagcatcagagtgggcaccctgttcagactgctgatcgagcccgtgatcttctgcctggacttcatcaagatccagctggacgagcccgaccacgaccccgtggagatcatcctgaacaccagcgacctgaccaagtgcgagtggtgcaacgtgagaaagctgcccgtggtgttcctgcaggccatccccgccgtgtaccagaagctgagcatccagctgcagatgaacaaggaggacaaggtgtggaacgactgcaagggcgtgaacaagctgaccaacctggaggagcagtacatcatcctgatcttccagaacggcctggacccccccgccaacatggtgttcgagagcatcatcaacgagatcggcatcaagaacaacatcagcaacttcttcgccaagatccccttcgaggaggccaacggcagactggtggcctgcaccagaacctacgaggagagcatcaagggcagctgcggccagaaggagaacaagatcaagaccgtgagcttcgagagcaagatccagctgagaagcaagcaggagttccagttcttcgacgaggaggaggagaccggcgagaaccacaccatcttcatcggccccgtggagaagctgatcgtgtacccccccccccccgccaagggcggcatcagcgtgaccaacgaggacctgcactgcctgaacgagggcgagttcctgaacgacgtgatcatcgacttctacctgaagtacctggtgctggagaagctgaagaaggaggacgccgacagaatccacatcttcagcagcttcttctacaagagactgaaccagagagagagaagaaaccacgagaccaccaacctgagcatccagcagaagagacacggcagagtgaagacctggaccagacacgtggacatcttcgagaaggacttcatcttcgtgcccctgaacgaggccgcccactggttcctggccgtggtgtgcttccccggcctggagaagcccaagtacgagcccaacccccactaccacgagaacgccgtgatccagaagtgcagcaccgtggaggacagctgcatcagcagcagcgccagcgagatggagagctgcagccagaacagcagcgccaagcccgtgatcaagaagatgctgaacaagaagcactgcatcgccgtgatcgacagcaaccccggccaggaggagagcgaccccagatacaagagaaacatctgcagcgtgaagtacagcgtgaagaagatcaaccacaccgccagcgagaacgaggagttcaacaagggcgagagcaccagccagaaggtggccgacagaaccaagagcgagaacggcctgcagaacgagagcctgagcagcacccaccacaccgacggcctgagcaagatcagactgaactacagcgacgagagccccgaggccggcaagatgctggaggacgagctggtggacttcagcgaggaccaggacaaccaggacgacagcagcgacgacggcttcctggccgacgacaactgcagcagcgagatcggccagtggcacctgaagcccaccatctgcaagcagccctgcatcctgctgatggacagcctgagaggccccagcagaagcaacgtggtgaagatcctgagagagtacctggaggtggagtgggaggtgaagaagggcagcaagagaagcttcagcaaggacgtgatgaagggcagcaaccccaaggtgccccagcagaacaacttcagcgactgcggcgtgtacgtgctgcagtacgtggagagcttcttcgagaaccccatcctgagcttcgagctgcccatgaacctggccaactggttccccccccccagaatgagaaccaagagagaggagatcagaaacatcatcctgaagctgcaggaggaccagagcaaggagaagagaaagcacaaggacacctacagcaccgaggcccccctgggcgagggcaccgagcagtacgtgaacagcatcagcgactag

SEQ ID NO: 187388 - DNA, 3339 bp, Artificial Sequence
  derived and/or modified sequence
atggccgccggcaagagcggcggcagcgccggcgagatcaccttcctggaggccctggccagaagcgagagcaagagagacggcggcttcaagaacaactggagcttcgaccacgaggaggagagcgagggcgacaccgacaaggacggcaccaacctgctgagcgtggacgaggacgaggacagcgagaccagcaagggcaagaagctgaacagaagaagcgagatcgtggccaacagcagcggcgagttcatcctgaagacctacgtgagaagaaacaagagcgagagcttcaagaccctgaagggcaaccccatcggcctgaacatgctgagcaacaacaagaagctgagcgagaacacccagaacaccagcctgtgcagcggcaccgtggtgcacggcagaagattccaccacgcccacgcccagatccccgtggtgaagaccgccgcccagagcagcctggacagaaaggagagaaaggagtaccccccccacgtgcagaaggtggagatcaaccccgtgagactgagcagactgcagggcgtggagagaatcatgaagaagaccgaggagagcgagagccaggtggagcccgagatcaagagaaaggtgcagcagaagagacactgcagcacctaccagcccaccccccccctgagccccgccagcaagaagtgcctgacccacctggaggacctgcagagaaactgcagacaggccatcaccctgaacgagagcaccggccccctgctgagaaccagcatccaccagaacagcggcggccagaagagccagaacaccggcctgaccaccaagaagttctacggcaacaacgtggagaaggtgcccatcgacatcatcgtgaactgcgacgacagcaagcacacctacctgcagaccaacggcaaggtgatcctgcccggcgccaagatccccaagatcaccaacctgaaggagagaaagaccagcctgagcgacctgaacgaccccatcatcctgagcagcgacgacgacgacgacaacgacagaaccaacagaagagagagcatcagcccccagcccgccgacagcgcctgcagcagccccgcccccagcaccggcaaggtggaggccgccctgaacgagaacacctgcagagccgagagagagctgagaagcatccccgaggacagcgagctgaacaccgtgaccctgcccagaaaggccagaatgaaggaccagttcggcaacagcatcatcaacacccccctgaagagaagaaaggtgttcagccaggagccccccgacgccctggccctgagctgccagagcagcttcgacagcgtgatcctgaactgcagaagcatcagagtgggcaccctgttcagactgctgatcgagcccgtgatcttctgcctggacttcatcaagatccagctggacgagcccgaccacgaccccgtggagatcatcctgaacaccagcgacctgaccaagtgcgagtggtgcaacgtgagaaagctgcccgtggtgttcctgcaggccatccccgccgtgtaccagaagctgagcatccagctgcagatgaacaaggaggacaaggtgtggaacgactgcaagggcgtgaacaagctgaccaacctggaggagcagtacatcatcctgatcttccagaacggcctggacccccccgccaacatggtgttcgagagcatcatcaacgagatcggcatcaagaacaacatcagcaacttcttcgccaagatccccttcgaggaggccaacggcagactggtggcctgcaccagaacctacgaggagagcatcaagggcagctgcggccagaaggagaacaagatcaagaccgtgagcttcgagagcaagatccagctgagaagcaagcaggagttccagttcttcgacgaggaggaggagaccggcgagaaccacaccatcttcatcggccccgtggagaagctgatcgtgtacccccccccccccgccaagggcggcatcagcgtgaccaacgaggacctgcactgcctgaacgagggcgagttcctgaacgacgtgatcatcgacttctacctgaagtacctggtgctggagaagctgaagaaggaggacgccgacagaatccacatcttcagcagcttcttctacaagagactgaaccagagagagagaagaaaccacgagaccaccaacctgagcatccagcagaagagacacggcagagtgaagacctggaccagacacgtggacatcttcgagaaggacttcatcttcgtgcccctgaacgaggccgcccactggttcctggccgtggtgtgcttccccggcctggagaagcccaagtacgagcccaacccccactaccacgagaacgccgtgatccagaagtgcagcaccgtggaggacagctgcatcagcagcagcgccagcgagatggagagctgcagccagaacagcagcgccaagcccgtgatcaagaagatgctgaacaagaagcactgcatcgccgtgatcgacagcaaccccggccaggaggagagcgaccccagatacaagagaaacatctgcagcgtgaagtacagcgtgaagaagatcaaccacaccgccagcgagaacgaggagttcaacaagggcgagagcaccagccagaaggtggccgacagaaccaagagcgagaacggcctgcagaacgagagcctgagcagcacccaccacaccgacggcctgagcaagatcagactgaactacagcgacgagagccccgaggccggcaagatgctggaggacgagctggtggacttcagcgaggaccaggacaaccaggacgacagcagcgacgacggcttcctggccgacgacaactgcagcagcgagatcggccagtggcacctgaagcccaccatctgcaagcagccctgcatcctgctgatggacagcctgagaggccccagcagaagcaacgtggtgaagatcctgagagagtacctggaggtggagtgggaggtgaagaagggcagcaagagaagcttcagcaaggacgtgatgaagggcagcaaccccaaggtgccccagcagaacaacttcagcgactgcggcgtgtacgtgctgcagtacgtggagagcttcttcgagaaccccatcctgagcttcgagctgcccatgaacctggccaactggttccccccccccagaatgagaaccaagagagaggagatcagaaacatcatcctgaagctgcaggaggaccagagcaaggagaagagaaagcacaaggacacctacagcaccgaggcccccctgggcgagggcaccgagcagtacgtgaacagcatcagcgactag

SEQ ID NO: 187389 - DNA, 3339 bp, Artificial Sequence
  derived and/or modified sequence
atggctgctggtaaatctggcggaagcgccggtgagattacatttctggaagccctggcaagatcagaaagcaagagagacggcgggttcaagaataactggtcctttgatcatgaagaggagagtgagggtgatactgacaaggatggcacaaatcttctgagtgtcgacgaggacgaggattccgagacaagcaaaggcaaaaaactgaatagaagaagcgaaatcgtggcaaacagttcaggcgagttcatactgaagacatacgtacgccgcaacaaatcggagtccttcaagacactgaagggaaaccctatcggattgaacatgctgagcaacaacaaaaaactcagcgagaatacacagaatacgtctttatgctctggcactgtggtgcatggaaggcggtttcatcatgcgcatgctcagatccccgtggtgaagaccgccgcccagcgcctgctgtccaatcagatattgaaagaataccctcctcacgtgcagaaagtggagatcaatcccgtgagactctcccgcctccagggggtggaaaggatcatgaagaaaactgaggaaagcgagagtcaggtcgagcccgagataaaaagaaaggtccagcaaaaaaggcactgctccacctaccagccgactccgccactgtctccagcttcaaaaaagtgtctgacgcacctcgaggatctgcagagaaactgcagacaggctattacactgaatgagtccacaggacccctgctgcgtacgtccatccatcaaaactccggcgggcagaaatcccaaaacactggtttaacaacaaaaaaattctacggaaataacgtggagaaggtgcctatcgacattattgtgaactgcgatgatagcaagcacacatatctacagacaaacggtaaggttatactccccggagccaaaattccaaagattacaaatctgaaggaacgaaagactagtcttagcgacttgaacgacccaatcatcctgagctcagacgatgatgatgacaatgacaggacgaatagaagagaaagtatctcaccgcaacctgctgactctgcatgctccagccccgcccctagtacaggtaaggtggaggccgccttgaacgagaatacatgcagggcggaacgcgagctcaggtctattcccgaagacagtgagcttaacacggttaccctccccagaaaagcaaggatgaaggatcagttcggcaacagcattatcaacacccctttgaagaggcgcaaggtgttcagccaggagcctcctgatgccctagcgctttcctgtcaaagctcgtttgactctgtcattctcaactgccggagcatccgagtaggtactctctttaggcttctcattgagcctgtcatcttttgtctggattttatcaagatccaactcgacgagcccgaccatgatcccgtggagatcatactgaacaccagcgatctgactaagtgcgagtggtgtaatgtgcggaagctgcccgtcgtcttcctgcaggcaattcccgcagtttaccagaaactgtccatccaactgcagatgaataaagaagacaaggtgtggaacgactgcaaaggggtgaacaaattgaccaacctagaggagcagtacatcatactgatttttcaaaatggattggaccccccggccaatatggtcttcgagtcgattatcaacgaaattgggatcaaaaataatatttctaacttctttgcgaagattccgttcgaggaagcaaatgggcgtttggtcgcatgcactcgaacttatgaggaaagcatcaaaggctcatgcgggcaaaaggaaaacaagataaagacagtttcctttgaatccaagatacagttacgctcgaagcaggaatttcagttctttgacgaagaggaggagacaggcgaaaatcacactattttcatcgggcccgttgagaaacttatcgtttacccccctcccccagcgaagggcggaatttccgtcaccaatgaagacctacactgtctgaatgagggagaattcttgaatgacgttataattgacttctacctcaagtatcttgtgctggaaaaactcaagaaggaagatgcagaccggatccacatcttcagctccttcttctataaacggctgaatcaacgagaacggcgcaaccacgagaccaccaatctatccatacagcagaaacggcatggacgcgttaagacttggacaaggcacgtagatatattcgaaaaagatttcatctttgtgccattaaatgaagctgcacactggttcctggccgttgtatgtttcccaggcctagaaaagccaaagtacgagcctaacccacattaccacgaaaatgccgtcattcagaagtgctcaaccgtagaagactcttgcattagttcatctgcatccgagatggaatcttgctcacagaatagctcggccaaacccgtcatcaaaaagatgctgaataaaaaacactgtatagccgtgattgatagcaatcccggccaagaggagtccgacccgagatacaagcgcaatatttgtagcgtgaagtatagtgtcaagaagattaaccacaccgcctcagagaatgaggaattcaataagggcgagagtactagccagaaggtcgccgacagaaccaaatccgaaaatgggctgcagaatgagtcactgagctcaacacatcataccgacggtctgtctaagatacgactaaactactcggacgagtctcctgaggctggcaaaatgttggaggacgagctcgtggactttagcgaggatcaggacaaccaggacgactcatcagatgatgggtttctggctgatgacaattgtagctctgagattgggcagtggcatctcaaacctaccatatgtaagcagccctgcattctcctcatggacagtctgcgaggtccgtccaggagtaacgttgtgaagatactgcgggagtaccttgaggttgagtgggaagttaagaaaggctccaagaggagcttcagtaaggatgtgatgaaaggaagcaatcccaaagtacctcagcaaaacaacttctccgactgcggggtatatgtactgcagtatgtggagtcgtttttcgagaatcctattctcagcttcgagttaccgatgaacctagctaactggttccctcccccaagaatgcgcacgaagcgggaggaaatccggaacattatcctgaagttgcaggaagatcaatcaaaggaaaaaagaaaacacaaagacacctactccacagaggcccctctgggggaaggcacagagcagtacgttaatagcataagcgattag

SEQ ID NO: 187390 - DNA, 3339 bp, Artificial Sequence
  derived and/or modified sequence
atggcagcaggcaagtctgggggatcagcgggcgaaattaccttccttgaggcattagcacgatcggaaagcaagcgagacggtgggttcaaaaataattggagcttcgaccacgaagaggaaagtgagggcgataccgataaggatgggactaatctgctctcagtcgatgaggatgaggattccgaaacctcaaagggaaaaaaactgaaccgaaggagcgagatagttgcaaacagcagcggagagttcattctcaaaacatacgtgaggcggaacaagagtgaatcttttaaaactctgaaaggaaatccaattgggctgaatatgctttctaacaacaagaaactctctgaaaacacccagaatacttctctgtgttcaggcaccgtcgtgcatggacgaaggttccaccatgcccacgcgcaaattcctgtggtcaaaaccgctgcacagtcatcgctggacaggaaggagaggaaagagtatcctccacacgtgcagaaggtggagattaatcctgtgagacttagccgactgcagggggttgaacgcatcatgaaaaaaaccgaagagtccgaatcgcaggtagaacctgagattaaacgtaaggtacagcagaaacgacattgcagcacttaccagcccacccctcccctgtctcctgcatcaaagaagtgccttactcatctggaagacctacaaagaaactgcagacaggctattacattaaatgagtcaaccggacctctcctccggacgagtattcatcaaaactcgggtggacagaagagtcagaatactggcctgactaccaaaaaattctacgggaataatgtggaaaaagtgcctattgatattattgtaaattgtgatgactcaaagcacacctatcttcagaccaacgggaaagtcatcctgcccggagccaagatcccaaaaataaccaatctcaaagagcgcaagacatcacttagcgacctgaacgatcccatcatcttgagttccgacgacgacgacgataatgataggaccaataggcgggagagcatttccccccagcccgccgactcagcatgctcaagccctgctccctctaccgggaaggtggaggccgcattaaatgagaacacctgcagagccgagagagagctccgatcaatccccgaagatagcgagctcaataccgttacactacccagaaaagctagaatgaaggaccagttcgggaacagcattataaacactcctctcaagagacgtaaagtcttcagccaggaacctcctgacgccttagcgctgagctgtcagtcctctttcgattccgttatcctgaattgcagaagcatccgcgtgggaacactgttcagactcttgatcgagccagtcattttctgcttagattttattaagatacagctcgatgaacctgaccatgaccctgtggaaatcatactgaataccagcgatctcactaagtgtgagtggtgtaatgtgaggaagctgccagttgttttcctccaagccattcccgccgtctaccagaagctgtcaatccagctccagatgaacaaggaagataaagtgtggaacgactgcaaaggggtaaataagctgaccaatctggaagagcagtacataattttgatctttcagaatggactggatccacctgccaacatggttttcgaaagcattattaatgagattggaattaaaaataacataagtaacttttttgccaaaattcccttcgaggaggcaaacggtcggttagtggcgtgtactagaacctacgaagagtcaattaagggcagctgcgggcagaaagagaacaagatcaaaactgttagcttcgagagcaaaattcagctgcggagcaagcaggaatttcagtttttcgacgaggaagaggagacgggtgaaaaccacactatcttcatcggaccagtggagaagctgattgtgtacccacctccgccagctaagggcggcatttcggtgacaaatgaggacctccactgcttgaacgaaggtgagttcctcaacgatgtaattattgacttttaccttaagtaccttgtgctggagaaactcaaaaaggaggatgccgacaggatccacatattcagttcatttttttacaagagactcaatcagcgtgagcgtaggaaccacgagactactaatctgtcaattcagcagaagcgtcacggccgagtgaagacatggactagacatgtagatatcttcgagaaagactttattttcgtgcctctcaatgaagcggctcattggttcctggctgtggtgtgctttccaggcctcgagaagcccaaatatgagcctaacccacattatcacgagaatgcagtgatccagaaatgctcaacggtagaagattcatgcatttcaagctctgccagcgagatggaaagttgctcacagaactcatctgctaaaccagtcattaagaagatgctgaacaagaaacactgcattgctgtgattgatagtaacccgggacaggaggaaagcgatcctaggtacaaacgcaacatttgctccgtcaaatacagcgtcaagaaaatcaaccataccgcctcagaaaacgaggaattcaacaagggggagagtacctcccagaaggtggccgatagaacaaaatctgagaacggcctgcagaatgaaagcctgagcagcacccaccataccgatggcctgtccaaaatacggctgaactacagcgacgaaagcccagaagcagggaaaatgctcgaagatgagctggtggactttagtgaggatcaggataatcaagacgattccagtgatgatgggttcctagctgacgacaactgctcgagcgaaataggccagtggcatctgaaacctacaatttgcaaacagccatgcattctgctaatggacagtctgaggggccccagtagaagcaacgttgttaagattctccgagagtatctcgaggtggaatgggaggttaagaaagggagtaaaaggagctttagcaaagatgtgatgaaaggctctaatccgaaagtgccacagcagaataacttctccgactgtggtgtgtacgtgctgcaatatgtggaaagcttctttgaaaatcctatcctgagtttcgaactgccgatgaacctggccaactggtttccccctccaagaatgcgcaccaagagggaggagatcaggaacattattctcaaattacaagaggaccaatctaaagaaaagcgtaaacacaaagatacatactccacagaagcccctctgggcgagggtacagagcaatacgtcaattccatatccgactag

SEQ ID NO: 187391 - DNA, 3339 bp, Artificial Sequence
  derived and/or modified sequence
atggctgctgggaagagcggcggcagcgctggggagatcaccttcctggaggccctggcccggtctgagagcaagagagatggcggcttcaagaacaactggagctttgaccacgaggaggagagcgagggggacacagacaaggatggcaccaacctgctgtctgtggatgaagatgaggacagcgagaccagcaagggcaagaagctgaacagaagaagtgagatcgtggccaacagcagtggagagttcatcctgaagacctacgtgagaagaaacaagtctgagagcttcaagaccctgaagggcaaccccatcggcctgaacatgctgagcaacaacaagaagctgtctgagaacacccagaacaccagcctgtgcagcggcaccgtggtgcatggaagacgcttccaccacgcccacgcccagatccctgtggtgaagacagctgcccagaggctgctgagcaaccagatcctgaaggagtacccaccccacgtgcagaaggtggagatcaaccctgtgcggctgagccggctgcagggcgtggagcgcatcatgaagaagacagaggagagcgagagccaggtggagcctgagatcaagaggaaggtgcagcagaagaggcactgcagcacctaccagcccaccccacccctgagccctgccagcaagaagtgcctgacccacctggaggacctgcagaggaactgccggcaggccatcaccctgaatgaaagcacaggccccctgctgcggaccagcatccaccagaacagcggcggccagaagagccagaacacaggcctgaccaccaagaagttctacggcaacaacgtggagaaggtgcccatcgacatcatcgtgaactgtgatgacagcaagcacacctacctgcagaccaacgggaaggtgatcctgcccggggccaagatccccaagatcaccaacctgaaggagaggaagaccagcctgagtgacctgaatgaccccatcatcctgagcagtgatgatgatgatgacaatgacaggaccaacagaagagagagcatcagcccccagcctgctgacagcgcctgcagcagccctgcccccagcacaggcaaggtggaggccgccctgaatgaaaacacctgcagagctgagcgggagctgcggagcatccctgaggacagcgagctgaacacagtgaccctgcccaggaaggccaggatgaaggaccagtttggaaacagcatcatcaacacccccctgaagaggaggaaggtgttcagccaggagcccccagatgccctggccctgagctgccagagcagctttgacagcgtcatcctgaactgccgcagcatccgggtgggcaccctcttccggctgctgattgagcccgtcatcttctgcctggacttcatcaagatccagctggatgagccagaccatgaccctgtggagatcatcctgaacaccagtgacctgaccaagtgtgagtggtgcaatgtgaggaagctgcctgtggtgttcctgcaggccatcccagctgtgtaccagaagctgagcatccagctgcagatgaacaaggaggacaaggtgtggaatgactgcaagggcgtgaacaagctgaccaacctggaggagcagtacatcatcctgatcttccagaatggcctggaccccccagccaacatggtgtttgagagcatcatcaatgagatcggcatcaagaacaacatcagcaacttctttgccaagatcccctttgaggaggccaacggccgcctggtggcctgcaccaggacctatgaggagagcatcaagggcagctgtggccagaaggagaacaagatcaagacagtgtcctttgagagcaagatccagctgcggagcaagcaggagttccagttctttgatgaggaggaggagaccggggagaaccacaccatcttcatcggccctgtggagaagctgattgtgtacccacctcctccagccaagggcggcatctctgtgaccaatgaagacctgcactgcctgaatgaaggagagttcctgaatgatgtgatcatcgacttctacctgaagtacctggtgctggagaagctgaagaaggaggatgctgaccgcatccacatcttcagcagcttcttctacaagaggctgaaccagcgggagaggaggaaccacgagaccaccaacctgagcatccagcagaagagacatggccgggtgaagacctggaccaggcatgtggacatctttgagaaggacttcatctttgtgcccctgaatgaagctgcccactggttcctggccgtggtgtgcttccctggcctggagaagcccaagtatgagcccaacccccactaccatgaaaatgctgtgatccagaagtgcagcacagtggaggacagctgcatcagcagcagcgccagcgagatggagagctgcagccagaacagcagcgccaagcctgtgatcaagaagatgctgaacaagaagcactgcatcgctgtgattgacagcaaccctggccaggaggagagtgacccccgctacaagaggaacatctgcagcgtgaagtacagcgtgaagaagatcaaccacacagcctctgaaaatgaggagttcaacaagggggagagcaccagccagaaggtggccgacaggaccaagtcagaaaatggcctgcagaatgaaagcctgagcagcacccaccacacagatggcctgagcaagatccggctgaactacagtgatgagagccctgaggccggcaagatgctggaggatgagctggtggacttcagcgaggaccaggacaaccaggatgacagcagtgatgatggcttcctggctgatgacaactgcagcagcgagatcggccagtggcacctgaagcccaccatctgcaagcagccctgcatcctgctgatggacagcctgcggggccccagccgcagcaatgtggtgaagatcctgcgggagtacctggaggtggagtgggaggtgaagaagggcagcaagaggagcttcagcaaggatgtgatgaagggcagcaaccccaaggtgccccagcagaacaacttcagtgactgtggggtgtatgtgctgcagtatgtggagagcttctttgagaaccccatcctgagctttgagctgcccatgaacctggccaactggttccccccacccaggatgaggaccaagcgggaggagatccggaacatcatcctgaagctgcaggaggaccagagcaaggagaagaggaagcacaaggacacctacagcacagaggcccccctgggggagggcacagagcagtatgtgaacagcatcagtgactag

SEQ ID NO: 187392 - DNA, 3339 bp, Artificial Sequence
  derived and/or modified sequence
atggctgctgggaagagcggcggcagcgctggggagatcaccttcctggaggccctggcccggtctgagagcaagagagatggcggcttcaagaacaactggagctttgaccacgaggaggagagcgagggggacacagacaaggatggcaccaacctgctgtctgtggatgaagatgaggacagcgagaccagcaagggcaagaagctgaacagaagaagtgagatcgtggccaacagcagtggagagttcatcctgaagacctacgtgagaagaaacaagtctgagagcttcaagaccctgaagggcaaccccatcggcctgaacatgctgagcaacaacaagaagctgtctgagaacacccagaacaccagcctgtgcagcggcaccgtggtgcatggaagacgcttccaccacgcccacgcccagatccctgtggtgaagacagctgcccagagcagcctggacaggaaggagaggaaggagtacccaccccacgtgcagaaggtggagatcaaccctgtgcggctgagccggctgcagggcgtggagcgcatcatgaagaagacagaggagagcgagagccaggtggagcctgagatcaagaggaaggtgcagcagaagaggcactgcagcacctaccagcccaccccacccctgagccctgccagcaagaagtgcctgacccacctggaggacctgcagaggaactgccggcaggccatcaccctgaatgaaagcacaggccccctgctgcggaccagcatccaccagaacagcggcggccagaagagccagaacacaggcctgaccaccaagaagttctacggcaacaacgtggagaaggtgcccatcgacatcatcgtgaactgtgatgacagcaagcacacctacctgcagaccaacgggaaggtgatcctgcccggggccaagatccccaagatcaccaacctgaaggagaggaagaccagcctgagtgacctgaatgaccccatcatcctgagcagtgatgatgatgatgacaatgacaggaccaacagaagagagagcatcagcccccagcctgctgacagcgcctgcagcagccctgcccccagcacaggcaaggtggaggccgccctgaatgaaaacacctgcagagctgagcgggagctgcggagcatccctgaggacagcgagctgaacacagtgaccctgcccaggaaggccaggatgaaggaccagtttggaaacagcatcatcaacacccccctgaagaggaggaaggtgttcagccaggagcccccagatgccctggccctgagctgccagagcagctttgacagcgtcatcctgaactgccgcagcatccgggtgggcaccctcttccggctgctgattgagcccgtcatcttctgcctggacttcatcaagatccagctggatgagccagaccatgaccctgtggagatcatcctgaacaccagtgacctgaccaagtgtgagtggtgcaatgtgaggaagctgcctgtggtgttcctgcaggccatcccagctgtgtaccagaagctgagcatccagctgcagatgaacaaggaggacaaggtgtggaatgactgcaagggcgtgaacaagctgaccaacctggaggagcagtacatcatcctgatcttccagaatggcctggaccccccagccaacatggtgtttgagagcatcatcaatgagatcggcatcaagaacaacatcagcaacttctttgccaagatcccctttgaggaggccaacggccgcctggtggcctgcaccaggacctatgaggagagcatcaagggcagctgtggccagaaggagaacaagatcaagacagtgtcctttgagagcaagatccagctgcggagcaagcaggagttccagttctttgatgaggaggaggagaccggggagaaccacaccatcttcatcggccctgtggagaagctgattgtgtacccacctcctccagccaagggcggcatctctgtgaccaatgaagacctgcactgcctgaatgaaggagagttcctgaatgatgtgatcatcgacttctacctgaagtacctggtgctggagaagctgaagaaggaggatgctgaccgcatccacatcttcagcagcttcttctacaagaggctgaaccagcgggagaggaggaaccacgagaccaccaacctgagcatccagcagaagagacatggccgggtgaagacctggaccaggcatgtggacatctttgagaaggacttcatctttgtgcccctgaatgaagctgcccactggttcctggccgtggtgtgcttccctggcctggagaagcccaagtatgagcccaacccccactaccatgaaaatgctgtgatccagaagtgcagcacagtggaggacagctgcatcagcagcagcgccagcgagatggagagctgcagccagaacagcagcgccaagcctgtgatcaagaagatgctgaacaagaagcactgcatcgctgtgattgacagcaaccctggccaggaggagagtgacccccgctacaagaggaacatctgcagcgtgaagtacagcgtgaagaagatcaaccacacagcctctgaaaatgaggagttcaacaagggggagagcaccagccagaaggtggccgacaggaccaagtcagaaaatggcctgcagaatgaaagcctgagcagcacccaccacacagatggcctgagcaagatccggctgaactacagtgatgagagccctgaggccggcaagatgctggaggatgagctggtggacttcagcgaggaccaggacaaccaggatgacagcagtgatgatggcttcctggctgatgacaactgcagcagcgagatcggccagtggcacctgaagcccaccatctgcaagcagccctgcatcctgctgatggacagcctgcggggccccagccgcagcaatgtggtgaagatcctgcgggagtacctggaggtggagtgggaggtgaagaagggcagcaagaggagcttcagcaaggatgtgatgaagggcagcaaccccaaggtgccccagcagaacaacttcagtgactgtggggtgtatgtgctgcagtatgtggagagcttctttgagaaccccatcctgagctttgagctgcccatgaacctggccaactggttccccccacccaggatgaggaccaagcgggaggagatccggaacatcatcctgaagctgcaggaggaccagagcaaggagaagaggaagcacaaggacacctacagcacagaggcccccctgggggagggcacagagcagtatgtgaacagcatcagtgactag

SEQ ID NO: 187393 - DNA, 3339 bp, Artificial Sequence
  derived and/or modified sequence
atggccgccggcaagagcggcggcagcgccggcgagatcaccttcttagaggctctggcaaggagcgagagcaaaagagatggcggtttcaagaacaattggtcttttgatcacgaagaagaatcagaaggagacacagacaaggacggcacgaatctcctgtcagtcgacgaggacgaagactccgaaacatctaaagggaaaaaactcaaccgcaggagcgagatcgttgcgaatagtagtggcgagtttatattgaaaacatatgtgagacggaacaagagcgagtcttttaaaaccctaaagggcaatcctatcgggcttaatatgctttcaaacaacaaaaaactgtctgaaaacacccagaatactagcctgtgctcaggaacggtggtgcacggcaggcggttccatcacgcacatgcacagatacccgtcgtcaaaacggcggcccaacgccttctgagcaatcagatccttaaagaatacccaccacatgtgcagaaagtcgaaatcaatcctgtgaggctctcacgactccagggggttgagcgaattatgaagaaaactgaggaaagtgagagtcaggtggagcctgaaatcaaacgcaaggtgcaacagaagaggcattgttccacataccagcccactcccccactgtcacctgctagtaagaagtgtctaacccatctagaggacttgcagcgcaattgccggcaagccattactctgaacgaatctaccggcccactccttagaacttccatccaccagaattccggtggacagaaatcccaaaacacagggctgactaccaaaaaattctacggaaataacgtcgaaaaggtccctatcgacataatagtgaactgtgacgacagcaaacacacgtatttgcaaactaatggaaaggtgatactgcccggtgcaaaaatccctaagattacgaatctcaaggaacgcaagacctccctatcagatctgaatgacccaattatccttagttctgacgatgatgacgacaatgatagaaccaataggagggagtcaatctctccacagcccgccgattcagcctgttccagtccggctcccagtaccggtaaagtcgaagctgcactgaacgagaatacttgtagggcagagagagagcttcgatccataccggaagatagcgagctgaacacagtcaccctgccacgcaaggcccgtatgaaggaccagtttggtaacagtatcattaacacccccttgaaacgcaggaaggtgttctcacaagaaccgccagacgctcttgctctgtcctgccaatcctcattcgactctgtgatccttaactgtaggagtattcgagtcggtacactctttaggctgcttattgagcctgtcattttctgtttagactttattaaaattcaactcgacgagccagatcatgaccccgtggaaataatccttaacacttcagatcttaccaaatgtgaatggtgcaacgtgcgaaagctaccagttgtatttttgcaggctattccggcggtctatcagaagctctctattcagctgcaaatgaataaggaggacaaagtgtggaatgactgcaaaggagtgaacaaactcactaacctggaagagcagtacatcatcctgatttttcaaaatggcctggatcccccagctaatatggtgttcgagagtataattaacgagattggaattaagaataacatctccaacttctttgcaaagatccctttcgaggaagcaaacggaaggctggttgcctgtaccagaacttacgaggagtctatcaaggggtcatgcggacagaaggagaacaagattaaaacagttagtttcgagtcaaaaatacagctgaggtctaaacaggagttccaattctttgacgaagaggaagagactggggaaaatcacactatcttcatcggccccgtagaaaaactcatcgtgtatcctccccccccggctaaagggggaatttctgtgacgaatgaagatttgcattgtctgaacgaaggcgagttcctcaacgatgtaataattgacttctacctgaagtatctggttttggaaaaactgaagaaggaagatgcagaccggatccacatttttagctcttttttttacaagagactgaaccaaagggaaagacgcaatcacgaaacaactaatttaagtatccaacagaagcgccacgggcgtgtcaaaacctggactcgtcatgtagatattttcgagaaagacttcatctttgtgccgctgaatgaggccgcccactggtttctagcagtggtatgtttccccggcctcgagaagcccaagtatgagcctaaccctcattatcatgagaatgccgtcattcaaaagtgtagcaccgtggaggacagctgtatatcaagctctgccagtgaaatggaatcatgttcgcagaactcaagcgccaagcccgtcatcaaaaaaatgttaaacaaaaagcattgtattgccgtaatcgattctaacccgggccaggaggagtctgacccaaggtataaaagaaatatctgctccgtgaagtacagcgtgaagaaaattaatcatacagcctccgaaaacgaggagttcaacaagggtgaatctacttctcagaaggtagcggacagaacaaagtcggaaaacggcttgcaaaacgagtcactctcttcaacccatcacactgatggcctgagcaaaattaggctcaactactctgatgaaagcccagaggcggggaagatgcttgaggacgaacttgtcgatttctcagaggaccaggacaatcaggacgattcttccgatgatggttttctggccgatgacaactgcagctctgagatcggccagtggcacctaaagccaactatatgtaagcagccttgtatactgttaatggattccctgaggggtccatcacggtctaatgttgtgaagatcctgcgggagtatctggaggtggaatgggaggtgaaaaaggggtcaaaacggtcattttcgaaggacgtgatgaagggctccaaccccaaggtgccacagcaaaacaatttttctgattgcggagtgtacgtgctgcaatatgtggagtcgtttttcgaaaatcctatactgtcttttgaactgcctatgaatctggccaattggttccccccacccaggatgcggaccaaacgtgaagaaatacgaaatattattcttaaactgcaggaggatcagtccaaagagaagcgaaagcataaggacacttactccaccgaagccccattgggtgagggcaccgaacaatacgttaattcaattagtgattag

SEQ ID NO: 187394 - DNA, 3339 bp, Artificial Sequence
  derived and/or modified sequence
atggccgccggcaagagcggcggcagcgccggcgagatcaccttcctagaggcacttgcacgctccgagagtaagagagacggtggctttaagaataattggtcctttgatcacgaagaggaatccgaaggagataccgataaggacgggacgaacctgttatccgtggatgaggacgaagactctgagacctccaagggtaaaaagctgaaccgccgttccgaaattgtcgccaacagcagtggagaatttattctcaagacatacgtgcggcgcaataagagtgagtccttcaagacccttaaaggcaaccctatcggcctgaacatgctgagtaacaacaaaaaattgagcgagaacacgcagaacacttccctctgtagcgggaccgtggtccatggcagacggttccatcacgcgcacgcccagatacctgtggttaagaccgccgcccagtccagcttggatagaaaggaaaggaaagagtatccaccccacgtgcagaaagtggagatcaaccccgtgagattatctagactgcagggagtcgagcgtatcatgaaaaagaccgaggaatcagagtctcaagtagaacctgagataaaacggaaggtccaacaaaaacggcactgtagcacctaccaacccactccccccctgagtcctgcaagtaaaaagtgcctgacccatctggaggacctgcagcgcaactgccgacaggccattaccttaaacgagtccaccggccccctattgcgaacaagcatccatcagaattccggcggccaaaaatctcagaatacaggcctgaccacaaaaaagttctatggcaacaatgtggaaaaagtgcctatcgatataattgttaactgcgacgactctaagcacacatatctgcaaacaaatggcaaggtgattctgcccggtgcaaaaattccgaaaatcaccaacctgaaggaaaggaaaactagtctgtctgacttgaacgaccctataatcctctcatcagatgacgacgacgacaatgatcgaaccaaccgccgtgaatcaatctcccctcaacctgccgacagcgcgtgtagcagcccggcgccgtcaaccggaaaggtggaggccgcactcaacgagaatacgtgccgggccgagcgcgagctgagatcaatcccggaggactccgaacttaatactgtcacgctgcctcggaaagcccggatgaaggaccagtttggcaactcgatcatcaataccccactgaagcgccggaaagtgttctctcaggagccacccgatgcacttgcgctcagttgccagagctcctttgattccgtgatcctgaattgcagatcaatccgcgtggggacattgttccggctgcttattgaacctgttattttttgcctcgacttcattaagatccaattggacgagcctgatcatgacccagtggagatcatcctgaacacatcagatctcaccaagtgtgaatggtgtaatgttaggaagctcccggttgtcttcctgcaggccattcctgctgtgtatcagaaactcagcatccagctgcagatgaacaaggaagataaagtctggaatgactgtaagggtgtcaacaagctcacaaacctggaagagcagtacataatcttgatcttccagaacggcttggaccctcctgccaacatggttttcgaatccatcattaacgaaattgggattaaaaataatattagcaacttctttgctaaaatccccttcgaggaggctaacggccgcctcgtggcatgtactcgcacatacgaggaaagcataaaagggtcatgtgggcaaaaagagaataagatcaaaaccgtctccttcgagtctaaaatacagcttagaagcaaacaggaattccagttcttcgacgaggaggaagagacaggcgaaaatcataccatattcattggtcccgtagaaaagctgatcgtttatcctccacccccggcaaaagggggtatcagtgtaacaaacgaggacctacactgcctgaacgagggcgagtttctgaatgacgtgattattgatttctacctaaagtatctggtcctcgagaagctaaaaaaagaagacgccgaccggattcacatctttagctcctttttctacaagagactgaatcagagggagcggcgaaatcacgaaactacgaacctaagtattcagcagaaacgacatgggagagttaaaacctggacccggcacgtggacatcttcgagaaagacttcatctttgtgcccctgaacgaggcagcacactggttcttggccgtggtgtgtttcccaggcctagagaaaccaaagtacgaacccaaccctcactatcatgagaacgcagtaattcagaagtgcagcacagtggaggacagctgtataagcagtagcgcatctgaaatggagtcatgttcccaaaacagctccgctaagcctgtgatcaagaagatgttaaacaaaaagcattgcatcgcggtgattgactcgaacccaggccaggaggagtctgaccctaggtataagagaaacatctgttccgtcaaatattcagtgaagaagatcaaccataccgcgtccgaaaatgaagagttcaacaagggagaaagcacctcccagaaggtggctgatagaaccaaatctgaaaacggactccagaacgagtccctctcctctacacatcacacagacgggttgagcaaaattcggctgaattacagtgacgagtctcctgaagccggtaagatgctggaagatgagctggtcgatttctccgaagaccaagataatcaagatgactcgagtgatgacggttttctagcagatgacaattgctctagtgaaattggacaatggcacctcaagcccactatctgtaaacagccatgcattctcctgatggacagcctgcgaggcccatctcgatccaatgtggttaagattcttagagagtatctcgaagtggaatgggaagtgaaaaagggcagcaagcgatccttcagcaaagatgtgatgaaaggttcaaatccaaaagtgcctcagcaaaataacttttccgattgcggggtgtatgtgctgcaatatgttgaaagcttcttcgagaaccccatcctgtccttcgagctgcccatgaacctggccaattggtttccacctccaaggatgcgcaccaaacgcgaggagatccgtaatattattttaaagctccaggaagatcagtctaaagagaagcgtaagcataaagatacttactccacagaagcccccctgggggaggggacagaacagtacgtaaacagtatctctgattag

SEQ ID NO: 187395 - DNA, 3339 bp, Artificial Sequence
  derived and/or modified sequence
atggctgctggaaagtccggtggctcagcaggtgagatcaccttcctagaggcactggcacggagcgagtcaaaaagggacggcggatttaagaataattggagcttcgatcatgaagaggagtctgaaggggatacagataaggatggaaccaatttactttccgtggacgaggacgaggacagcgagacatcaaagggcaaaaaactcaacagaaggagtgaaattgttgccaactcaagcggcgaatttattctgaagacttacgtccgccgaaataaatcggaatccttcaaaacccttaagggcaacccaatcggcctgaatatgttgagcaataataaaaaacttagcgagaatacccagaacacatctttatgctccggcacagtggtgcatggtagacgcttccaccatgcgcacgcacaaatccctgtggtgaagactgctgcccagaggctcctatctaaccagattctgaaagagtacccgccacacgtgcagaaagtggaaatcaaccccgtacgactgagtcggttgcagggtgttgagaggatcatgaagaaaactgaggagtccgaatcacaggtcgagcccgaaatcaaacgcaaagtccagcagaagcgacactgttctacttaccaaccaaccccaccactgtcacccgcttccaagaaatgcctaacgcacctcgaagatcttcagcgtaattgtcgccaagcgatcactctgaacgagagcaccggtccccttttgcgcacaagcatccaccaaaacagtggtggccagaagagccaaaacactggtctgacaacaaagaaattttatggcaataacgtagaaaaggtgccgattgatatcatcgtcaattgcgatgactcaaaacatacctatctccagaccaacggcaaggtgatactcccaggcgctaagatccccaagattaccaacctgaaagagcgcaagacttccctgtccgacctgaatgatcctatcattctgtcatctgatgacgatgatgataacgacaggaccaaccgcagggaaagtatttcgccccagccagccgattccgcctgctctagccccgctccatcaacaggcaaagtggaagctgccctgaacgaaaatacatgtagagcagagagggagcttcgctctatcccagaggactctgagctgaatacagtcaccctccctcgaaaggcaagaatgaaagaccagtttggaaattccatcattaacaccccgctaaaacggcgaaaagtgttttcccaggagcctcccgacgccctagcgctcagctgccagtcatcctttgattccgttatcctgaattgcagaagcatccgcgtaggtaccttatttagactgctgatcgagccagtgattttttgtctagattttatcaagatccaactagacgagccagaccacgaccccgttgaaataatcttaaacaccagcgacctgacaaagtgcgagtggtgcaacgttaggaagcttccagtggtcttcctgcaggctattcctgctgtgtaccagaagttgagcatacagctgcagatgaataaagaggacaaggtctggaatgattgtaagggggttaataagctgaccaatttggaagagcagtatatcattctgatttttcagaatggcctggaccctcccgctaacatggtatttgagtccatcattaatgagataggcatcaaaaataacatttcaaacttctttgcgaaaataccattcgaggaggctaacggacggcttgtagcttgcaccagaacatatgaggaatcaatcaagggctcgtgtggacagaaggaaaacaagatcaaaactgtttcctttgagagcaaaatccagctgcgatccaagcaagaatttcaattttttgacgaggaggaggagacgggcgagaaccacacaatttttattggccctgtggagaagctgatcgtgtacccccctcccccagccaaagggggaatcagcgtaaccaacgaagatctgcattgtctgaatgagggtgaattcttgaatgatgtgatcatcgacttttacctgaaatacctggtcctcgagaagctgaaaaaggaggacgctgatcgaattcacattttcagctcattcttttacaaacgtttgaaccagagggaacgccgtaatcatgaaacaacaaatttgtctattcaacagaagcgacatgggagggtcaagacctggacccgacatgtagatatttttgaaaaggactttatcttcgttcctctcaatgaggccgcacattggtttctcgcggttgtctgttttcccggacttgagaagcccaaatatgagcccaatccacactatcatgaaaatgcagttattcagaagtgcagtactgttgaagatagctgcatttcttcttctgcatcggaaatggaaagttgctcacagaacagcagcgccaaacccgtgattaagaagatgctcaacaaaaagcattgtatcgccgtgattgactccaacccaggccaggaggagagcgacccacgctacaaaaggaacatatgctctgtgaagtactcagtgaagaagattaatcacaccgccagcgagaacgaggaattcaataagggtgagagtacctcccagaaggtggccgacaggactaaatcagagaacggactgcagaatgaatcattgtcctctactcatcacaccgacggtctttctaagatccgtctcaattatagtgacgagtctccagaggccggtaagatgctggaggatgagcttgttgacttctctgaagatcaagataatcaggacgacagcagcgatgatggcttcctggccgacgataattgctcctctgaaattggacaatggcatctcaaaccgacaatttgcaaacagccctgtatcctgctcatggactcgctcaggggaccgagtagatctaatgtggttaaaattcttagagaatacctggaagtggagtgggaggtgaagaaggggtccaaacgctcgttctctaaagatgtgatgaaagggtccaacccaaaagtgccccagcagaacaatttctctgactgcggagtctacgtactacagtacgtagagtccttttttgagaatccaatcctctcatttgagttacctatgaatttggcgaactggttcccccctcctcggatgaggaccaaaagagaggaaataaggaacatcattttaaagttacaagaagatcagtccaaggaaaagaggaaacacaaggacacctactcgactgaagctcctctgggagaggggacagagcagtacgtcaatagtatttctgactag

SEQ ID NO: 187396 - DNA, 3339 bp, Artificial Sequence
  derived and/or modified sequence
atggccgcaggcaaaagcggcggatcagcaggggaaattacattcttagaggccctcgctaggtctgagtcaaagagggacggtggatttaagaacaattggtcctttgatcacgaggaagagtcagagggggatactgacaaggacggaaccaatctgttaagcgtggatgaagatgaggattctgaaacttctaagggcaaaaagctaaatagacggtcagaaatcgtggctaactcgtccggtgagttcatcctaaagacctacgttcggaggaacaagagcgaatcattcaagactttgaagggaaaccctatcggcctgaatatgctgtcaaacaataaaaagttgtccgaaaacactcagaatacttctctgtgctcaggcacagtggtccatggcaggcgattccatcatgcccacgcacagatccccgtggttaaaactgcggctcaatcatccctggataggaaggagagaaaggagtaccctcctcacgttcagaaggtggagatcaatcccgttcggctttcacggctgcaaggtgtggagcggattatgaagaagacggaggagagcgagtctcaagtcgagcccgagataaagcgaaaggttcagcagaagcggcattgttctacctatcaaccaacacccccattgagtccagctagcaaaaagtgtctcacccacctcgaggatctccagagaaactgccgccaggcgatcactttgaacgaatccacaggccctttattaaggacatccatccatcagaactcaggtggacagaagagccagaacaccgggctaacaacaaagaagttctatggcaataacgtggagaaggtgccgatcgacatcatcgtcaattgcgatgattcaaagcatacatacctgcagactaatggcaaagtcattctacctggggcaaagataccaaagataacaaacctcaaagagcggaagacaagcctgagcgacctcaatgatcccattatcttgagctctgacgatgatgacgataatgacagaacaaacagacgggagagcatttctccacagccggctgattctgcctgctcatcgcctgcaccatctaccggaaaagtcgaggcagctctgaatgagaatacatgccgcgctgagagggagctccggtccattcccgaggattccgaactcaacacagttacgcttcctagaaaggctaggatgaaagatcaattcggcaactcaatcatcaacactcccttaaaacggcgaaaggtgttcagtcaggaaccgcctgacgcgttggcactcagctgccagagctcatttgactctgtaattttaaactgtcggtccataagggtgggaactctgtttcgactactgattgagcccgtgatattctgcctcgacttcattaagattcagctggatgaacccgaccatgaccccgtggaaatcattctgaatacatcggatctgacgaagtgtgaatggtgcaatgtgagaaagctccccgtagtgttcctgcaggctattcccgcagtgtatcagaaattgagcatccaacttcaaatgaataaggaggacaaagtgtggaacgattgtaaaggggtgaacaaactgaccaaccttgaggaacagtatatcattctgatctttcaaaatggcttagacccaccagcgaacatggtctttgagtctattatcaacgagatcgggatcaagaacaacattagcaatttctttgccaaaattccttttgaagaagccaacggaagattagttgcctgtacaagaacatatgaggaatccattaaaggatcttgcgggcagaaagaaaacaagatcaaaaccgtgtcattcgagagcaaaatccagcttcggtcaaaacaagaattccagttttttgacgaagaagaggaaacaggcgagaatcataccatctttataggccctgtcgagaagttaatcgtttatccaccacctcctgccaagggagggatttcagtaaccaacgaagacctgcattgtctgaacgagggcgagttcctgaacgacgtgataatcgatttttatttaaagtaccttgtgctggaaaaacttaaaaaggaggatgccgaccgcattcatatattctcgtccttcttttacaagcggctgaatcagagggaacgccgaaatcatgagaccacaaatctttctatacagcagaaaagacacggtagggtgaagacctggaccaggcatgtggacatattcgaaaaagattttatatttgtgcccctgaacgaagcagctcattggttcctggcagtcgtctgttttcccggtctcgagaaaccaaaatacgaaccaaatccccactatcacgagaatgcagtgatccagaaatgtagcactgtggaagacagttgcatcagcagctctgcttctgagatggaatcctgctcacagaactcttctgctaagccagtcattaaaaaaatgctgaataagaagcactgcatcgcggttattgacagtaacccagggcaggaagaatccgacccacgatacaaacgaaatatctgctctgtcaaatactccgtcaagaaaattaatcacacagctagcgagaatgaagaattcaataagggggagtcgacctcgcaaaaggtcgctgaccgcacaaaatcagagaacggacttcagaacgagtctctgagttccacccatcacacggacggactctcgaaaatccgtttgaactattcagatgaatctcccgaggccggtaaaatgctcgaggacgaactggttgactttagtgaagatcaggacaaccaggatgattccagcgacgacggttttctcgccgacgacaattgcagtagcgagatcggtcaatggcacctgaagcctaccatctgcaagcagccgtgtattctgctcatggattcattgagaggtccttcccgctccaacgtggtgaagatactccgggaatacttggaggtagaatgggaggttaaaaagggatctaaacggagtttcagcaaggatgtgatgaaaggatccaatcccaaggtcccccaacagaacaatttcagcgattgtggggtttacgtgttgcaatacgtcgagtctttcttcgagaacccaatcttgtcattcgagctgcccatgaacctagccaactggttcccgcctccacgcatgcgtacaaaacgggaggagatcagaaatataattctgaagctgcaggaagaccagtccaaagaaaaacgtaaacataaagacacctattcaactgaggcccctcttggggagggaacagaacagtacgtaaattcaatctcggattag

SEQ ID NO: 187397 - DNA, 6645 bp, Artificial Sequence
  derived and/or modified sequence
cgaccgacgcgaggcggtggcagaggagacccacccctgtccacatggacagtcgcaaaggcctccgctgatgcattcacgcctgggcggggtgggcggacggccgtagcggcggcggctgcagaacgagctaggggcctgggggcgcctgacggtcgcagagacctcgccgctccggcgcggcgggtgcggccattttacggcctgggacgaagggaggcgtgtttgtgtgctcgctttcattctcctttcttgggaacccacggctgggggaagtttctcaggcagcctgggtgggcggtggatggggagtcgtgggccgagaggaaccgggcccgggaagcgccgtcgtcgtcgtcgccggtcgcgttcccccggagaggcctgagaagctcgggccgcgggcctcgctgcccgccagcccgcggacaggcccgggcgcgcctggcctgcctttgtataggcccgtctgaacgtgggagcgcagcccgcctgacggctgagcccgaggcccgcaaccctgcggcgtctaccctcctccggcgcggcccctcatcccggcgagcacggcggcggtgtgggccatggattaagaaggaggcggcgtgggaggaggaagatggcggccggcaagagcggcggtagcgcaggggagattacttttctggaagctttggctagatcagagtctaagagagatggaggttttaaaaataattggagctttgatcatgaagaagaaagtgaaggagatacagataaagatgggacaaatctgctcagtgtggatgaagatgaggattctgaaacctcaaaaggaaaaaagttaaatcgtcgatctgaaattgttgctaatagctctggtgaattcatcttgaagacatatgtaagacgaaacaagtctgaaagttttaaaactttgaaaggcaacccaattggacttaacatgttgagcaacaataagaaattgagtgaaaatacgcaaaatacgtcattatgttctggaactgtagttcatggtagacgttttcatcatgctcatgcacagataccagtagtaaaaacagcagcccaaaggcttttgagtaatcagattctgaaagaatacccacctcatgtccaaaaagttgaaattaatcctgtaaggttaagtcggctccaaggtgttgaacgtataatgaagaaaacagaagagtccgaatcacaagtggagcctgaaattaagaggaaagtacaacagaaacgacactgtagtacctatcagcctactcctcctctatctcctgcttcaaaaaaatgtttaacccatttagaggatttgcaaagaaattgcagacaagctattactttgaatgagtctactggaccattattaagaacgtcaattcatcagaattctggaggacagaagtcacaaaacacaggattaacaaccaagaagttttatggcaacaatgtggaaaaggttccaattgatattattgtgaattgtgatgacagtaaacacacttatttacagactaatggaaaagtcattttacctggggcaaaaatacccaaaatcacaaacttgaaagaaaggaaaacaagtttgtcagacctaaatgatccaatcattttgtccagtgatgatgatgatgacaacgacagaactaacagaagagaaagcatatctcctcagcctgctgattcagcatgttcttcccctgcaccatccactggaaaagtagaagcagcgctaaatgaaaatacttgcagagcagagcgtgaactacgaagcattccagaagactcagagttaaatacagttacattgccaagaaaagcaagaatgaaagaccagtttggcaattctattatcaacacacctctgaaacgtcgtaaagtgttttctcaagaacctccagatgctttagctttaagctgccaaagttcctttgacagtgtcattttaaactgtcgaagtatacgagtaggaacactcttccggctgttaatagagcctgtaattttttgtttagattttatcaagatacagctagacgaaccagaccatgatcctgtagagattatattaaatacctctgatctaactaaatgtgaatggtgtaatgtccgaaaattacctgtagtgtttcttcaagcaattccagcagtttatcaaaagctgagcatccaactgcaaatgaataaggaggataaagtttggaatgattgtaaaggagtaaataaattaacaaatttagaagaacaatatataattttaatttttcaaaatggccttgatcctccggcaaatatggtatttgaaagtatcattaatgaaattggtataaagaataacatctccaatttttttgcgaaaattccctttgaagaagctaatggcagacttgttgcctgtacaagaacctatgaagagagcatcaaaggaagttgtgggcaaaaggaaaacaaaattaaaactgtatcatttgaatctaaaatacaacttagaagcaaacaagaatttcagttttttgatgaagaagaagaaactggagaaaaccacaccatcttcattggcccagtagaaaagttgatagtatatccaccacctccagctaagggaggcatctctgttaccaatgaggacctgcactgtctaaatgaaggagaatttttaaatgatgttattatagacttttatttgaaatacttggtgcttgaaaaactgaagaaggaagacgctgaccgaattcatatattcagttcttttttctataaacgccttaatcagagagagaggagaaatcatgaaacaactaatctgtcaatacagcaaaaacggcatgggagagtaaaaacatggacccggcacgtagatatttttgagaaggattttatttttgtaccccttaatgaagctgcacactggtttttggctgttgtttgtttccccggtttggaaaaaccaaagtatgaacctaatcctcattaccatgaaaatgctgtcatacagaaatgttcaactgtagaggacagttgtatttcttcttcagccagtgaaatggagagttgttcacaaaactcttctgccaagcctgtaattaagaagatgctaaacaaaaaacattgcatagctgtaattgattccaatcctgggcaggaagaaagtgaccctcgttataagagaaacatatgcagtgtaaaatacagtgtgaaaaaaataaatcatactgcgagtgaaaatgaagaattcaataaaggagaatctacatcccagaaagttgctgataggactaaaagtgagaatggcctacagaatgaaagtttaagttccacacatcatacagatggcttaagcaaaatcagactaaactatagcgatgaatcacctgaagctggtaaaatgcttgaagatgaactcgtcgacttctcagaagatcaggataaccaggatgatagcagtgacgatggattcctcgctgatgacaactgcagttcagaaataggacagtggcatttaaagcctactatctgtaaacaaccttgtatcctacttatggactcactccgaggcccttctcggtcaaatgttgtcaaaattttaagagagtatttagaagtggaatgggaagttaaaaaaggaagcaaaagaagtttttccaaagatgttatgaagggctctaatccaaaagtaccacagcaaaacaacttcagtgactgtggtgtatatgtattgcagtatgtagagagcttttttgagaatccaattctcagttttgaactacctatgaatttggcaaactggtttcctccaccaagaatgagaacaaaaagagaagaaatccgaaacataattctgaagctacaggaagatcagagcaaagagaaaagaaagcataaggacacttactcaacagaagcacctttaggcgaaggaacagaacaatatgtcaatagtatctcagattgaccatttctgttacttgtcatttctactttcagaaactaaatgactttcaaatttgggtatagacaataaagaactgaagtgctcactactcagtgatttggaaattttgatgcttgtataaatgtcagataattaatttccaaaggcgtatgtattaagtaaaagtctgtaaatatgttaatgaggccaatttttccagcatttataattatttttttcacttgttaggaagcttttgttatgtattttctgttaatagtacctaaaattgcaacttctaaacacaaataaaaagaaaatatttataggaggaaatgattaatttgatattctttagtgaacttgtttaattcctcagtgggtgtgacatatttcatgggaatattcaaatatctatggtaatattttgaccctttatatttgttctaaaataagtcaaaatgtgaaaataatattaaatctaagatattttgaactaagcatctttatatgcttgtgtaacaggaacaaagtaacagcctttcaattcatatactgccttgtgttcagtgaacccaagaaatgtaataaatatttgtaattttacacaaatatttaagaggaaagagtattaagagcaattcaaaaaaagtaaccttatactactaaaaaaaaaattcttgcatatattatcatcaaatgcatttttgaagacatcaaagactcaggttaaaactattttggtaagtgcagcttgaatttcaaatatcccgtgttacctttctctattacagcttaaagtatgctacaatctgtgtcatatagttaattgataagcatttttaatctgtgtaaacacaggaatttaaataggaatttactatttttttataaagcttttgctattttttcattgctcattttgttcttattattttgataaagtatcagactttttgcttgagttcttcagtgtaaattattttttacatgtaaaagtactgtattcaaccagttgcataatacagcaaaaatctttgaattcccctttaaaataactaaaatttgatggtttccatgacagatttatagcacatatagggatcttgcatgtatctgcagaaacttcattatttttcaaatgaaatggtgtatacttctttcaaatgaactttgagacttgaaacatattttagtcattttttgttaaatattgaatttttaaatacacatatatcaaaaatagttgagaataaaaagaaagcctaatcatcagcaattattttatttttaatttggccatctctgacattgcagtcaatatcttagggtattttcttgaatttaataaagtcccatgggtgggttcagggtgaatgggagtattaacaacaaccaaaaaatatctattgagacacagtagagtctcagtaagagaaatattaaaatgtaagaaaggtcaccattagtgatatcaactgtagtttgttactttgaactatatttctgattaactctttatagtaataacttagagctgttagctcagatatcttaattagctcatatgaaaaacaagtttaattttattatttactgaacatggcaaaatgcttttcaatctataataaaactgggataaaaaattgaagttgttttttttaaaacctaatagcaataagcaaaattggcatacataatttttttaatgaactatattttgtcagaatctgaaggtactgaaaaactattctaaaatgcctacttgtttttgcattaatttgtaatgcttacattttgcacccttagataatgtttgataagataaaaatataatttatcccttgtaccaactcaagtcaatcagattttaacatgaaaaatatagattaatgtatgtcagctttctagaggtagaatactcagctatttgatggcatttttcccaccccatgtgaaattttatttttggaagttatgctagtgacattgcaatatatattgaaatcttcggaggctgccaggttgagcttcaaaactagacttgagaatctttcgtgtatatgcacattcacttgataattgtgtattctatgtagtttaaagtgggatcaagccttttaaaatgtgttattagtacttagaagttgtaaaacagaacttatagaggtttgttactagacactgaaactgcatgacaagtatctggtgtcttaactaattagatagatctgttgtattggttttcttgttggatagaataacagttaatcatttttagaagagttttagattacttgccataaaatttgtatgtctcagctcttgttggtttaggagcagaagtggtgtttagtcccttcccgttaatgttgctgtgctacttcagacagctgaaaacttaatggtattatttcaagttcacataaccctaaaaaaggttttctttgtgtagtaacttgtgcttaaacttttagtcaattaaatgtaggaggttttatttgaaaacataaaatgattctctaaattacatcttgttttaagccaccaaaatgaatgcagtaatttttctttaaaaaaatgatctctgaaaactgtgagacaatgtaaaaagaataagttttaattcccccaaaatcaaaaattgtacttaaaatctcagacaattcactgaacaggaataataaagaacatattttaatatataa

SEQ ID NO: 187398 - DNA, 6501 bp, Artificial Sequence
  derived and/or modified sequence
ggggcgcctgacggtcgcagagacctcgccgctccggcgcggcgggtgcggccattttacggcctgggacgaagggaggcgtgtttgtgtgctcgctttcattctcctttcttgggaacccacggctgggggaagtttctcaggcagcctgggtgggcggtggatggggagtcgtgggccgagaggaaccgggcccgggaagcgccgtcgtcgtcgtcgccggtcgcgttcccccggagaggcctgagaagctcgggccgcgggcctcgctgcccgccagcccgcggacaggcccgggcgcgcctggcctgcctttgtataggcccgtctgaacgtgggagcgcagcccgcctgacggctgagcccgaggcccgcaaccctgcggcgtctaccctcctccggcgcggcccctcatcccggcgagcacggcggcggtgtgggccatggattaagaaggaggcggcgtgggaggaggaagatggcggccggcaagagcggcggtagcgcaggggagattacttttctggaagctttggctagatcagagtctaagagagatggaggttttaaaaataattggagctttgatcatgaagaagaaagtgaaggagatacagataaagatgggacaaatctgctcagtgtggatgaagatgaggattctgaaacctcaaaaggaaaaaagttaaatcgtcgatctgaaattgttgctaatagctctggtgaattcatcttgaagacatatgtaagacgaaacaagtctgaaagttttaaaactttgaaaggcaacccaattggacttaacatgttgagcaacaataagaaattgagtgaaaatacgcaaaatacgtcattatgttctggaactgtagttcatggtagacgttttcatcatgctcatgcacagataccagtagtaaaaacagcagcccaaagcagtctggaccgaaaagaaaggaaagaatacccacctcatgtccaaaaagttgaaattaatcctgtaaggttaagtcggctccaaggtgttgaacgtataatgaagaaaacagaagagtccgaatcacaagtggagcctgaaattaagaggaaagtacaacagaaacgacactgtagtacctatcagcctactcctcctctatctcctgcttcaaaaaaatgtttaacccatttagaggatttgcaaagaaattgcagacaagctattactttgaatgagtctactggaccattattaagaacgtcaattcatcagaattctggaggacagaagtcacaaaacacaggattaacaaccaagaagttttatggcaacaatgtggaaaaggttccaattgatattattgtgaattgtgatgacagtaaacacacttatttacagactaatggaaaagtcattttacctggggcaaaaatacccaaaatcacaaacttgaaagaaaggaaaacaagtttgtcagacctaaatgatccaatcattttgtccagtgatgatgatgatgacaacgacagaactaacagaagagaaagcatatctcctcagcctgctgattcagcatgttcttcccctgcaccatccactggaaaagtagaagcagcgctaaatgaaaatacttgcagagcagagcgtgaactacgaagcattccagaagactcagagttaaatacagttacattgccaagaaaagcaagaatgaaagaccagtttggcaattctattatcaacacacctctgaaacgtcgtaaagtgttttctcaagaacctccagatgctttagctttaagctgccaaagttcctttgacagtgtcattttaaactgtcgaagtatacgagtaggaacactcttccggctgttaatagagcctgtaattttttgtttagattttatcaagatacagctagacgaaccagaccatgatcctgtagagattatattaaatacctctgatctaactaaatgtgaatggtgtaatgtccgaaaattacctgtagtgtttcttcaagcaattccagcagtttatcaaaagctgagcatccaactgcaaatgaataaggaggataaagtttggaatgattgtaaaggagtaaataaattaacaaatttagaagaacaatatataattttaatttttcaaaatggccttgatcctccggcaaatatggtatttgaaagtatcattaatgaaattggtataaagaataacatctccaatttttttgcgaaaattccctttgaagaagctaatggcagacttgttgcctgtacaagaacctatgaagagagcatcaaaggaagttgtgggcaaaaggaaaacaaaattaaaactgtatcatttgaatctaaaatacaacttagaagcaaacaagaatttcagttttttgatgaagaagaagaaactggagaaaaccacaccatcttcattggcccagtagaaaagttgatagtatatccaccacctccagctaagggaggcatctctgttaccaatgaggacctgcactgtctaaatgaaggagaatttttaaatgatgttattatagacttttatttgaaatacttggtgcttgaaaaactgaagaaggaagacgctgaccgaattcatatattcagttcttttttctataaacgccttaatcagagagagaggagaaatcatgaaacaactaatctgtcaatacagcaaaaacggcatgggagagtaaaaacatggacccggcacgtagatatttttgagaaggattttatttttgtaccccttaatgaagctgcacactggtttttggctgttgtttgtttccccggtttggaaaaaccaaagtatgaacctaatcctcattaccatgaaaatgctgtcatacagaaatgttcaactgtagaggacagttgtatttcttcttcagccagtgaaatggagagttgttcacaaaactcttctgccaagcctgtaattaagaagatgctaaacaaaaaacattgcatagctgtaattgattccaatcctgggcaggaagaaagtgaccctcgttataagagaaacatatgcagtgtaaaatacagtgtgaaaaaaataaatcatactgcgagtgaaaatgaagaattcaataaaggagaatctacatcccagaaagttgctgataggactaaaagtgagaatggcctacagaatgaaagtttaagttccacacatcatacagatggcttaagcaaaatcagactaaactatagcgatgaatcacctgaagctggtaaaatgcttgaagatgaactcgtcgacttctcagaagatcaggataaccaggatgatagcagtgacgatggattcctcgctgatgacaactgcagttcagaaataggacagtggcatttaaagcctactatctgtaaacaaccttgtatcctacttatggactcactccgaggcccttctcggtcaaatgttgtcaaaattttaagagagtatttagaagtggaatgggaagttaaaaaaggaagcaaaagaagtttttccaaagatgttatgaagggctctaatccaaaagtaccacagcaaaacaacttcagtgactgtggtgtatatgtattgcagtatgtagagagcttttttgagaatccaattctcagttttgaactacctatgaatttggcaaactggtttcctccaccaagaatgagaacaaaaagagaagaaatccgaaacataattctgaagctacaggaagatcagagcaaagagaaaagaaagcataaggacacttactcaacagaagcacctttaggcgaaggaacagaacaatatgtcaatagtatctcagattgaccatttctgttacttgtcatttctactttcagaaactaaatgactttcaaatttgggtatagacaataaagaactgaagtgctcactactcagtgatttggaaattttgatgcttgtataaatgtcagataattaatttccaaaggcgtatgtattaagtaaaagtctgtaaatatgttaatgaggccaatttttccagcatttataattatttttttcacttgttaggaagcttttgttatgtattttctgttaatagtacctaaaattgcaacttctaaacacaaataaaaagaaaatatttataggaggaaatgattaatttgatattctttagtgaacttgtttaattcctcagtgggtgtgacatatttcatgggaatattcaaatatctatggtaatattttgaccctttatatttgttctaaaataagtcaaaatgtgaaaataatattaaatctaagatattttgaactaagcatctttatatgcttgtgtaacaggaacaaagtaacagcctttcaattcatatactgccttgtgttcagtgaacccaagaaatgtaataaatatttgtaattttacacaaatatttaagaggaaagagtattaagagcaattcaaaaaaagtaaccttatactactaaaaaaaaaattcttgcatatattatcatcaaatgcatttttgaagacatcaaagactcaggttaaaactattttggtaagtgcagcttgaatttcaaatatcccgtgttacctttctctattacagcttaaagtatgctacaatctgtgtcatatagttaattgataagcatttttaatctgtgtaaacacaggaatttaaataggaatttactatttttttataaagcttttgctattttttcattgctcattttgttcttattattttgataaagtatcagactttttgcttgagttcttcagtgtaaattattttttacatgtaaaagtactgtattcaaccagttgcataatacagcaaaaatctttgaattcccctttaaaataactaaaatttgatggtttccatgacagatttatagcacatatagggatcttgcatgtatctgcagaaacttcattatttttcaaatgaaatggtgtatacttctttcaaatgaactttgagacttgaaacatattttagtcattttttgttaaatattgaatttttaaatacacatatatcaaaaatagttgagaataaaaagaaagcctaatcatcagcaattattttatttttaatttggccatctctgacattgcagtcaatatcttagggtattttcttgaatttaataaagtcccatgggtgggttcagggtgaatgggagtattaacaacaaccaaaaaatatctattgagacacagtagagtctcagtaagagaaatattaaaatgtaagaaaggtcaccattagtgatatcaactgtagtttgttactttgaactatatttctgattaactctttatagtaataacttagagctgttagctcagatatcttaattagctcatatgaaaaacaagtttaattttattatttactgaacatggcaaaatgcttttcaatctataataaaactgggataaaaaattgaagttgttttttttaaaacctaatagcaataagcaaaattggcatacataatttttttaatgaactatattttgtcagaatctgaaggtactgaaaaactattctaaaatgcctacttgtttttgcattaatttgtaatgcttacattttgcacccttagataatgtttgataagataaaaatataatttatcccttgtaccaactcaagtcaatcagattttaacatgaaaaatatagattaatgtatgtcagctttctagaggtagaatactcagctatttgatggcatttttcccaccccatgtgaaattttatttttggaagttatgctagtgacattgcaatatatattgaaatcttcggaggctgccaggttgagcttcaaaactagacttgagaatctttcgtgtatatgcacattcacttgataattgtgtattctatgtagtttaaagtgggatcaagccttttaaaatgtgttattagtacttagaagttgtaaaacagaacttatagaggtttgttactagacactgaaactgcatgacaagtatctggtgtcttaactaattagatagatctgttgtattggttttcttgttggatagaataacagttaatcatttttagaagagttttagattacttgccataaaatttgtatgtctcagctcttgttggtttaggagcagaagtggtgtttagtcccttcccgttaatgttgctgtgctacttcagacagctgaaaacttaatggtattatttcaagttcacataaccctaaaaaaggttttctttgtgtagtaacttgtgcttaaacttttagtcaattaaatgtaggaggttttatttgaaaacataaaatgattctctaaattacatcttgttttaagccaccaaaatgaatgcagtaatttttctttaaaaaaatgatctctgaaaactgtgagacaatgtaaaaagaataagttttaattcccccaaaatcaaaaattgtacttaaaatctcagacaattcactgaacaggaataataaagaacatattttaatata

SEQ ID NO: 187399 - protein, 957 aa, Artificial Sequence
  derived and/or modified sequence
MYGSARTITNLEGSPSRSPRLPRSPRLGHRRTSSGGGGGTGKTLSMENIQSLNAAYATSGPMYLSDHEGVASTTYPKGTMTLGRATNRAVYGGRVTAMGSSPNIASAGLSHTDVLSYTDQHGGLTGSSHHHHHQVPSMLRQVRDSTMLDLQAQLKELQRENDLLRKELDIKDSKLGSSMNSIKTFWSPELKKERVLRKEEAARMSVLKEQMRVSHEENQHLQLTIQALQDELRTQRDLNHLLQQESGNRGAEHFTIELTEENFRRLQAEHDRQAKELFLLRKTLEEMELRIETQKQTLNARDESIKKLLEMLQSKGLPSKSLEDDNERTRRMAEAESQVSHLEVILDQKEKENIHLREELHRRSQLQPEPAKTKALQTVIEMKDTKIASLERNIRDLEDEIQMLKANGVLNTEDREEEIKQIEVYKSHSKFMKTKIDQLKQELSKKESELLALQTKLETLSNQNSDCKQHIEVLKESLTAKEQRAAILQTEVDALRLRLEEKESFLNKKTKQLQDLTEEKGTLAGEIRDMKDMLEVKERKINVLQKKIENLQEQLRDKDKQLTNLKDRVKSLQTDSSNTDTALATLEEALSEKERIIERLKEQRERDDRERLEEIESFRKENKDLKEKVNALQAELTEKESSLIDLKEHASSLASAGLKRDSKLKSLEIAIEQKKEECSKLEAQLKKAHNIEDDSRMNPEFADQIKQLDKEASYYRDECGKAQAEVDRLLEILKEVENEKNDKDKKIAELESLTLRHMKDQNKKVANLKHNQQLEKKKNAQLLEEVRRREDSMADNSQHLQIEELMNALEKTRQELDATKARLASTQQSLAEKEAHLANLRIERRKQLEEILEMKQEALLAAISEKDANIALLELSASKKKKTQEEVMALKREKDRLVHQLKQQTQNRMKLMADNYDDDHHHYHHHHHHHHHRSPGRSQHSNHRPSPDQDDEEGIWA

SEQ ID NO: 187400 - DNA, 2874 bp, Artificial Sequence
  derived and/or modified sequence
atgtacggcagcgccagaaccatcaccaacctggagggcagccccagcagaagccccagactgcccagaagccccagactgggccacagaagaaccagcagcggcggcggcggcggcaccggcaagaccctgagcatggagaacatccagagcctgaacgccgcctacgccaccagcggccccatgtacctgagcgaccacgagggcgtggccagcaccacctaccccaagggcaccatgaccctgggcagagccaccaacagagccgtgtacggcggcagagtgaccgccatgggcagcagccccaacatcgccagcgccggcctgagccacaccgacgtgctgagctacaccgaccagcacggcggcctgaccggcagcagccaccaccaccaccaccaggtgcccagcatgctgagacaggtgagagacagcaccatgctggacctgcaggcccagctgaaggagctgcagagagagaacgacctgctgagaaaggagctggacatcaaggacagcaagctgggcagcagcatgaacagcatcaagaccttctggagccccgagctgaagaaggagagagtgctgagaaaggaggaggccgccagaatgagcgtgctgaaggagcagatgagagtgagccacgaggagaaccagcacctgcagctgaccatccaggccctgcaggacgagctgagaacccagagagacctgaaccacctgctgcagcaggagagcggcaacagaggcgccgagcacttcaccatcgagctgaccgaggagaacttcagaagactgcaggccgagcacgacagacaggccaaggagctgttcctgctgagaaagaccctggaggagatggagctgagaatcgagacccagaagcagaccctgaacgccagagacgagagcatcaagaagctgctggagatgctgcagagcaagggcctgcccagcaagagcctggaggacgacaacgagagaaccagaagaatggccgaggccgagagccaggtgagccacctggaggtgatcctggaccagaaggagaaggagaacatccacctgagagaggagctgcacagaagaagccagctgcagcccgagcccgccaagaccaaggccctgcagaccgtgatcgagatgaaggacaccaagatcgccagcctggagagaaacatcagagacctggaggacgagatccagatgctgaaggccaacggcgtgctgaacaccgaggacagagaggaggagatcaagcagatcgaggtgtacaagagccacagcaagttcatgaagaccaagatcgaccagctgaagcaggagctgagcaagaaggagagcgagctgctggccctgcagaccaagctggagaccctgagcaaccagaacagcgactgcaagcagcacatcgaggtgctgaaggagagcctgaccgccaaggagcagagagccgccatcctgcagaccgaggtggacgccctgagactgagactggaggagaaggagagcttcctgaacaagaagaccaagcagctgcaggacctgaccgaggagaagggcaccctggccggcgagatcagagacatgaaggacatgctggaggtgaaggagagaaagatcaacgtgctgcagaagaagatcgagaacctgcaggagcagctgagagacaaggacaagcagctgaccaacctgaaggacagagtgaagagcctgcagaccgacagcagcaacaccgacaccgccctggccaccctggaggaggccctgagcgagaaggagagaatcatcgagagactgaaggagcagagagagagagacgacagagagagactggaggagatcgagagcttcagaaaggagaacaaggacctgaaggagaaggtgaacgccctgcaggccgagctgaccgagaaggagagcagcctgatcgacctgaaggagcacgccagcagcctggccagcgccggcctgaagagagacagcaagctgaagagcctggagatcgccatcgagcagaagaaggaggagtgcagcaagctggaggcccagctgaagaaggcccacaacatcgaggacgacagcagaatgaaccccgagttcgccgaccagatcaagcagctggacaaggaggccagctactacagagacgagtgcggcaaggcccaggccgaggtggacagactgctggagatcctgaaggaggtggagaacgagaagaacgacaaggacaagaagatcgccgagctggagagcctgaccctgagacacatgaaggaccagaacaagaaggtggccaacctgaagcacaaccagcagctggagaagaagaagaacgcccagctgctggaggaggtgagaagaagagaggacagcatggccgacaacagccagcacctgcagatcgaggagctgatgaacgccctggagaagaccagacaggagctggacgccaccaaggccagactggccagcacccagcagagcctggccgagaaggaggcccacctggccaacctgagaatcgagagaagaaagcagctggaggagatcctggagatgaagcaggaggccctgctggccgccatcagcgagaaggacgccaacatcgccctgctggagctgagcgccagcaagaagaagaagacccaggaggaggtgatggccctgaagagagagaaggacagactggtgcaccagctgaagcagcagacccagaacagaatgaagctgatggccgacaactacgacgacgaccaccaccactaccaccaccaccaccaccaccaccaccacagaagccccggcagaagccagcacagcaaccacagacccagccccgaccaggacgacgaggagggcatctgggcctag

SEQ ID NO: 187401 - DNA, 3831 bp, Artificial Sequence
  derived and/or modified sequence
cggctcctgctcctcctggccgcccggggccaaggcgacgagaggttgtaaaaatccatgtgggacggccccggggcgagcatcggaaagatctctgagtggagttattttctggtacggactgtgaaaagaatgcggtgaaaattctggacaatcgtggaaatattagctcaaaccccaacttaatatagcatttcttctcttcagtaacacctcataatacaagaaaaatgtatggaagtgcaagaacaatcaccaatctggaaggtagcccttccagatcccctcgtttgccaaggtctcctcgtttgggccaccgaagaacaagtagtgggggaggtggaggaacaggcaagactctgtctatggagaatatccagtccctcaatgcagcctatgctacgtctggacccatgtatctgagtgatcatgaaggggtggcttcaacaacctacccaaagggcactatgactctgggaagggctacaaatcgagctgtatatggaggccgtgtcacagccatggggagtagtcccaatattgcttctgctggactttcccacacagatgtcctttcatacacagatcaacatggtgggctgactggctcatcccatcatcaccaccaccaggtcccctccatgttgaggcaggtaagagacagcacaatgttagatcttcaggcccagctgaaagaactgcagagagagaatgacctcctccggaaagagctagacatcaaggacagcaaattgggatcttccatgaacagtattaagactttctggagtcctgagcttaagaaggagagagtcttgaggaaagaagaggcagcgcggatgtctgtcctcaaggagcagatgagggtttcccatgaagaaaatcagcacctacagttgacaatccaggcccttcaagatgagctgcgaacccagagagacctcaaccacctcctccagcaagagagtggcaaccgaggagcggagcacttcaccatcgagctgaccgaggagaactttaggcggctccaagccgagcatgacaggcaggctaaggagctgttccttttgaggaagacattagaggaaatggagctgagaattgaaacgcagaaacaaaccctcaatgcccgagatgagtcaattaaaaaacttcttgagatgttgcaaagtaaaggcttgccatccaaaagcctggaggatgacaatgagcgaacgcggcggatggcagaggctgagtctcaggtcagccacttggaagtgattttagatcagaaagagaaggaaaacatacatcttagagaggaattgcaccgaagaagccaacttcagccggagccagccaagacgaaggctctccagactgtcatcgaaatgaaggacacaaaaatcgcttcattggaacgaaacataagggatcttgaggatgagatccagatgttaaaagccaatggtgtgctgaacactgaggaccgcgaagaagagatcaaacaaattgaggtttacaaaagtcactccaagtttatgaagaccaagattgatcagctgaagcaggaactttcaaagaaagagtcggaacttcttgccttacaaacaaagcttgaaaccctcagcaatcaaaattcagattgcaagcaacacattgaagtgctcaaagagtcacttactgccaaagaacagagggctgccatccttcagactgaggtagatgcgctgagattacgactggaagaaaaagaatctttcctcaataaaaaaacaaaacagctacaggacctcacagaagagaaggggacactggccggtgaaattcgtgacatgaaagatatgttagaagtgaaggaaagaaaaatcaatgttcttcagaaaaagattgaaaacttgcaagaacaacttagggataaagacaagcaactgaccaacctgaaagacagagtgaagtccttgcagacggattccagtaatacagatactgcactggcgacgctagaggaagctctgtcagagaaggagagaataattgagcgcttgaaagaacagcgagaaagagatgatcgggaaagactagaagagatagaatccttccgaaaagagaacaaagacctgaaagagaaggtcaatgctttacaggctgaactgactgagaaagagtctagtttaattgacctcaaagaacatgcatcttcattagcctctgcggggctgaaaagggattccaaattaaaatctctagaaatagccattgaacaaaagaaagaggaatgtagcaaattggaagcacagttaaaaaaggcacataatattgaagatgactccaggatgaaccctgagtttgcagaccaaataaaacagctcgataaagaggcgtcttactaccgcgacgagtgtggcaaggcccaagcggaagtggaccggttgctggagatcctcaaggaggtggagaatgagaagaatgacaaggacaagaagatcgcagaactggagagcttgactctcaggcatatgaaagatcagaataagaaggtggccaacctcaagcacaatcaacagttggaaaagaagaaaaatgctcagttactagaagaagtgcgcaggcgagaagacagcatggctgacaactcacagcatttgcagatagaggaactgatgaatgcactggagaagaccagacaggaactggatgccaccaaagcacgcctcgcctccacacaacagtccctggccgaaaaagaagcgcacttggccaacctccggattgagaggaggaaacagctggaggagatcctggagatgaaacaggaagcactacttgcagccatcagtgaaaaagatgcaaacattgccttgctggaattgtctgcctccaaaaagaaaaagacgcaggaagaagtcatggccctcaagcgggaaaaagaccgactagtacatcaattaaagcagcagacccagaacagaatgaagttgatggcagacaactatgatgatgaccatcaccattaccaccaccaccaccatcaccaccaccatcgatctcctgggaggtcgcaacattccaatcacaggccctctccggaccaggatgacgaggagggcatatgggcatagccgggcctgtaaaccaaagttccagttttgttttgagggatgatccagctctgtcggaggcacgtaggcacagccaaatctcatgctgtacattgatcacctgtccaacctttgcctagagtgggagcccccagttccttcgagatccaacattacctgtctgtaaagaagaagaggaggagggagacagcggggaggatccggtggcagtttaacaccagagcagctattagaagggctgaataaagggaacatgcagctctgcagcaatattctgataatgtattgcagtgcggctcacatcactgtccaccaccacctggagcggctcatcagaactgaaggggagttttcacttaccttattgagcgtgattctgttctacttgatatttccttcaccacctcatgtcatttctcatggatttggttatgatggaaaggaagaatgcagaggaggagaaaagtgacagatcctccatttttgttgggatgcgggcattttgaatgtgatcatctttgctgaatgtcattatttgataacattttgtttatgttacttaaacatcattggataaatttgaactccatgggattttatctgtggattcagcttctgttggacaactagcctcatctccagtatcctgctggttcactctaattggtcattcctaatgcattagattatcaaaaagtataaattcgctgtgagtgagtggtgttgg

SEQ ID NO: 187402 - DNA, 2874 bp, Artificial Sequence
  derived and/or modified sequence
atgtatggaagcgcacgcaccattaccaacttggagggcagtcccagtagatcccctcggctgcctcgcagtccaagactcgggcacagacgcacctcatccggcggaggtggagggacaggcaagaccctgagcatggagaatatccagagcctgaatgcagcttatgctacttctggcccaatgtatttatcagatcatgaaggcgtcgcctccactacataccccaaggggactatgactctcggcagagcaactaacagagctgtttatggcgggagagtgactgcaatgggctcttctcccaatatagccagcgcaggactgagccacacagatgtcttatcctacacagaccagcacggaggattgaccggaagttcgcatcaccatcaccatcaggttccttcaatgctgcgacaggtcagagattcgaccatgctggacctgcaggctcagcttaaagagctccagagggagaacgacttattgagaaaggagctggatatcaaggactccaaactcggtagtagcatgaacagcatcaagacattttggagcccagagttgaagaaagaaagagtgctaaggaaggaggaagccgctcggatgagcgtactgaaagagcagatgagggtgagtcacgaagagaatcaacacttacagctcactatccaggccctgcaggacgaactcaggacccaacgggacttaaatcacctgctccagcaggagagcgggaaccgcggtgcggagcacttcacgatcgaattgacagaagagaattttcgacgcctccaggctgagcatgaccggcaggctaaagagctattcctcctgaggaagaccttagaagagatggaactgaggatcgagacgcagaaacagactctgaacgctagagatgaaagcatcaagaagctgctggagatgctgcagtccaagggtctcccctctaagagcctcgaagatgacaacgaacgtactcggcgcatggcggaggcagagtcccaggtgtcccacctggaagtgatcctggatcagaaggaaaaggagaatatccacctccgagaagaattgcacaggcgctcccagttgcagcccgaacccgcgaagaccaaggccctgcagacagttatcgagatgaaggatactaagattgcatcgctggagcgaaacatacgcgatctggaggatgaaatccaaatgctgaaggcaaatggcgtcttgaacacagaagatagagaagaagagatcaagcagattgaggtgtataagagccactccaaattcatgaaaacaaaaatagaccagcttaagcaagaactcagcaagaaggaatctgaactccttgctctgcagaccaagctggagacattatcaaatcagaactcggattgtaaacagcacatcgaggtgctcaaggaaagcctaacggcaaaagagcagagggctgcaatccttcagactgaggtcgatgcactgaggttgagactcgaagagaaagaatcctttcttaataaaaaaaccaagcagctgcaggacctgaccgaggagaagggaacgctggccggagagattcgcgacatgaaagacatgctggaagttaaagagcgaaagatcaacgtgctgcagaaaaaaatcgaaaacctgcaagagcaattgcgggataaagacaaacagctgactaacctgaaagatcgtgtcaagagcctgcagactgactcctccaacaccgatactgccctagcaaccctggaagaagctctgtcagagaaagagcgtattatcgaacgcttaaaggaacagcgagaacgcgatgaccgcgagaggttggaagaaatagagagtttccgaaaggagaacaaggacctaaaggagaaagtgaatgccttgcaggcagaattgacagaaaaggaaagtagtcttattgacctgaaggaacatgcctcatcgctagccagcgcgggattaaaacgagattcaaaattgaaatcccttgaaattgcaattgaacagaagaaggaagaatgctcgaagctagaggctcagcttaagaaggcgcacaacattgaagacgacagtagaatgaatccggaattcgccgatcagattaagcagctggataaagaagcgtcctactacagggacgaatgcgggaaagcacaggccgaggtagacaggctgctggagatccttaaggaggtggagaacgaaaaaaatgacaaagataaaaaaatcgccgaactcgagtccctgactctgcgacatatgaaagatcaaaataagaaggttgcaaatttgaaacacaaccagcagcttgagaagaaaaagaacgctcaactgctagaggaagtcagacggcgcgaggacagtatggccgacaattcccaacatttacagattgaagaactgatgaacgctctggaaaagacacgccaggaactcgacgccactaaagccagactcgcttctacccagcaaagtctggcggaaaaggaagcccacctcgccaacctgcgtattgagcgcaggaagcagcttgaagagatcctggaaatgaaacaggaagcactcctcgctgccatctcagaaaaggacgcgaacattgccttgttggagctgtcggctagcaagaaaaagaagacacaggaggaggtgatggcacttaaacgggaaaaggatagactagtgcaccagttaaaacagcagacacaaaatcggatgaaactaatggctgataattatgacgatgatcaccaccattatcaccatcaccatcatcatcatcaccaccggtctcccgggcgctctcagcattctaatcacagacccagcccagaccaggatgatgaggagggaatctgggcctag

SEQ ID NO: 187403 - DNA, 2874 bp, Artificial Sequence
  derived and/or modified sequence
atgtatggcagcgcaagaactattactaatctggagggctccccatcgcgttcccccaggctgccacgatctccacgcttaggacacaggagaacctcttccgggggcggaggaggcaccgggaagacactgtcgatggaaaatatccagtcccttaacgccgcctatgctacctcagggcccatgtatctgtccgaccacgaaggcgtggcaagcacaacatacccaaaagggacaatgacactgggcagggccactaaccgagccgtgtatgggggtcgagttactgcgatgggcagctccccaaacattgctagcgcaggtctttcccatacagatgtcctatcctacacagatcaacatgggggcctgacggggagctcacatcatcaccatcatcaggtaccttcaatgctgagacaggtcagagattcaacgatgctggacctgcaggctcagctaaaggaactccagagggaaaacgatctgcttaggaaggagctcgatatcaaggactctaaactgggcagttccatgaatagcatcaaaactttctggagtcccgagcttaaaaaggagcgggtgctgcggaaggaggaagctgcgcgaatgtccgtacttaaggagcaaatgagagtgtcacacgaggagaaccagcacttacaactcacgatccaggcccttcaggatgaacttcggactcagcgcgacttaaaccacctgttgcagcaagagagcggcaataggggcgcggagcacttcactatcgagttaaccgaggagaactttcggcgacttcaggcagagcacgatagacaagccaaggagctgttcctgttaagaaaaaccctcgaagagatggaattgagaatagagacacaaaaacagaccttgaacgccagagatgagagcatcaagaaactcctcgaaatgctccagagtaagggactaccctctaaaagcttagaggacgataacgaaaggacgcgccggatggctgaggctgaatcacaagtgagccacctggaagtgatcctcgaccaaaaggagaaggagaacatacacttgcgggaggaattacaccgccgctcacagttacagcccgaacccgcgaagaccaaagctcttcagacggttattgagatgaaggacaccaagatcgcaagcttagagaggaacattcgagatcttgaggacgaaatacagatgctcaaggctaacggggtgcttaataccgaagaccgggaggaggagatcaaacaaatcgaggtgtataagtcgcacagcaagttcatgaagaccaagatcgatcagttaaagcaggaattgtcaaaaaaagaatccgaactattagccctgcaaaccaagcttgagacattgagcaatcagaactccgactgtaaacaacacatcgaagttctcaaggaaagtctgacagcaaaggagcagcgtgccgccatacttcagaccgaggttgatgctctgcgtctgcggttagaagagaaagaatcctttctaaacaagaagaccaagcaacttcaggatctgacagaagagaaggggacactggccggcgaaatcagggacatgaaggatatgctggaggttaaggagcgtaagatcaatgtgctccaaaagaaaatcgagaacctgcaagagcagttgagggataaagataaacaactgaccaacctgaaagaccgggttaagtccctgcagacagattcctccaacaccgacactgcactcgctacattagaagaagcactgagcgagaaagaacgaataattgagcggctcaaagagcaacgtgagcgtgacgatagggaaagactggaggaaatcgagagtttcagaaaagaaaacaaagacctcaaagagaaggtcaatgctcttcaggccgaactgactgaaaaggagtcttctttgattgacctgaaggagcacgcttcatccctggcttcagctggcctgaaaagggactccaagctgaagagcctggaaatcgctattgaacaaaagaaagaggaatgtagcaagctcgaggcccagctcaaaaaagcacacaacatcgaggacgattcacgaatgaaccccgagttcgccgaccagatcaagcagctggataaggaagcttcgtactaccgcgacgagtgtggcaaagcgcaagcggaagttgacaggctactagagattcttaaagaggtcgaaaacgagaaaaatgacaaagacaagaaaattgccgagctggaatcccttacacttcgccatatgaaagatcagaacaaaaaagttgccaacttaaaacacaaccaacagttagagaaaaaaaagaatgcccaactgctcgaggaagtcaggaggcgagaggactcaatggcggataattcgcagcacctacagatagaggaactcatgaatgctctggagaaaacacgtcaggaactcgatgctacaaaagcacgccttgcgagtactcagcagtcactcgctgagaaagaagctcacctggcgaatctcagaatcgagagacggaagcagctggaggagattctggagatgaagcaggaggctcttctggccgcaatttccgagaaagacgcgaatatcgccttgcttgaacttagcgcatcgaaaaaaaagaaaactcaggaagaggtcatggcgcttaaaagagagaaggatagactcgtgcatcagctcaagcaacagacccaaaaccgtatgaagctcatggcggataactacgatgatgaccatcatcattatcaccatcaccaccatcatcatcaccaccgaagccctgggagatcacagcacagtaaccatcgaccatcacccgaccaggatgacgaagaaggcatttgggcctag

SEQ ID NO: 187404 - DNA, 2874 bp, Artificial Sequence
  derived and/or modified sequence
atgtatggcagcgcccggaccatcaccaacctggagggcagccccagccgcagcccccggctgcccaggagcccccggctgggccacaggaggaccagcagcggcggcggcggcggcaccgggaagaccctgtccatggagaacatccagagcctgaatgctgcctatgccaccagcggccccatgtacctgagtgaccatgaaggagtggccagcaccacctaccccaagggcaccatgaccctgggccgggccaccaacagagctgtgtatggaggccgggtgacagccatgggcagcagccccaacatcgccagcgctggcctgagccacacagatgtgctgagctacacagaccagcacggcggcctgaccggcagcagccaccaccaccaccaccaggtgcccagcatgctgcggcaggtgcgggacagcaccatgctggacctgcaggcccagctgaaggagctgcagcgggagaatgacctgctgaggaaggagctggacatcaaggacagcaagctgggcagctccatgaacagcatcaagaccttctggagccctgagctgaagaaggagcgggtgctgaggaaggaggaggccgccaggatgtctgtgctgaaggagcagatgagggtgtcccatgaggagaaccagcacctgcagctgaccatccaggccctgcaggatgagctgcggacccagagggacctgaaccacctgctgcagcaggagagcggcaacagaggagctgagcacttcaccatcgagctgacagaggagaacttccggcggctgcaggccgagcatgaccggcaggccaaggagctgttcctgctgaggaagaccctggaggagatggagctgagaattgagacccagaagcagaccctgaatgccagagatgagagcatcaagaagctgctggagatgctgcagagcaagggcctgcccagcaagagcctggaggatgacaatgaaagaaccaggaggatggccgaggccgagagccaggtgagccacctggaggtgatcctggaccagaaggagaaggagaacatccacctgcgggaggagctgcaccggcgcagccagctgcagcctgagcccgccaagaccaaggccctgcagaccgtcatcgagatgaaggacaccaagatcgccagcctggagaggaacatccgggacctggaggatgagatccagatgctgaaggccaatggagtgctgaacacagaagatcgggaggaggagatcaagcagatcgaggtgtacaagagccacagcaagttcatgaagaccaagattgaccagctgaagcaggagctgagcaagaaggagagcgagctgctggccctgcagaccaagctggagaccctgagcaaccagaacagcgactgcaagcagcacatcgaggtgctgaaggagagcctgacagccaaggagcagagagctgccatcctgcagacagaggtggatgccctgcggctgcggctggaggagaaggagagcttcctgaacaagaagaccaagcagctgcaggacctgacagaggagaagggcaccctggccggggagatccgggacatgaaggacatgctggaggtgaaggagaggaagatcaacgtgctgcagaagaagattgagaacctgcaggagcagctgcgggacaaggacaagcagctgaccaacctgaaggacagagtgaagagcctgcagacagacagcagcaacacagacacagccctggccaccctggaggaggccctgtctgagaaggagcgcatcatcgagcggctgaaggagcagcgggagagagatgaccgggagcggctggaggagattgagagcttcagaaaagaaaacaaggacctgaaggagaaggtgaatgccctgcaggccgagctgacagagaaggagagcagcctgattgacctgaaggagcacgccagcagcctggccagcgctggcctgaagagggacagcaagctgaagagcctggagatcgccatcgagcagaagaaggaggagtgcagcaagctggaggcccagctgaagaaggcccacaacattgaagatgacagcaggatgaaccctgagtttgctgaccagatcaagcagctggacaaggaggccagctactacagagatgaatgtgggaaggcccaggccgaggtggaccggctgctggagatcctgaaggaggtggagaatgagaagaatgacaaggacaagaagattgctgagctggagagcctgaccctgcggcacatgaaggaccagaacaagaaggtggccaacctgaagcacaaccagcagctggagaagaagaagaatgcccagctgctggaggaggtgagaagaagagaggacagcatggctgacaacagccagcacctgcagatcgaggagctgatgaatgccctggagaagacccggcaggagctggatgccaccaaggcccggctggccagcacccagcagagcctggccgagaaggaggcccacctggccaacctgcgcatcgagaggaggaagcagctggaggagatcctggagatgaagcaggaggccctgctggccgccatcagcgagaaggatgccaacatcgccctgctggagctgagcgccagcaagaagaagaagacccaggaggaggtgatggccctgaagcgggagaaggaccggctggtgcaccagctgaagcagcagacccagaacaggatgaagctgatggctgacaactatgatgatgaccaccaccactaccaccaccaccaccaccaccaccaccacaggagccctggccgcagccagcacagcaaccaccggcccagcccagaccaggatgatgaggagggcatctgggcctag

SEQ ID NO: 187405 - DNA, 2874 bp, Artificial Sequence
  derived and/or modified sequence
atgtacggcagcgcccggaccatcaccaacctggagggcagcccctccaggagtccacgcctgcctagaagtcctcgattgggacacaggcgcacctcgtctggggggggtggaggcacagggaagacactgagcatggaaaatattcagagcctgaatgcagcgtatgctaccagtggaccaatgtacttgtccgaccacgagggcgttgcgagcacaacctacccaaagggcactatgaccctgggtagagctacgaatagagccgtgtatgggggccgtgtaactgcaatgggcagctcacccaatattgcctcagccgggttgtcccacaccgacgttctgtcatacaccgaccagcacgggggtctcacaggttcgtcccatcatcaccatcaccaggtgccttcaatgctcagacaggtcagggatagtaccatgctcgacttacaggcacagctgaaggagttgcagcgggaaaatgatctcctgaggaaagagctcgacatcaaagactctaagctagggtcatccatgaattctatcaagaccttctggagtcctgaacttaaaaaggagagagtgttgcgcaaggaagaggcggctcgcatgtcagttctgaaagaacagatgcgggtatcgcatgaagaaaaccaacacctgcagcttactatacaggcacttcaggatgaactcaggacgcagagagacctaaaccatctgctacagcaggagtccggaaacaggggcgctgagcacttcacaatcgagctgactgaggagaacttcagacggctccaggccgagcatgacagacaggctaaagagctgtttctgctgagaaaaaccttagaggagatggagttacgcatcgagacacagaagcaaaccctcaatgcccgggatgagagtattaagaaactgctcgaaatgttacagagcaaaggcctgccctccaagtctctcgaagatgacaacgaacggactagaagaatggctgaggccgagagtcaggttagtcatctcgaagtaatccttgatcaaaaggaaaaagagaacatacacctgcgcgaagaactgcaccggcggagtcagctgcagccagaacctgccaaaaccaaagctctccagacagtaatcgagatgaaggacacaaagattgcaagccttgagaggaacatccgggatctggaggatgagattcagatgttaaaggccaacggagttctgaacaccgaagatagagaggaagagatcaaacagatagaagtttataagagccacagcaaattcatgaagaccaagatcgatcagttgaagcaagaattgtctaaaaaggagtccgagctcttggccctccaaaccaaactggaaaccttaagcaatcaaaatagcgactgcaagcagcacatcgaagttttaaaagagtccctgactgccaaagagcagcgagccgccatcttgcagacagaagtggatgcgcttcggttgcgattggaagagaaggaatcctttctgaacaaaaaaacaaagcagttgcaggaccttacagaagaaaagggcactttggccggggagattcgggatatgaaagacatgctggaagtgaaagaaagaaaaattaatgtcctccagaaaaagatcgagaacctgcaagagcagttgagggacaaggacaaacagctcaccaatctaaaggaccgcgtgaagagcctccagaccgacagttcaaatacagacactgcgctggccacgcttgaggaggccctgagcgagaaggaacggattattgagcgcctcaaagaacagagggagagggatgacagagagcgtctggaggaaattgaaagcttcaggaaggagaataaggacctgaaggagaaagtgaacgcgctgcaggcagagctcacagaaaaggagagcagcttaatcgatctgaaagagcacgcttcctctttggcctccgccggtctaaaaagagactctaaactgaaatccttggaaatcgcaattgaacaaaagaaggaagagtgttctaagctggaggctcagctgaaaaaggcacacaatatcgaagatgatagtcggatgaaccctgagtttgcagatcagataaagcaattagacaaggaagcttcctattatcgcgatgagtgtggtaaggcccaggctgaagtcgatcgactcctcgaaatccttaaagaggtggagaatgagaagaacgataaagacaaaaaaatagccgaactggagtctctaactctgcggcacatgaaggaccagaataagaaagtcgcaaatctcaaacacaaccaacaactggagaaaaagaagaatgcccagttactggaggaggtgcggcggcgtgaagattcaatggccgacaactctcagcacttgcagatagaagagctgatgaacgccctggaaaagacaaggcaggagctcgacgccactaaagctcggctggctagcacccagcagagcctggcggaaaaggaggctcaccttgctaatttgaggattgagaggcggaagcagctcgaggagattttggagatgaagcaggaggctctactggcagccataagcgagaaggatgccaatattgctctgttggaactgtctgccagcaaaaagaagaagactcaagaggaagttatggccctcaagcgtgagaaggaccggctggtgcaccaactcaagcagcaaacacagaacagaatgaaactcatggcagacaactatgacgatgatcaccaccactatcaccatcatcatcatcatcatcatcaccgatcccctggtagatcccagcactctaatcaccgcccatccccagatcaggacgacgaagaagggatatgggcctag

SEQ ID NO: 187406 - DNA, 2874 bp, Artificial Sequence
  derived and/or modified sequence
atgtacggcagcgcccggaccatcaccaacctggagggcagcccctcacgttctcctagactgcctcggagccctaggctcggccacaggcggacgtcctctggtggggggggcggaaccggcaaaaccttgtccatggagaatatacagagcctcaacgcagcgtacgccacatccggaccaatgtatctttctgaccacgaaggcgtggcctccaccacttatcctaaaggcaccatgaccctagggagagccactaaccgagccgtttacggcggacgggtgactgccatgggatcttccccaaatattgcttccgctggcctgagtcacacggacgtgctgagttacaccgaccagcatggaggcctgactggctcaagccatcatcatcaccatcaggtcccttccatgctgaggcaggtccgtgactccaccatgttggatttgcaggcccagctgaaagagttacaacgtgaaaacgacctcctccggaaagagctcgacatcaaggacagtaaactggggagcagtatgaattctatcaagaccttttggagcccagagttaaaaaaagagcgtgtactgaggaaggaagaagcagcccggatgagcgttctgaaggaacagatgcgagtctcccatgaggagaaccaacacctgcagctgaccatccaggctctgcaggatgagctacgtacccagcgcgacttgaatcacttgttacagcaagagtcggggaaccggggcgccgaacacttcaccatcgaactcacagaggaaaacttcagaagactgcaggcagaacacgatcggcaagccaaggaactttttctgttacgtaaaaccttagaggaaatggagcttcgaattgaaacacaaaaacaaacattgaacgctagagatgaatccattaaaaaactcctggagatgctccagtctaaggggttgcctagtaaaagtctggaggatgacaatgaacgaacaaggcgcatggccgaagctgagtcgcaggtcagccacctggaggtcattctcgatcaaaaagaaaaggagaatatccatctcagggaggagctgcatagaaggtcccaacttcagcccgagcccgcgaagaccaaagctcttcagaccgtgatcgagatgaaggacacgaagatcgcctccctcgagagaaacatccgggacttggaagatgagatacagatgctgaaagccaacggggtgttgaacaccgaagaccgagaagaagaaatcaagcagattgaagtttacaagagtcattctaaattcatgaagacaaagattgatcagctgaagcaggaacttagcaagaaggagtcagaacttctcgcactgcagactaaattagaaacactgagcaaccagaacagcgactgcaagcagcatattgaggtcctaaaagagagcttgaccgccaaggagcagagggccgccatcttgcagactgaggtggacgcacttaggctaagactcgaagaaaaggagtcctttctgaacaaaaagaccaagcagctgcaggatcttacagaagagaaaggcacacttgcaggcgagatccgagacatgaaagacatgctggaagtcaaggagaggaaaattaacgtcctgcaaaagaagattgaaaatctgcaggaacaactgcgcgacaaggacaagcagttaacaaacctaaaggatagggtcaagagcctgcagaccgactccagtaacaccgatacagccctggccaccttggaggaagctctttcggagaaagagcgcatcattgagcgccttaaagagcagcgcgagcgcgatgatagagaacgtcttgaagagatcgagtctttcaggaaagaaaacaaggacctgaaggaaaaggtaaacgctctgcaggctgagttaactgagaaagaatcttcactgattgatttaaaagagcacgcttcatccctcgcctctgctggtctgaagcgagactccaagttgaaatctctcgagatcgctattgaacagaagaaagaggagtgctctaagctggaagctcagctgaagaaagctcataacattgaagatgatagtcgtatgaatccggagttcgctgatcagatcaagcaactcgataaggaagcctcctactacagggatgaatgtggaaaggcgcaggcagaagtcgacaggcttctggagattcttaaagaagtggaaaatgagaagaacgataaagataagaagatcgcagagctggaaagcctgactttaagacatatgaaagaccagaacaagaaggtagcaaatctgaaacacaatcagcagttagaaaaaaagaaaaacgcacaactgttagaggaggtccgccgtagagaggactcaatggctgacaactcccagcacctccagatcgaagagctgatgaatgcattagagaaaacccgacaagagctggatgcaaccaaggcccgcctggcttcaacccagcaatccctggcagagaaagaagctcacctcgccaacctgcgtatcgaacggcgcaagcagctggaggagatcctggaaatgaaacaggaggccttgctggcggccatcagcgagaaagacgcgaatattgcactgctagagctgtcagcttcaaagaaaaaaaaaactcaggaggaagttatggcgctcaagagggagaaagaccgacttgtacatcagctaaaacagcagacccagaaccggatgaagctgatggccgataattacgacgatgaccaccatcactatcaccatcatcatcatcaccaccaccataggagccctggacggtcccagcactccaaccatcgcccctcccccgaccaagacgatgaggaagggatctgggcatag

SEQ ID NO: 187407 - DNA, 2874 bp, Artificial Sequence
  derived and/or modified sequence
atgtatgggtccgctagaaccataactaacctcgaaggttcacctagccgctcccctcggctccctcggtctcctagactggggcatagacggactagttcaggcggtggcggtggcactggaaagacgttaagcatggaaaatatccagagcctgaatgcagcatacgcaacctccggtcctatgtacctcagtgaccacgagggtgtggcgtctactacttaccccaaggggactatgactcttgggagggctactaatagagcggtatatggaggccgtgtgaccgcaatgggctctagccccaatatcgcctcagccggtctctctcatactgatgtgttgtcatacactgatcagcatggcggtttaacgggctcctctcaccaccaccatcaccaagtcccttcgatgttgagacaagtgcgggatagtactatgctcgacctccaagcccagctaaaagagctccagagagagaatgacctccttcgcaaagaactggatatcaaagacagtaagctaggttcttccatgaattctattaaaacattctggtctcctgaactgaagaaagagcgtgttctgaggaaggaggaggccgcacgcatgtcagtgttgaaggagcagatgcgagtctcacatgaagaaaaccagcatctgcagctgactatccaggcactgcaggatgaacttcgtacacagagggacctgaaccacctgctgcagcaggaatccgggaaccgcggagcagaacactttaccatcgagctgaccgaggagaacttccggcgattacaggccgagcatgaccgtcaagctaaggagctgtttttacttaggaagactcttgaagagatggaacttcggattgaaacacagaagcaaactctcaatgcgagggatgagtcaatcaaaaagttgctggaaatgctgcagagcaaaggacttccatccaagtctctggaggatgataacgagaggacccgcagaatggcggaggccgagtcccaggtgagccaccttgaagtgattttggatcaaaaggaaaaagaaaatattcacctcagagaagaactccaccgcaggtcccaactacagccagaacccgctaaaacaaaagccctgcaaacagtgattgaaatgaaagatactaagatcgcttctttagaaagaaacattagagatttagaagatgaaatccagatgttgaaagcaaatggtgttctcaatacggaggacagagaagaggagatcaaacagatcgaggtgtataagagtcactctaaatttatgaaaacaaagatcgatcagctcaaacaggagctgagcaaaaaagagagtgagctattggctttacagactaaactggaaactttgtcaaatcagaactcagattgcaaacagcacatcgaggttctgaaagagtccctgacagctaaagagcaacgggctgcgattctgcagaccgaagtggatgcgctgcggctccggctggaggagaaggaaagctttttgaataagaagacaaaacagcttcaggatctgacagaagaaaagggtacccttgcgggtgagatcagagacatgaaggatatgttagaagttaaagaacggaagattaatgtgcttcagaagaaaatcgaaaacttgcaggagcagctgagagataaggataagcaacttacaaatctgaaagatcgtgtgaagtcccttcagacagatagttcaaataccgatacagctctggcgactctggaggaggctctgagcgagaaggagcgcataatcgagagactgaaggagcagcgggaaagagatgaccgtgagcgcctggaggagatcgaatccttccgaaaggagaataaagacctgaaggaaaaagtcaatgcactgcaggccgagctcaccgagaaggagtcctctttaatcgatctgaaagaacacgcctctagcctggcctcagccggactgaaacgtgacagcaaattaaagtccttagagatcgcaatcgaacaaaaaaaggaagaatgttctaagctagaagcccagctcaaaaaggcacacaacattgaggatgacagtagaatgaatccagagtttgcagaccagatcaagcaactggacaaggaagcaagctattaccgtgacgagtgcgggaaagctcaggccgaggttgacaggttactggagatcctcaaggaggtggagaacgagaaaaatgataaggataaaaagattgctgaactcgaaagtttgactctgaggcatatgaaggaccaaaacaagaaggttgccaatcttaaacataatcagcaactggaaaaaaaaaagaatgcccagttgttggaggaagtcagaaggcgagaggattctatggccgataactcacagcacctgcagattgaagagctgatgaatgcacttgagaagaccagacaggagctggacgcaacaaaagctcgtctcgcttccacacagcaatctctagccgaaaaagaggcccacctcgcaaatttgcgcattgaacggagaaagcagctggaagagatccttgaaatgaaacaggaggcactactcgctgctatcagcgagaaagacgcgaacatcgctttgctagaactgtccgcgagtaaaaaaaagaagacgcaagaagaagtcatggccttgaagcgcgagaaagatagattagtgcaccaactcaagcaacagactcagaatagaatgaagttgatggcagacaactatgatgacgaccaccaccattaccatcaccaccatcaccatcaccaccatcgcagcccgggtcgcagccaacattctaatcaccgtccctcccctgatcaagacgacgaggagggcatctgggcttag

SEQ ID NO: 187408 - DNA, 2874 bp, Artificial Sequence
  derived and/or modified sequence
atgtatggatcagcacggacaataaccaacctggaggggtcacctagtcggtccccacggttacctaggagcccaagactcggccacaggaggacatcctccggcggagggggaggcaccggtaagactttaagtatggaaaatattcaaagcctcaatgccgcatatgcaacaagcgggccaatgtacctgagtgaccacgaaggcgtggccagtactacgtaccccaaggggactatgaccctgggcagggctactaatagggcggtctatggcggacgggttaccgccatgggttcatctcccaacatcgccagtgccggactctcccacaccgacgtactcagttacaccgaccagcatggcggactgactggctcgagtcatcatcatcatcatcaggtgcccagcatgctgcgccaggtccgagactccacaatgctcgatctgcaggcccaacttaaggaactccaaagggagaatgatctactgcgaaaggaacttgacatcaaggactcaaagttggggtccagcatgaactccatcaagactttttggtcccccgaactcaagaaagaaagagtgctgcggaaagaagaggccgcaaggatgtccgtgctgaaagaacagatgagagtcagtcacgaagaaaatcaacaccttcagctcacaatccaagctctgcaggacgagttacggactcagagggatcttaatcacctgctgcaacaagaatcgggcaaccgtggagctgagcactttactattgagcttaccgaggaaaactttcgcaggttacaagcagagcacgacagacaggctaaggagttgtttttgctcagaaagacgctcgaagaaatggagctgcggatcgagacacagaaacagaccctgaatgctcgagatgagtccattaaaaagctgcttgaaatgctccagtccaaaggcctcccttccaagtccttggaagacgacaatgaacggacacggaggatggccgaggcggagtcgcaggtgtcacacctggaagtaattcttgaccagaaagagaaagagaatatacatctaagagaagaactgcatcggcgttcccagctccaacctgaaccagccaagaccaaagcactgcagactgtgattgaaatgaaagatacgaaaattgctagcttagaaagaaatatcagggatctggaagacgagatccagatgctgaaagcgaacggagtcctgaatacggaggatagggaggaggaaattaagcagatcgaggtgtacaagagtcattctaagtttatgaaaacaaagattgaccagctcaagcaagagctgagcaaaaaggaatctgaactcctagccctccaaactaagctcgaaacattgagcaaccagaattccgattgcaagcagcacatagaagttctgaaggagtccctgactgctaaggagcagagggctgccatattgcaaaccgaagtggatgctctgcgcctccgcctcgaagagaaagaatcattcctgaacaaaaaaactaagcagttacaagatttgaccgaagaaaaagggacactggccggagaaatcagggatatgaaggatatgctcgaagtgaaggagaggaagattaacgtgttacaaaaaaagatcgaaaacctgcaggagcaactgcgtgataaggacaaacagctgacgaatttaaaagacagagtgaagagcttacagaccgatagtagtaatactgacaccgcccttgcaactctcgaggaagccctctccgagaaggaacgtattatcgaacgattgaaggagcagcgcgaaagagacgatagggagagactggaagaaattgaaagcttcaggaaggagaataaagatctcaaggagaaagttaatgccttgcaggccgagctcacagaaaaggagagcagtttgatcgacttaaaagaacacgcaagttcactggcctcggccggattgaaaagggattctaagctcaagagcctcgaaattgcaatcgaacaaaaaaaagaagagtgcagcaagctagaggctcagctcaagaaagctcataatattgaggatgactctcgaatgaacccagagtttgctgaccagataaagcagctagacaaggaggcttcctattaccgcgacgagtgtggcaaagcccaggctgaagtggaccgactgctggaaatcctgaaagaagtggagaacgagaagaatgacaaagataaaaagatcgctgagttagagtccttgacgctaaggcatatgaaagatcagaataagaaagtggcaaacctgaaacacaatcagcagctggagaaaaagaagaacgcccagctgcttgaagaggtgcgtcgcagggaggactcaatggctgataactctcagcaccttcagattgaagagctgatgaacgccctcgaaaagacgagacaagagcttgacgccactaaggcacgcttagcctcaactcagcaatctttagctgaaaaggaagcccacctcgcaaatctccgcatcgagcgaagaaagcaactcgaggagatccttgaaatgaagcaagaggcgcttctggccgcaatctccgagaaggatgccaatatcgccctgctcgagctcagtgcaagcaaaaagaagaaaactcaagaagaggtgatggccctcaagcgcgaaaaagacaggcttgtgcaccaattgaagcagcagacacagaaccggatgaaactcatggctgacaactatgacgacgaccaccaccattaccaccaccatcaccaccatcatcaccacagaagccctggtagatcccagcatagcaaccaccgacctagcccagaccaggatgacgaagaaggcatttgggcttag

SEQ ID NO: 187409 - protein, 1237 aa, Artificial Sequence
  derived and/or modified sequence
MSVLTSPRGKVEVVHCRRTESQDVYCIKSLIRKFTCKLFGKLNIIYLLEKANLAVTLCNDKEEIMAQATFLDYPNWNVAKQDDWVSVFRELDSDIPCTPLNTLFMHLFVAVDEYSVGCCKEILRTVYKAVPELHFIFLIVPSYMSLGSTLITVFDQVGNIPCLTYEEDFAVHICHRHSHYPQLHVRKARVEDHDDLMPIFMRYDTILKETYGEYFLAELIEAQDEENHAVVCEVEGTAVGFMSVCSRVNMQLLHECFDLGPFHGLCFPHPDDVLESPQDLSVRRSQDAELRSSSQGSQKIVEELQEPVSPDTMENIQGNIAREAASEEALTAVQSGNVSEPEDIEKLSDISTGYAQYHHVSSRSLASLVLPEEPVHFRPIYRGASAAFCIQLFCIDEKYEARSLDFMNFVFSLFSDKNFCVISLPHLTPEFFLIQNFVKMVPFNTCTLEQDLYVFHRAGLLKSINIRFATLLDTPGVENLVSTLMLNKSILEDLDRYNKARKDPDGTLLQAFVAEVAEQIVGIAVIRNEMDIEYIRSHYNIEDFIYFSHHQREEHGHMHHFALNPIFRHYTKFFLKEILRLGFKSCLYYRVYPKSREGKFQNPYAHSLTSALHYLVPVRPRRQIVYPLEKLGINAPSKAVSKDPMSYALNHTNRKLTLEPKITVNAKIIVVGASSVGISFLETLVFCSHMKFNNLTLISTHGLPGKKLLDTEQRKFLASDHCFNDKDYALMSLCSWVNVVVGRMTGIDRAAKHVVLSTDEIVPYDHLILCTGQQYQVPCPTEADISQHLTNREVPNSSQRRYTGKVPCNHFTLNEEEDCFKALIWIRNNSITTEGNIIVYGNTIDTYTTVETLLNLGVSGSRIHLVQPPPASTITCINNYSVESAVADALGAAGVTMYRDAILAQWNDGLHPDPIYSASFTTPTKPFRLQCSMFFSFCEKNVDYETFKALNDACLVYDSRLVIDTNFHTNDIAIRAAGSLTKFSNRYYSNEWTHSNFSSKEIGFQLAAAMLHLFDPTLEPVTEPPANLDRLIPMYKGAKIQGGILPGSYHYLHIAKPAIPTPLEVQMAQPNYGLELVTGSAKNGTYFRIHINKYKMVETITCLSREPFPASNYIRLFGQHEQLLNNLCARYDENLITDLYSYFTEPWCLALFHDRFIDLRKELRQILASKEEEDLPSIEQLAHQIEDEEINPTEKPRQYLKRVFEESIYKTLVERSTLDYLHYNRYHLPMYAWPGIV

SEQ ID NO: 187410 - protein, 1177 aa, Artificial Sequence
  derived and/or modified sequence
MSVLTSPRGKVEVVHCRRTESQDVYCIKSLIRKFTCKLFGKLNIIYLLEKANLAVTLCNDKEEIMAQATFLDYPNWNVAKQDDWVSVFRELDSDIPCTPLNTLFMHLFVAVDEYSVGCCKEILRTVYKAVPELHFIFLIVPSYMSLGSTLITVFDQVGNIPCLTYEEDFAVHICHRHSHYPQLHVRKARVEDHDDLMPIFMRYDTILKETYGEYFLAELIEAQDEENHAVVCEVEGTAVGFMSVCSRVNMQLLHECFDLGPFHGLCFPHPDDVLESPQDLSVRRSQDAELRSSSQGSQKIVEELQEPVSPDTMENIQGNIAREAASEEALTAVQSGNVSEPESLDFMNFVFSLFSDKNFCVISLPHLTPEFFLIQNFVKMVPFNTCTLEQDLYVFHRAGLLKSINIRFATLLDTPGVENLVSTLMLNKSILEDLDRYNKARKDPDGTLLQAFVAEVAEQIVGIAVIRNEMDIEYIRSHYNIEDFIYFSHHQREEHGHMHHFALNPIFRHYTKFFLKEILRLGFKSCLYYRVYPKSREGKFQNPYAHSLTSALHYLVPVRPRRQIVYPLEKLGINAPSKAVSKDPMSYALNHTNRKLTLEPKITVNAKIIVVGASSVGISFLETLVFCSHMKFNNLTLISTHGLPGKKLLDTEQRKFLASDHCFNDKDYALMSLCSWVNVVVGRMTGIDRAAKHVVLSTDEIVPYDHLILCTGQQYQVPCPTEADISQHLTNREVPNSSQRRYTGKVPCNHFTLNEEEDCFKALIWIRNNSITTEGNIIVYGNTIDTYTTVETLLNLGVSGSRIHLVQPPPASTITCINNYSVESAVADALGAAGVTMYRDAILAQWNDGLHPDPIYSASFTTPTKPFRLQCSMFFSFCEKNVDYETFKALNDACLVYDSRLVIDTNFHTNDIAIRAAGSLTKFSNRYYSNEWTHSNFSSKEIGFQLAAAMLHLFDPTLEPVTEPPANLDRLIPMYKGAKIQGGILPGSYHYLHIAKPAIPTPLEVQMAQPNYGLELVTGSAKNGTYFRIHINKYKMVETITCLSREPFPASNYIRLFGQHEQLLNNLCARYDENLITDLYSYFTEPWCLALFHDRFIDLRKELRQILASKEEEDLPSIEQLAHQIEDEEINPTEKPRQYLKRVFEESIYKTLVERSTLDYLHYNRYHLPMYAWPGIV

SEQ ID NO: 187411 - protein, 1203 aa, Artificial Sequence
  derived and/or modified sequence
MSVLTSPRGKVEVVHCRRTESQDVYCIKSLIRKFTCKLFGKLNIIYLLEKANLAVTLCNDKEEIMAQATFLDYPNWNVAKQDDWVSVFRELDSDIPCTPLNTLFMHLFVAVDEYSVGCCKEILRTVYKAVPELHFIFLIVPSYMSLGSTLITVFDQVGNIPCLTYEEDFAVHICHRHSHYPQLHVRKARVEDHDDLMPIFMRYDTILKETYGEYFLAELIEAQDEENHAVVCEVEGTAVGFMSVCSRVNMQLLHECFDLGPFHGLCFPHPDDVLESPQDLSVRRSQDAELRSSSQGSQKIVEELQEPVSPDTMENIQGNIAREAASEEALTAVQSGNVSEPEDIEKLSDISTGYAQYHHVSSRSLASLVLPEEPVHFRPIYRGASAAFCIQLFCIDEKYEARSLDFMNFVFSLFSNFVKMVPFNTCTLEQDLYVFHRAGLLKSINIRFATLLDTPGVENLVSTLMLNKSILEDLDRYNKARKDPDGTLLQAFVAEVAEQIVGIAVIRNEMDIEYIRSHYNIEDFIYFSHHQREEHGHMHHFALNPIFRHYTKFFLKEILRLGFKSCLYYRVYPKSREGKFQNPYAHSLTSALHYLVPVRPRRQIVYPLEKLGINAPSKAVSKDPMSYALNHTNRKLTLEPKITVNAKIIVVGASSVGISFLETLVFCSHMKFNNLTLISTHGLPGKKLLDTEQRKFLASDHCFNDKDYALMSLCSWVNVVVGRMTGIDRAAKHVVLSTDEIVPYDHLILCTGQQYQVPCPTEADISQHLTNREVPNSSQRRYTGKVPCNHFTLNEEEDCFKALIWIRNNSITTEGNIIVYGNTIDTYTTVETLLNLGVSGSRINNYSVESAVADALGAAGVTMYRDAILAQWNDGLHPDPIYSASFTTPTKPFRLQCSMFFSFCEKNVDYETFKALNDACLVYDSRLVIDTNFHTNDIAIRAAGSLTKFSNRYYSNEWTHSNFSSKEIGFQLAAAMLHLFDPTLEPVTEPPANLDRLIPMYKGAKIQGGILPGSYHYLHIAKPAIPTPLEVQMAQPNYGLELVTGSAKNGTYFRIHINKYKMVETITCLSREPFPASNYIRLFGQHEQLLNNLCARYDENLITDLYSYFTEPWCLALFHDRFIDLRKELRQILASKEEEDLPSIEQLAHQIEDEEINPTEKPRQYLKRVFEESIYKTLVERSTLDYLHYNRYHLPMYAWPGIV

SEQ ID NO: 187412 - DNA, 4082 bp, Artificial Sequence
  derived and/or modified sequence
ggcagcgcgtggagtgcggcgtcctggagctgcggatgagtggacttttttctctcttttggggacaggataaaaaatgtcagtactcacttctccaagaggaaaggtagaagttgttcattgccgaagaacagaatcacaggatgtttattgtatcaaaagccttattagaaaatttacctgcaagctgtttgggaagctaaatatcatctatcttctagaaaaggccaaccttgctgttaccctctgcaatgacaaggaggagatcatggcccaggccaccttcctggactaccccaactggaatgttgccaagcaggatgactgggtgtcagtgttccgggagctcgacagtgacatcccatgcacacccctgaatacgttgttcatgcacctctttgtggccgtggatgagtattctgttggctgttgcaaagagattcttcgaaccgtgtataaggcagtgccagagctgcacttcatatttctcatcgtgccatcctacatgagcctaggctcaactctcataactgtttttgaccaagtggggaacatcccgtgtctgacgtatgaggaagactttgcagtgcatatatgtcacaggcacagccactatcctcagctgcacgttcgcaaagccagggtggaagaccatgacgatctcatgccaatatttatgcgctatgacacaattctgaaggaaacttacggtgaatacttcctggccgaactaatagaggcccaagatgaagagaatcatgctgttgtgtgtgaggtggaaggcacagctgttgggttcatgagtgtgtgctcaagagtgaacatgcaactgctgcatgagtgctttgacttgggccctttccacggactctgtttcccacatcctgatgacgttctggaatcaccacaagacctaagtgtccgaagaagtcaagatgctgagctcaggagtagcagccaaggttcccaaaaaatagtcgaggagttgcaggaacctgtctctccagataccatggaaaacatccagggaaatattgccagagaagctgcatccgaggaagctttaacagcagtccaaagtggaaatgttagtgaaccggaggacatagaaaaactcagtgacatctccactggatatgcacagtatcaccatgtcagcagtaggagcttggcatcgctcgtactgcctgaagagcccgtccacttccgccccatctacaggggagcctcagctgctttttgtattcagctgttttgtattgatgagaaatatgaagcaaggtcgctggattttatgaattttgttttcagtcttttttctgataagaacttctgtgtaatttctctgccccatctcacccccgagttcttcctcatccagaacttcgtgaaaatggtccctttcaacacctgcaccctcgagcaggacctctacgtcttccaccgggctggattgctcaagtccattaatataagatttgccactctcttggatactcctggtgtggaaaatcttgtcagcaccctcatgttgaataaaagcatattggaggacttagaccgttacaacaaggctcgcaaagaccctgatggaacactgctgcaggcatttgtagctgaagttgcagaacaaatagttggtattgcagtgatcagaaatgaaatggacattgagtacatacggtcccattacaacattgaagatttcatctacttcagtcaccaccagcgcgaagaacacgggcacatgcatcactttgccctcaaccccattttccggcactacaccaagttctttctgaaggagatcctgcgtttaggctttaaatcctgtctctactaccgtgtttacccaaaatccagagaaggcaagttccagaacccctacgcccactccctgacatctgcccttcattacttggttcccgtgcgaccacgacgacagattgtctatcctctggaaaagcttggcataaacgctccatcaaaggcggtctccaaggatccgatgagttatgctttaaaccatacaaacagaaaactaacattggaacctaaaattactgtcaatgccaagatcattgtggttggtgcatccagtgttggaatttccttcctagagacattggtattttgctctcacatgaagtttaataatcttaccctgatttcaactcatggactcccaggaaaaaaacttctggacactgaacaaaggaaatttttagccagcgaccactgttttaatgataaagattatgcactgatgtcactgtgctcctgggttaatgtcgtggtgggtagaatgaccggcatagaccgagcagccaagcacgttgtgctttccacggacgagatcgtgccctacgaccacctcatcctctgcaccgggcagcagtaccaggtcccatgccctacagaggctgatattagtcaacacctgacaaacagggaggttcccaacagcagtcagcggcggtacacggggaaagttccttgcaaccatttcactctcaacgaggaagaggattgctttaaggcactgatttggataaggaataactccatcaccacagaagggaatatcattgtctatgggaatacaattgatacttacaccaccgtggagacgctcttaaaccttggcgtgagcggcagccgcatccacctcgtgcagcccccgcccgcctccaccatcacctgcatcaacaactactcggtggagagcgccgtggcggacgcgctaggagccgccggagtcactatgtaccgggatgcgatcctggcccagtggaatgacggcctgcacccagaccccatctacagcgcctccttcaccacacccaccaagcctttcagactccagtgctctatgttcttcagcttctgtgagaagaatgtggattatgaaacgtttaaagccctcaatgatgcatgtcttgtgtatgacagtcgacttgtgattgataccaacttccacaccaacgacatagccatcagagctgctggctccctcaccaaattctccaatagatactactcaaatgagtggactcacagcaacttcagttccaaagaaattggctttcagctggcagcagctatgctacatctctttgatccaacccttgagcctgtgaccgagccaccagctaatcttgaccggctcatccccatgtacaagggagccaagattcaagggggcattcttcctgggtcttaccattatctgcatattgccaagcctgccattccaactcccttggaggtacaaatggcacagcctaattatggtttagaactagtaaccggcagtgcgaaaaatgggacttacttccgaattcatattaacaagtataaaatggtggaaaccatcacgtgcctttctagggagcccttccccgcctccaactacatccgcttgtttggccagcacgagcaactcctcaacaacctgtgtgctcggtacgatgaaaacctgatcacagatctctatagctacttcaccgagccgtggtgcctggccctgttccacgatcgttttattgatctcaggaaagagttacgccaaatcttagcctccaaggaggaggaagatcttccttccatagagcagttagcccatcaaatagaagatgaggaaatcaacccgactgagaagcccaggcaatacctcaaaagagtttttgaggaatccatctacaaaaccctggtggagagaagcactcttgactacctgcactataaccgctaccacctgcccatgtacgcgtggccaggcatcgtttagttgtaggcagggtctcccctttatggttttcatttatttagttcctggaaacgcgctctgtagaaatagaaaagttctctgcagcctggtttgacagcgaagccagcccctggtggttttgttcattcctttccttccctgacttatgcctgtagttttctatcatcccagtaggtggcacacggccgtgtgcctctcttctggggcaggctcgctttacaaatcccaggcatgttcctgtgcagaataatccatttcagcaataaaatgagatcatagtgtgtaaaacttg

SEQ ID NO: 187413 - DNA, 3940 bp, Artificial Sequence
  derived and/or modified sequence
accgtttccatggtgaccaggctgcgcgtcctccttgcggcagcgcgtggagtgcggcgtcctggagctgcggatgagtggacttttttctctcttttggggacaggataaaaaatgtcagtactcacttctccaagaggaaaggtagaagttgttcattgccgaagaacagaatcacaggatgtttattgtatcaaaagccttattagaaaatttacctgcaagctgtttgggaagctaaatatcatctatcttctagaaaaggccaaccttgctgttaccctctgcaatgacaaggaggagatcatggcccaggccaccttcctggactaccccaactggaatgttgccaagcaggatgactgggtgtcagtgttccgggagctcgacagtgacatcccatgcacacccctgaatacgttgttcatgcacctctttgtggccgtggatgagtattctgttggctgttgcaaagagattcttcgaaccgtgtataaggcagtgccagagctgcacttcatatttctcatcgtgccatcctacatgagcctaggctcaactctcataactgtttttgaccaagtggggaacatcccgtgtctgacgtatgaggaagactttgcagtgcatatatgtcacaggcacagccactatcctcagctgcacgttcgcaaagccagggtggaagaccatgacgatctcatgccaatatttatgcgctatgacacaattctgaaggaaacttacggtgaatacttcctggccgaactaatagaggcccaagatgaagagaatcatgctgttgtgtgtgaggtggaaggcacagctgttgggttcatgagtgtgtgctcaagagtgaacatgcaactgctgcatgagtgctttgacttgggccctttccacggactctgtttcccacatcctgatgacgttctggaatcaccacaagacctaagtgtccgaagaagtcaagatgctgagctcaggagtagcagccaaggttcccaaaaaatagtcgaggagttgcaggaacctgtctctccagataccatggaaaacatccagggaaatattgccagagaagctgcatccgaggaagctttaacagcagtccaaagtggaaatgttagtgaaccggagtcgctggattttatgaattttgttttcagtcttttttctgataagaacttctgtgtaatttctctgccccatctcacccccgagttcttcctcatccagaacttcgtgaaaatggtccctttcaacacctgcaccctcgagcaggacctctacgtcttccaccgggctggattgctcaagtccattaatataagatttgccactctcttggatactcctggtgtggaaaatcttgtcagcaccctcatgttgaataaaagcatattggaggacttagaccgttacaacaaggctcgcaaagaccctgatggaacactgctgcaggcatttgtagctgaagttgcagaacaaatagttggtattgcagtgatcagaaatgaaatggacattgagtacatacggtcccattacaacattgaagatttcatctacttcagtcaccaccagcgcgaagaacacgggcacatgcatcactttgccctcaaccccattttccggcactacaccaagttctttctgaaggagatcctgcgtttaggctttaaatcctgtctctactaccgtgtttacccaaaatccagagaaggcaagttccagaacccctacgcccactccctgacatctgcccttcattacttggttcccgtgcgaccacgacgacagattgtctatcctctggaaaagcttggcataaacgctccatcaaaggcggtctccaaggatccgatgagttatgctttaaaccatacaaacagaaaactaacattggaacctaaaattactgtcaatgccaagatcattgtggttggtgcatccagtgttggaatttccttcctagagacattggtattttgctctcacatgaagtttaataatcttaccctgatttcaactcatggactcccaggaaaaaaacttctggacactgaacaaaggaaatttttagccagcgaccactgttttaatgataaagattatgcactgatgtcactgtgctcctgggttaatgtcgtggtgggtagaatgaccggcatagaccgagcagccaagcacgttgtgctttccacggacgagatcgtgccctacgaccacctcatcctctgcaccgggcagcagtaccaggtcccatgccctacagaggctgatattagtcaacacctgacaaacagggaggttcccaacagcagtcagcggcggtacacggggaaagttccttgcaaccatttcactctcaacgaggaagaggattgctttaaggcactgatttggataaggaataactccatcaccacagaagggaatatcattgtctatgggaatacaattgatacttacaccaccgtggagacgctcttaaaccttggcgtgagcggcagccgcatccacctcgtgcagcccccgcccgcctccaccatcacctgcatcaacaactactcggtggagagcgccgtggcggacgcgctaggagccgccggagtcactatgtaccgggatgcgatcctggcccagtggaatgacggcctgcacccagaccccatctacagcgcctccttcaccacacccaccaagcctttcagactccagtgctctatgttcttcagcttctgtgagaagaatgtggattatgaaacgtttaaagccctcaatgatgcatgtcttgtgtatgacagtcgacttgtgattgataccaacttccacaccaacgacatagccatcagagctgctggctccctcaccaaattctccaatagatactactcaaatgagtggactcacagcaacttcagttccaaagaaattggctttcagctggcagcagctatgctacatctctttgatccaacccttgagcctgtgaccgagccaccagctaatcttgaccggctcatccccatgtacaagggagccaagattcaagggggcattcttcctgggtcttaccattatctgcatattgccaagcctgccattccaactcccttggaggtacaaatggcacagcctaattatggtttagaactagtaaccggcagtgcgaaaaatgggacttacttccgaattcatattaacaagtataaaatggtggaaaccatcacgtgcctttctagggagcccttccccgcctccaactacatccgcttgtttggccagcacgagcaactcctcaacaacctgtgtgctcggtacgatgaaaacctgatcacagatctctatagctacttcaccgagccgtggtgcctggccctgttccacgatcgttttattgatctcaggaaagagttacgccaaatcttagcctccaaggaggaggaagatcttccttccatagagcagttagcccatcaaatagaagatgaggaaatcaacccgactgagaagcccaggcaatacctcaaaagagtttttgaggaatccatctacaaaaccctggtggagagaagcactcttgactacctgcactataaccgctaccacctgcccatgtacgcgtggccaggcatcgtttagttgtaggcagggtctcccctttatggttttcatttatttagttcctggaaacgcgctctgtagaaatagaaaagttctctgcagcctggtttgacagcgaagccagcccctggtggttttgttcattcctttccttccctgacttatgcctgtagttttctatcatcccagtaggtggcacacggccgtgtgcctctcttctggggcaggctcgctttacaaatcccaggcatgttcctgtgcagaataatccatttcagcaataaaatgagatcatagtgtgtaaaacttg

SEQ ID NO: 187414 - DNA, 3792 bp, Artificial Sequence
  derived and/or modified sequence
accgtttccatggtgaccaggctgcgcgtcctccttgcggcagcgcgtggagtgcggcgtcctggagctgcggatgagtggacttttttctctcttttggggacaggataaaaaatgtcagtactcacttctccaagaggaaaggtagaagttgttcattgccgaagaacagaatcacaggatgtttattgtatcaaaagccttattagaaaatttacctgcaagctgtttgggaagctaaatatcatctatcttctagaaaaggccaaccttgctgttaccctctgcaatgacaaggaggagatcatggcccaggccaccttcctggactaccccaactggaatgttgccaagcaggatgactgggtgtcagtgttccgggagctcgacagtgacatcccatgcacacccctgaatacgttgttcatgcacctctttgtggccgtggatgagtattctgttggctgttgcaaagagattcttcgaaccgtgtataaggcagtgccagagctgcacttcatatttctcatcgtgccatcctacatgagcctaggctcaactctcataactgtttttgaccaagtggggaacatcccgtgtctgacgtatgaggaagactttgcagtgcatatatgtcacaggcacagccactatcctcagctgcacgttcgcaaagccagggtggaagaccatgacgatctcatgccaatatttatgcgctatgacacaattctgaaggaaacttacggtgaatacttcctggccgaactaatagaggcccaagatgaagagaatcatgctgttgtgtgtgaggtggaaggcacagctgttgggttcatgagtgtgtgctcaagagtgaacatgcaactgctgcatgagtgctttgacttgggccctttccacggactctgtttcccacatcctgatgacgttctggaatcaccacaagacctaagtgtccgaagaagtcaagatgctgagctcaggagtagcagccaaggttcccaaaaaatagtcgaggagttgcaggaacctgtctctccagataccatggaaaacatccagggaaatattgccagagaagctgcatccgaggaagctttaacagcagtccaaagtggaaatgttagtgaaccggaggacatagaaaaactcagtgacatctccactggatatgcacagtatcaccatgtcagcagtaggagcttggcatcgctcgtactgcctgaagagcccgtccacttccgccccatctacaggggagcctcagctgctttttgtattcagctgttttgtattgatgagaaatatgaagcaaggtcgctggattttatgaattttgttttcagtcttttttctgataagaacttctgtgtaatttctctgccccatctcacccccgagttcttcctcatccagaacttcgtgaaaatggtccctttcaacacctgcaccctcgagcaggacctctacgtcttccaccgggctggattgctcaagtccattaatataagatttgccactctcttggatactcctggtgtggaaaatcttgtcagcaccctcatgttgaataaaagcatattggaggacttagaccgttacaacaaggctcgcaaagaccctgatggaacactgctgcaggcatttgtagctgaagttgcagaacaaatagttggtattgcagtgatcagaaatgaaatggacattgagtacatacggtcccattacaacattgaagatttcatctacttcagtcaccaccagcgcgaagaacacgggcacatgcatcactttgccctcaaccccattttccggcactacaccaagttctttctgaaggagatcctgcgtttaggctttaaatcctgtctctactaccgtgtttacccaaaatccagagaaggcaagttccagaacccctacgcccactccctgacatctgcccttcattacttggttcccgtgcgaccacgacgacagattgtctatcctctggaaaagcttggcataaacgctccatcaaaggcggtctccaaggatccgatgagttatgctttaaaccatacaaacagaaaactaacattggaacctaaaattactgtcaatgccaagatcattgtggttggtgcatccagtgttggaatttccttcctagagacattggtattttgctctcacatgaagtttaataatcttaccctgatttcaactcatggactcccaggaaaaaaacttctggacactgaacaaaggaaatttttagccagcgaccactgttttaatgataaagattatgcactgatgtcactgtgctcctgggttaatgtcgtggtgggtagaatgaccggcatagaccgagcagccaagcacgttgtgctttccacggacgagatcgtgccctacgaccacctcatcctctgcaccgggcagcagtaccaggtcccatgccctacagaggctgatattagtcaacacctgacaaacagggaggttcccaacagcagtcagcggcggtacacggggaaagttccttgcaaccatttcactctcaacgaggaagaggattgctttaaggcactgatttggataaggaataactccatcaccacagaagggaatatcattgtctatgggaatacaattgatacttacaccaccgtggagacgctcttaaaccttggcgtgagcggcagccgcatccacctcgtgcagcccccgcccgcctccaccatcacctgcatcaacaactactcggtggagagcgccgtggcggacgcgctaggagccgccggagtcactatgtaccgggatgcgatcctggcccagtggaatgacggcctgcacccagaccccatctacagcgcctccttcaccacacccaccaagcctttcagactccagtgctctggggcattcttcctgggtcttaccattatctgcatattgccaagcctgccattccaactcccttggaggtacaaatggcacagcctaattatggtttagaactagtaaccggcagtgcgaaaaatgggacttacttccgaattcatattaacaagtataaaatggtggaaaccatcacgtgcctttctagggagcccttccccgcctccaactacatccgcttgtttggccagcacgagcaactcctcaacaacctgtgtgctcggtacgatgaaaacctgatcacagatctctatagctacttcaccgagccgtggtgcctggccctgttccacgatcgttttattgatctcaggaaagagttacgccaaatcttagcctccaaggaggaggaagatcttccttccatagagcagttagcccatcaaatagaagatgaggaaatcaacccgactgagaagcccaggcaatacctcaaaagagtttttgaggaatccatctacaaaaccctggtggagagaagcactcttgactacctgcactataaccgctaccacctgcccatgtacgcgtggccaggcatcgtttagttgtaggcagggtctcccctttatggttttcatttatttagttcctggaaacgcgctctgtagaaatagaaaagttctctgcagcctggtttgacagcgaagccagcccctggtggttttgttcattcctttccttccctgacttatgcctgtagttttctatcatcccagtaggtggcacacggccgtgtgcctctcttctggggcaggctcgctttacaaatcccaggcatgttcctgtgcagaataatccatttcagcaataaaatgagatcatagtgtgtaaaacttg

SEQ ID NO: 187415 - DNA, 3973 bp, Artificial Sequence
  derived and/or modified sequence
atggtgaccaggctgcgcgtcctccttgcggcagcgcgtggagtgcggcgtcctggagctgcggatgaggataaaaaatgtcagtactcacttctccaagaggaaaggtagaagttgttcattgccgaagaacagaatcacaggatgtttattgtatcaaaagccttattagaaaatttacctgcaagctgtttgggaagctaaatatcatctatcttctagaaaaggccaaccttgctgttaccctctgcaatgacaaggaggagatcatggcccaggccaccttcctggactaccccaactggaatgttgccaagcaggatgactgggtgtcagtgttccgggagctcgacagtgacatcccatgcacacccctgaatacgttgttcatgcacctctttgtggccgtggatgagtattctgttggctgttgcaaagagattcttcgaaccgtgtataaggcagtgccagagctgcacttcatatttctcatcgtgccatcctacatgagcctaggctcaactctcataactgtttttgaccaagtggggaacatcccgtgtctgacgtatgaggaagactttgcagtgcatatatgtcacaggcacagccactatcctcagctgcacgttcgcaaagccagggtggaagaccatgacgatctcatgccaatatttatgcgctatgacacaattctgaaggaaacttacggtgaatacttcctggccgaactaatagaggcccaagatgaagagaatcatgctgttgtgtgtgaggtggaaggcacagctgttgggttcatgagtgtgtgctcaagagtgaacatgcaactgctgcatgagtgctttgacttgggccctttccacggactctgtttcccacatcctgatgacgttctggaatcaccacaagacctaagtgtccgaagaagtcaagatgctgagctcaggagtagcagccaaggttcccaaaaaatagtcgaggagttgcaggaacctgtctctccagataccatggaaaacatccagggaaatattgccagagaagctgcatccgaggaagctttaacagcagtccaaagtggaaatgttagtgaaccggaggacatagaaaaactcagtgacatctccactggatatgcacagtatcaccatgtcagcagtaggagcttggcatcgctcgtactgcctgaagagcccgtccacttccgccccatctacaggggagcctcagctgctttttgtattcagctgttttgtattgatgagaaatatgaagcaaggtcgctggattttatgaattttgttttcagtcttttttctaacttcgtgaaaatggtccctttcaacacctgcaccctcgagcaggacctctacgtcttccaccgggctggattgctcaagtccattaatataagatttgccactctcttggatactcctggtgtggaaaatcttgtcagcaccctcatgttgaataaaagcatattggaggacttagaccgttacaacaaggctcgcaaagaccctgatggaacactgctgcaggcatttgtagctgaagttgcagaacaaatagttggtattgcagtgatcagaaatgaaatggacattgagtacatacggtcccattacaacattgaagatttcatctacttcagtcaccaccagcgcgaagaacacgggcacatgcatcactttgccctcaaccccattttccggcactacaccaagttctttctgaaggagatcctgcgtttaggctttaaatcctgtctctactaccgtgtttacccaaaatccagagaaggcaagttccagaacccctacgcccactccctgacatctgcccttcattacttggttcccgtgcgaccacgacgacagattgtctatcctctggaaaagcttggcataaacgctccatcaaaggcggtctccaaggatccgatgagttatgctttaaaccatacaaacagaaaactaacattggaacctaaaattactgtcaatgccaagatcattgtggttggtgcatccagtgttggaatttccttcctagagacattggtattttgctctcacatgaagtttaataatcttaccctgatttcaactcatggactcccaggaaaaaaacttctggacactgaacaaaggaaatttttagccagcgaccactgttttaatgataaagattatgcactgatgtcactgtgctcctgggttaatgtcgtggtgggtagaatgaccggcatagaccgagcagccaagcacgttgtgctttccacggacgagatcgtgccctacgaccacctcatcctctgcaccgggcagcagtaccaggtcccatgccctacagaggctgatattagtcaacacctgacaaacagggaggttcccaacagcagtcagcggcggtacacggggaaagttccttgcaaccatttcactctcaacgaggaagaggattgctttaaggcactgatttggataaggaataactccatcaccacagaagggaatatcattgtctatgggaatacaattgatacttacaccaccgtggagacgctcttaaaccttggcgtgagcggcagccgcatcaacaactactcggtggagagcgccgtggcggacgcgctaggagccgccggagtcactatgtaccgggatgcgatcctggcccagtggaatgacggcctgcacccagaccccatctacagcgcctccttcaccacacccaccaagcctttcagactccagtgctctatgttcttcagcttctgtgagaagaatgtggattatgaaacgtttaaagccctcaatgatgcatgtcttgtgtatgacagtcgacttgtgattgataccaacttccacaccaacgacatagccatcagagctgctggctccctcaccaaattctccaatagatactactcaaatgagtggactcacagcaacttcagttccaaagaaattggctttcagctggcagcagctatgctacatctctttgatccaacccttgagcctgtgaccgagccaccagctaatcttgaccggctcatccccatgtacaagggagccaagattcaagggggcattcttcctgggtcttaccattatctgcatattgccaagcctgccattccaactcccttggaggtacaaatggcacagcctaattatggtttagaactagtaaccggcagtgcgaaaaatgggacttacttccgaattcatattaacaagtataaaatggtggaaaccatcacgtgcctttctagggagcccttccccgcctccaactacatccgcttgtttggccagcacgagcaactcctcaacaacctgtgtgctcggtacgatgaaaacctgatcacagatctctatagctacttcaccgagccgtggtgcctggccctgttccacgatcgttttattgatctcaggaaagagttacgccaaatcttagcctccaaggaggaggaagatcttccttccatagagcagttagcccatcaaatagaagatgaggaaatcaacccgactgagaagcccaggcaatacctcaaaagagtttttgaggaatccatctacaaaaccctggtggagagaagcactcttgactacctgcactataaccgctaccacctgcccatgtacgcgtggccaggcatcgtttagttgtaggcagggtctcccctttatggttttcatttatttagttcctggaaacgcgctctgtagaaatagaaaagttctctgcagcctggtttgacagcgaagccagcccctggtggttttgttcattcctttccttccctgacttatgcctgtagttttctatcatcccagtaggtggcacacggccgtgtgcctctcttctggggcaggctcgctttacaaatcccaggcatgttcctgtgcagaataatccatttcagcaataaaatgagatcatagtgtgt

SEQ ID NO: 187416 - DNA, 2649 bp, Artificial Sequence
  derived and/or modified sequence
accgtttccatggtgaccaggctgcgcgtcctccttgcggcagcgcgtggagtgcggcgtcctggagctgcggatgagtggacttttttctctcttttggggacaggataaaaaatgtcagtactcacttctccaagaggaaaggtagaagttgttcattgccgaagaacagaatcacaggatgtttattgtatcaaaagccttattagaaaatttacctgcaagctgtttgggaagctaaatatcatctatcttctagaaaaggccaaccttgctgttaccctctgcaatgacaaggaggagatcatggcccaggccaccttcctggactaccccaactggaatgttgccaagcaggatgactgggtgtcagtgttccgggagctcgacagtgacatcccatgcacacccctgaatacgttgttcatgcacctctttgtggccgtggatgagtattctgttggctgttgcaaagagattcttcgaaccgtgtataaggcagtgccagagctgcacttcatatttctcatcgtgccatcctacatgagcctaggctcaactctcataactgtttttgaccaagtggggaacatcccgtgtctgacgtatgaggaagactttgcagtgcatatatgtcacaggcacagccactatcctcagctgcacgttcgcaaagccagggtggaagaccatgacgatctcatgccaatatttatgcgctatgacacaattctgaaggaaacttacggtgaatacttcctggccgaactaatagaggcccaagatgaagagaatcatgctgttgtgtgtgaggtggaaggcacagctgttgggttcatgagtgtgtgctcaagagtgaacatgcaactgctgcatgagtgctttgacttgggccctttccacggactctgtttcccacatcctgatgacgttctggaatcaccacaagacctaagtgtccgaagaagtcaagatgctgagctcaggagtagcagccaaggttcccaaaaaatagtcgaggagttgcaggaacctgtctctccagataccatggaaaacatccagggaaatattgccagagaagctgcatccgaggaagctttaacagcagtccaaagtggaaatgttagtgaaccggaggacatagaaaaactcagtgacatctccactggatatgcacagtatcaccatgtcagcagtaggagcttggcatcgctcgtactgcctgaagagcccgtccacttccgccccatctacaggggagcctcagctgctttttgtattcagctgttttgtattgatgagaaatatgaagcaaggtcgctggattttatgaattttgttttcagtcttttttctgataagaacttctgtgtaatttctctgccccatctcacccccgagttcttcctcatccagaacttcgtgaaaatggtccctttcaacacctgcaccctcgagcaggacctctacgtcttccaccgggctggattgctcaagtccattaatataagatttgccactctcttggatactcctggtgtggaaaatcttgtcagcaccctcatgttgaataaaagcatattggaggacttagaccgttacaacaaggctcgcaaagaccctgatggaacactgctgcaggcatttgtagctgaagttgcagaacaaatagttggtattgcagtgatcagaaatgaaatggacattgagtacatacggtcccattacaacattgaagatttcatctacttcagtcaccaccagcgcgaagaacacgggcacatgcatcactttgccctcaaccccattttccggcactacaccaagttctttctgaaggagatcctgcgtttaggctttaaatcctgtctctactaccgtgtttacccaaaatccagagaaggcaagttccagaacccctacgcccactccctgacatctgcccttcattacttggttcccgtgcgaccacgacgacagattgtctatcctctggaaaagcttggcataaacgctccatcaaaggcggtctccaaggatccgatgagttatgctttaaaccatacaaacagaaaactaacattggaacctaaaattactgtcaatgccaagatcattgtggttggtgcatccagtgttggaatttccttcctagagacattggtattttgctctcacatgaagtttaataatcttaccctgatttcaactcatggactcccaggaaaaaaacttctggacactgaacaaaggaaatttttagccagcgaccactgttttaatgataaagattatgcactgatgtcactgtgctcctgggttaatgtcgtggtgggtagaatgaccggcatagaccgagcagccaagcacgttgtgctttccacggacgagatcgtgccctacgaccacctcatcctctgcaccgggcagcagtaccaggtcccatgccctacagaggctgatattagtcaacacctgacaaacagggaggttcccaacagcagtcagcggcggtacacggggaaagttccttgcaaccatttcactctcaacgaggaagaggattgctttaaggcactgatttggataaggaataactccatcaccacagaagatggaggaagagcatcagtgttattctgctga

SEQ ID NO: 187417 - DNA, 3714 bp, Artificial Sequence
  derived and/or modified sequence
atgagcgtgctgaccagccccagaggcaaggtggaggtggtgcactgcagaagaaccgagagccaggacgtgtactgcatcaagagcctgatcagaaagttcacctgcaagctgttcggcaagctgaacatcatctacctgctggagaaggccaacctggccgtgaccctgtgcaacgacaaggaggagatcatggcccaggccaccttcctggactaccccaactggaacgtggccaagcaggacgactgggtgagcgtgttcagagagctggacagcgacatcccctgcacccccctgaacaccctgttcatgcacctgttcgtggccgtggacgagtacagcgtgggctgctgcaaggagatcctgagaaccgtgtacaaggccgtgcccgagctgcacttcatcttcctgatcgtgcccagctacatgagcctgggcagcaccctgatcaccgtgttcgaccaggtgggcaacatcccctgcctgacctacgaggaggacttcgccgtgcacatctgccacagacacagccactacccccagctgcacgtgagaaaggccagagtggaggaccacgacgacctgatgcccatcttcatgagatacgacaccatcctgaaggagacctacggcgagtacttcctggccgagctgatcgaggcccaggacgaggagaaccacgccgtggtgtgcgaggtggagggcaccgccgtgggcttcatgagcgtgtgcagcagagtgaacatgcagctgctgcacgagtgcttcgacctgggccccttccacggcctgtgcttcccccaccccgacgacgtgctggagagcccccaggacctgagcgtgagaagaagccaggacgccgagctgagaagcagcagccagggcagccagaagatcgtggaggagctgcaggagcccgtgagccccgacaccatggagaacatccagggcaacatcgccagagaggccgccagcgaggaggccctgaccgccgtgcagagcggcaacgtgagcgagcccgaggacatcgagaagctgagcgacatcagcaccggctacgcccagtaccaccacgtgagcagcagaagcctggccagcctggtgctgcccgaggagcccgtgcacttcagacccatctacagaggcgccagcgccgccttctgcatccagctgttctgcatcgacgagaagtacgaggccagaagcctggacttcatgaacttcgtgttcagcctgttcagcgacaagaacttctgcgtgatcagcctgccccacctgacccccgagttcttcctgatccagaacttcgtgaagatggtgcccttcaacacctgcaccctggagcaggacctgtacgtgttccacagagccggcctgctgaagagcatcaacatcagattcgccaccctgctggacacccccggcgtggagaacctggtgagcaccctgatgctgaacaagagcatcctggaggacctggacagatacaacaaggccagaaaggaccccgacggcaccctgctgcaggccttcgtggccgaggtggccgagcagatcgtgggcatcgccgtgatcagaaacgagatggacatcgagtacatcagaagccactacaacatcgaggacttcatctacttcagccaccaccagagagaggagcacggccacatgcaccacttcgccctgaaccccatcttcagacactacaccaagttcttcctgaaggagatcctgagactgggcttcaagagctgcctgtactacagagtgtaccccaagagcagagagggcaagttccagaacccctacgcccacagcctgaccagcgccctgcactacctggtgcccgtgagacccagaagacagatcgtgtaccccctggagaagctgggcatcaacgcccccagcaaggccgtgagcaaggaccccatgagctacgccctgaaccacaccaacagaaagctgaccctggagcccaagatcaccgtgaacgccaagatcatcgtggtgggcgccagcagcgtgggcatcagcttcctggagaccctggtgttctgcagccacatgaagttcaacaacctgaccctgatcagcacccacggcctgcccggcaagaagctgctggacaccgagcagagaaagttcctggccagcgaccactgcttcaacgacaaggactacgccctgatgagcctgtgcagctgggtgaacgtggtggtgggcagaatgaccggcatcgacagagccgccaagcacgtggtgctgagcaccgacgagatcgtgccctacgaccacctgatcctgtgcaccggccagcagtaccaggtgccctgccccaccgaggccgacatcagccagcacctgaccaacagagaggtgcccaacagcagccagagaagatacaccggcaaggtgccctgcaaccacttcaccctgaacgaggaggaggactgcttcaaggccctgatctggatcagaaacaacagcatcaccaccgagggcaacatcatcgtgtacggcaacaccatcgacacctacaccaccgtggagaccctgctgaacctgggcgtgagcggcagcagaatccacctggtgcagcccccccccgccagcaccatcacctgcatcaacaactacagcgtggagagcgccgtggccgacgccctgggcgccgccggcgtgaccatgtacagagacgccatcctggcccagtggaacgacggcctgcaccccgaccccatctacagcgccagcttcaccacccccaccaagcccttcagactgcagtgcagcatgttcttcagcttctgcgagaagaacgtggactacgagaccttcaaggccctgaacgacgcctgcctggtgtacgacagcagactggtgatcgacaccaacttccacaccaacgacatcgccatcagagccgccggcagcctgaccaagttcagcaacagatactacagcaacgagtggacccacagcaacttcagcagcaaggagatcggcttccagctggccgccgccatgctgcacctgttcgaccccaccctggagcccgtgaccgagccccccgccaacctggacagactgatccccatgtacaagggcgccaagatccagggcggcatcctgcccggcagctaccactacctgcacatcgccaagcccgccatccccacccccctggaggtgcagatggcccagcccaactacggcctggagctggtgaccggcagcgccaagaacggcacctacttcagaatccacatcaacaagtacaagatggtggagaccatcacctgcctgagcagagagcccttccccgccagcaactacatcagactgttcggccagcacgagcagctgctgaacaacctgtgcgccagatacgacgagaacctgatcaccgacctgtacagctacttcaccgagccctggtgcctggccctgttccacgacagattcatcgacctgagaaaggagctgagacagatcctggccagcaaggaggaggaggacctgcccagcatcgagcagctggcccaccagatcgaggacgaggagatcaaccccaccgagaagcccagacagtacctgaagagagtgttcgaggagagcatctacaagaccctggtggagagaagcaccctggactacctgcactacaacagataccacctgcccatgtacgcctggcccggcatcgtgtag

SEQ ID NO: 187418 - DNA, 3534 bp, Artificial Sequence
  derived and/or modified sequence
atgagcgtgctgaccagccccagaggcaaggtggaggtggtgcactgcagaagaaccgagagccaggacgtgtactgcatcaagagcctgatcagaaagttcacctgcaagctgttcggcaagctgaacatcatctacctgctggagaaggccaacctggccgtgaccctgtgcaacgacaaggaggagatcatggcccaggccaccttcctggactaccccaactggaacgtggccaagcaggacgactgggtgagcgtgttcagagagctggacagcgacatcccctgcacccccctgaacaccctgttcatgcacctgttcgtggccgtggacgagtacagcgtgggctgctgcaaggagatcctgagaaccgtgtacaaggccgtgcccgagctgcacttcatcttcctgatcgtgcccagctacatgagcctgggcagcaccctgatcaccgtgttcgaccaggtgggcaacatcccctgcctgacctacgaggaggacttcgccgtgcacatctgccacagacacagccactacccccagctgcacgtgagaaaggccagagtggaggaccacgacgacctgatgcccatcttcatgagatacgacaccatcctgaaggagacctacggcgagtacttcctggccgagctgatcgaggcccaggacgaggagaaccacgccgtggtgtgcgaggtggagggcaccgccgtgggcttcatgagcgtgtgcagcagagtgaacatgcagctgctgcacgagtgcttcgacctgggccccttccacggcctgtgcttcccccaccccgacgacgtgctggagagcccccaggacctgagcgtgagaagaagccaggacgccgagctgagaagcagcagccagggcagccagaagatcgtggaggagctgcaggagcccgtgagccccgacaccatggagaacatccagggcaacatcgccagagaggccgccagcgaggaggccctgaccgccgtgcagagcggcaacgtgagcgagcccgagagcctggacttcatgaacttcgtgttcagcctgttcagcgacaagaacttctgcgtgatcagcctgccccacctgacccccgagttcttcctgatccagaacttcgtgaagatggtgcccttcaacacctgcaccctggagcaggacctgtacgtgttccacagagccggcctgctgaagagcatcaacatcagattcgccaccctgctggacacccccggcgtggagaacctggtgagcaccctgatgctgaacaagagcatcctggaggacctggacagatacaacaaggccagaaaggaccccgacggcaccctgctgcaggccttcgtggccgaggtggccgagcagatcgtgggcatcgccgtgatcagaaacgagatggacatcgagtacatcagaagccactacaacatcgaggacttcatctacttcagccaccaccagagagaggagcacggccacatgcaccacttcgccctgaaccccatcttcagacactacaccaagttcttcctgaaggagatcctgagactgggcttcaagagctgcctgtactacagagtgtaccccaagagcagagagggcaagttccagaacccctacgcccacagcctgaccagcgccctgcactacctggtgcccgtgagacccagaagacagatcgtgtaccccctggagaagctgggcatcaacgcccccagcaaggccgtgagcaaggaccccatgagctacgccctgaaccacaccaacagaaagctgaccctggagcccaagatcaccgtgaacgccaagatcatcgtggtgggcgccagcagcgtgggcatcagcttcctggagaccctggtgttctgcagccacatgaagttcaacaacctgaccctgatcagcacccacggcctgcccggcaagaagctgctggacaccgagcagagaaagttcctggccagcgaccactgcttcaacgacaaggactacgccctgatgagcctgtgcagctgggtgaacgtggtggtgggcagaatgaccggcatcgacagagccgccaagcacgtggtgctgagcaccgacgagatcgtgccctacgaccacctgatcctgtgcaccggccagcagtaccaggtgccctgccccaccgaggccgacatcagccagcacctgaccaacagagaggtgcccaacagcagccagagaagatacaccggcaaggtgccctgcaaccacttcaccctgaacgaggaggaggactgcttcaaggccctgatctggatcagaaacaacagcatcaccaccgagggcaacatcatcgtgtacggcaacaccatcgacacctacaccaccgtggagaccctgctgaacctgggcgtgagcggcagcagaatccacctggtgcagcccccccccgccagcaccatcacctgcatcaacaactacagcgtggagagcgccgtggccgacgccctgggcgccgccggcgtgaccatgtacagagacgccatcctggcccagtggaacgacggcctgcaccccgaccccatctacagcgccagcttcaccacccccaccaagcccttcagactgcagtgcagcatgttcttcagcttctgcgagaagaacgtggactacgagaccttcaaggccctgaacgacgcctgcctggtgtacgacagcagactggtgatcgacaccaacttccacaccaacgacatcgccatcagagccgccggcagcctgaccaagttcagcaacagatactacagcaacgagtggacccacagcaacttcagcagcaaggagatcggcttccagctggccgccgccatgctgcacctgttcgaccccaccctggagcccgtgaccgagccccccgccaacctggacagactgatccccatgtacaagggcgccaagatccagggcggcatcctgcccggcagctaccactacctgcacatcgccaagcccgccatccccacccccctggaggtgcagatggcccagcccaactacggcctggagctggtgaccggcagcgccaagaacggcacctacttcagaatccacatcaacaagtacaagatggtggagaccatcacctgcctgagcagagagcccttccccgccagcaactacatcagactgttcggccagcacgagcagctgctgaacaacctgtgcgccagatacgacgagaacctgatcaccgacctgtacagctacttcaccgagccctggtgcctggccctgttccacgacagattcatcgacctgagaaaggagctgagacagatcctggccagcaaggaggaggaggacctgcccagcatcgagcagctggcccaccagatcgaggacgaggagatcaaccccaccgagaagcccagacagtacctgaagagagtgttcgaggagagcatctacaagaccctggtggagagaagcaccctggactacctgcactacaacagataccacctgcccatgtacgcctggcccggcatcgtgtag

SEQ ID NO: 187419 - DNA, 3612 bp, Artificial Sequence
  derived and/or modified sequence
atgagcgtgctgaccagccccagaggcaaggtggaggtggtgcactgcagaagaaccgagagccaggacgtgtactgcatcaagagcctgatcagaaagttcacctgcaagctgttcggcaagctgaacatcatctacctgctggagaaggccaacctggccgtgaccctgtgcaacgacaaggaggagatcatggcccaggccaccttcctggactaccccaactggaacgtggccaagcaggacgactgggtgagcgtgttcagagagctggacagcgacatcccctgcacccccctgaacaccctgttcatgcacctgttcgtggccgtggacgagtacagcgtgggctgctgcaaggagatcctgagaaccgtgtacaaggccgtgcccgagctgcacttcatcttcctgatcgtgcccagctacatgagcctgggcagcaccctgatcaccgtgttcgaccaggtgggcaacatcccctgcctgacctacgaggaggacttcgccgtgcacatctgccacagacacagccactacccccagctgcacgtgagaaaggccagagtggaggaccacgacgacctgatgcccatcttcatgagatacgacaccatcctgaaggagacctacggcgagtacttcctggccgagctgatcgaggcccaggacgaggagaaccacgccgtggtgtgcgaggtggagggcaccgccgtgggcttcatgagcgtgtgcagcagagtgaacatgcagctgctgcacgagtgcttcgacctgggccccttccacggcctgtgcttcccccaccccgacgacgtgctggagagcccccaggacctgagcgtgagaagaagccaggacgccgagctgagaagcagcagccagggcagccagaagatcgtggaggagctgcaggagcccgtgagccccgacaccatggagaacatccagggcaacatcgccagagaggccgccagcgaggaggccctgaccgccgtgcagagcggcaacgtgagcgagcccgaggacatcgagaagctgagcgacatcagcaccggctacgcccagtaccaccacgtgagcagcagaagcctggccagcctggtgctgcccgaggagcccgtgcacttcagacccatctacagaggcgccagcgccgccttctgcatccagctgttctgcatcgacgagaagtacgaggccagaagcctggacttcatgaacttcgtgttcagcctgttcagcaacttcgtgaagatggtgcccttcaacacctgcaccctggagcaggacctgtacgtgttccacagagccggcctgctgaagagcatcaacatcagattcgccaccctgctggacacccccggcgtggagaacctggtgagcaccctgatgctgaacaagagcatcctggaggacctggacagatacaacaaggccagaaaggaccccgacggcaccctgctgcaggccttcgtggccgaggtggccgagcagatcgtgggcatcgccgtgatcagaaacgagatggacatcgagtacatcagaagccactacaacatcgaggacttcatctacttcagccaccaccagagagaggagcacggccacatgcaccacttcgccctgaaccccatcttcagacactacaccaagttcttcctgaaggagatcctgagactgggcttcaagagctgcctgtactacagagtgtaccccaagagcagagagggcaagttccagaacccctacgcccacagcctgaccagcgccctgcactacctggtgcccgtgagacccagaagacagatcgtgtaccccctggagaagctgggcatcaacgcccccagcaaggccgtgagcaaggaccccatgagctacgccctgaaccacaccaacagaaagctgaccctggagcccaagatcaccgtgaacgccaagatcatcgtggtgggcgccagcagcgtgggcatcagcttcctggagaccctggtgttctgcagccacatgaagttcaacaacctgaccctgatcagcacccacggcctgcccggcaagaagctgctggacaccgagcagagaaagttcctggccagcgaccactgcttcaacgacaaggactacgccctgatgagcctgtgcagctgggtgaacgtggtggtgggcagaatgaccggcatcgacagagccgccaagcacgtggtgctgagcaccgacgagatcgtgccctacgaccacctgatcctgtgcaccggccagcagtaccaggtgccctgccccaccgaggccgacatcagccagcacctgaccaacagagaggtgcccaacagcagccagagaagatacaccggcaaggtgccctgcaaccacttcaccctgaacgaggaggaggactgcttcaaggccctgatctggatcagaaacaacagcatcaccaccgagggcaacatcatcgtgtacggcaacaccatcgacacctacaccaccgtggagaccctgctgaacctgggcgtgagcggcagcagaatcaacaactacagcgtggagagcgccgtggccgacgccctgggcgccgccggcgtgaccatgtacagagacgccatcctggcccagtggaacgacggcctgcaccccgaccccatctacagcgccagcttcaccacccccaccaagcccttcagactgcagtgcagcatgttcttcagcttctgcgagaagaacgtggactacgagaccttcaaggccctgaacgacgcctgcctggtgtacgacagcagactggtgatcgacaccaacttccacaccaacgacatcgccatcagagccgccggcagcctgaccaagttcagcaacagatactacagcaacgagtggacccacagcaacttcagcagcaaggagatcggcttccagctggccgccgccatgctgcacctgttcgaccccaccctggagcccgtgaccgagccccccgccaacctggacagactgatccccatgtacaagggcgccaagatccagggcggcatcctgcccggcagctaccactacctgcacatcgccaagcccgccatccccacccccctggaggtgcagatggcccagcccaactacggcctggagctggtgaccggcagcgccaagaacggcacctacttcagaatccacatcaacaagtacaagatggtggagaccatcacctgcctgagcagagagcccttccccgccagcaactacatcagactgttcggccagcacgagcagctgctgaacaacctgtgcgccagatacgacgagaacctgatcaccgacctgtacagctacttcaccgagccctggtgcctggccctgttccacgacagattcatcgacctgagaaaggagctgagacagatcctggccagcaaggaggaggaggacctgcccagcatcgagcagctggcccaccagatcgaggacgaggagatcaaccccaccgagaagcccagacagtacctgaagagagtgttcgaggagagcatctacaagaccctggtggagagaagcaccctggactacctgcactacaacagataccacctgcccatgtacgcctggcccggcatcgtgtag

SEQ ID NO: 187420 - DNA, 3714 bp, Artificial Sequence
  derived and/or modified sequence
atgtccgtgctgacatcaccccgggggaaagtggaagttgttcactgcagacggaccgaatcccaggacgtatactgcattaagagcctgatccggaagttcacgtgtaagctatttggcaaattaaatattatctatttgttagagaaggcaaatctggctgtaactttgtgcaatgacaaggaggagataatggctcaggccaccttcctagactaccccaattggaatgtcgccaagcaggatgactgggtgagtgttttcagggagctagattcagatatcccttgcactccactcaatacgctgttcatgcatctgtttgtggcggttgacgagtatagtgtgggctgctgcaaggagatcctgcgtacagtttacaaggcggtgccggagttacacttcattttcctgattgtgccctcatacatgagcctgggaagtacactgattacagtgtttgatcaggttggcaatattccctgtctgacctacgaggaggacttcgcagtccacatctgtcaccgccactcccactacccccagctccacgtgagaaaagcccgggtagaggatcatgatgatctgatgcctatctttatgaggtacgataccatcttgaaagagacttacggggaatatttcctggctgaacttatagaggcgcaggatgaggagaaccacgccgtggtctgcgaagtcgaggggactgccgtcggattcatgagcgtgtgcagtagagttaatatgcaactgttgcacgaatgctttgatctgggcccgttccacgggctctgcttcccacatcctgacgacgtgctagaatccccccaagatttaagtgtccggcggagccaggacgccgaattgaggtccagctcccagggaagtcaaaagatagtggaggagttgcaggaacccgtgtccccagataccatggagaatattcagggaaatatcgctcgcgaggccgccagtgaagaagcactgacggctgtccaatccggcaatgtcagtgagccggaggacatcgaaaaactcagcgacatctccacaggctatgcccagtatcatcacgtttcttcccgctccttagcatctctcgtgctgccggaggaacccgtccatttccgtcccatctaccggggtgccagtgcagcattctgtatccaattattttgcatcgacgaaaagtacgaggcccgcagcctagattttatgaactttgtcttttccctgttctccgacaaaaacttttgcgtcatttctttaccgcatctcacaccggaatttttcctcattcagaacttcgttaagatggtcccctttaacacttgtaccctggagcaggacctgtacgtgtttcatcgtgctggtctcctgaagagcatcaatattcggttcgctactctgctagacactcctggggtggaaaatctcgtatcgacactcatgctcaataagagcatcctcgaggatctagaccgctacaataaggcacggaaagaccccgatggaaccttactgcaggccttcgtagccgaggtagcagaacagatcgtgggaatagctgtcatcagaaacgagatggatattgaatacatcagatctcactacaacattgaagattttatttatttcagtcaccatcaaagagaagagcacggacacatgcatcatttcgctctgaaccccatcttccgacattatacgaaattcttcctgaaggagattctgcggctggggttcaaatcttgcctttattacagggtttaccctaaatcacgagagggcaaatttcagaacccctatgcgcactccctgacctctgccttacactatctagtgccagtcagaccacggagacagatcgtttacccacttgagaaactcggcataaacgccccttccaaagctgtgtccaaggacccaatgagttatgccctcaatcacacaaataggaaattgactctggaacctaagattacagtgaatgccaaaatcattgtagttggggcgtcttcagtaggtattagcttcctagaaacgctcgtgttctgtagccatatgaagttcaataacctgactttgatttctacacacggacttccgggcaaaaaactgctggacactgagcagaggaagtttctggcttccgaccattgtttcaatgacaaggattacgctctgatgtccctgtgcagctgggtgaacgtagtggtcgggaggatgacgggaatcgatcgtgccgccaagcacgtggtcctgtcgacagacgaaatcgtgccgtacgaccatctaatactgtgcaccggtcagcaataccaagtgccatgcccaaccgaggcagatatatcccaacatctgacgaaccgagaagtgcctaactcttcccagcggcgttacacaggcaaagtgccatgtaatcatttcaccctgaatgaggaagaggactgttttaaagcacttatctggattcggaacaacagcatcaccaccgaaggcaatattatcgtgtacggaaacactatagatacttacacgaccgtggagacactgctgaacctgggcgtttctggttcgcgcatccacctggtgcagccaccacctgcctccactatcacctgtatcaataactactcagttgaaagcgccgtggcagatgctttgggggctgcaggagtgacaatgtacagagatgcaatcctcgcccagtggaatgatgggttgcatcccgaccccatctactcagcctcctttactaccccaacaaagcctttcagacttcagtgttccatgttcttctctttttgtgaaaaaaacgtggattatgaaacgttcaaggccctgaacgatgcctgcttggtgtatgattctaggctggtaattgatactaacttccacacaaacgatattgcaattcgagcggctggatcgcttaccaaattctcaaatagatactattccaatgaatggacacactccaatttttcttcaaaagaaatcggattccagctggctgctgcaatgctgcacctgttcgacccaaccttggagcctgtgactgaaccccctgccaatctcgatcgcttaatccctatgtataaaggagcgaaaatccaaggcgggatactccccggctcttaccactatctacatatcgcaaagcccgccattcccactcccctggaggtacagatggctcagcccaattatggactagagttagtcacaggcagtgcgaagaatggaacttactttcgtatccacataaacaagtacaaaatggttgagacaatcacatgcttgtccagggaaccctttcctgcttccaactacatccgattattcgggcaacacgagcaacttctgaacaacctctgtgccagatacgacgagaacctgatcacagatctatatagctattttacagagccgtggtgtctggctctattccatgatcgattcatagatcttagaaaagagctccggcagatactggcttcgaaggaagaggaggacctgccgagcatagagcagctggcgcaccagattgaggatgaggaaataaaccctacggagaagcctcgccagtatctgaagcgcgtgtttgaggagagcatatacaagaccttagtggagaggagcacccttgattaccttcactataatcgataccacctcccaatgtatgcatggcccggcatcgtgtag

SEQ ID NO: 187421 - DNA, 3534 bp, Artificial Sequence
  derived and/or modified sequence
atgtccgttctgacttcaccacgcggaaaggtggaggttgttcactgtcgtcgcacagaaagccaggacgtatactgcattaagagcctaatccgtaaatttacttgcaagctgttcggtaagctaaatattatctacctgctcgaaaaagcgaacctggcagtgactctctgcaacgataaggaggaaataatggctcaagccacgtttctggattatccaaattggaacgtcgccaaacaagatgactgggtttcggttttcagagagctggattcagatattccttgtactccactgaacactcttttcatgcacctctttgtcgccgtggacgagtacagcgtcggctgttgtaaagagatcttaaggacagtgtataaagccgtgcccgagctccattttatctttctgattgtcccctcttacatgtcgttaggctctacacttatcacggtgtttgatcaggttgggaatattccatgcctgacctacgaggaggactttgccgtccatatatgtcatcggcatagccattacccccagcttcacgtccggaaggctcgagtggaagaccatgatgatctgatgccgatatttatgcggtatgatacaatcctcaaagagacctacggcgagtacttcctggccgagctaatcgaggcacaggatgaagaaaaccatgccgtggtgtgcgaagtggagggaacggccgtgggttttatgtcagtgtgctcacgagtgaacatgcagttactccatgaatgttttgacctgggcccctttcacgggttgtgttttccccatcctgacgatgtgttagaaagcccacaggatctaagtgtgaggcgatcccaagatgcagagctcagatcttcctctcagggctcccagaagattgtagaggagttacaagagcccgtcagtcccgacaccatggagaatatccaggggaacattgcccgggaggccgcctcggaagaagctctgacagcagtacaatctggcaatgtcagcgaacctgagtccttagactttatgaatttcgtgttctctcttttcagtgacaaaaatttctgcgtgatcagcttgccccatctgacaccggaattttttttgatccagaatttcgtcaagatggtaccgttcaacacgtgtactttggagcaggacttgtatgtgttccaccgggctggactactgaagagtatcaacatccgattcgcgaccctgcttgacaccccgggagtagagaacctggtctctactctgatgctgaataagtctatattggaagatctggaccggtataacaaggcgcgtaaggatcccgacggcacgctcctccaggcctttgttgccgaagtagcagagcaaatcgtcggcatcgccgttatacgcaacgagatggacatagaatacatccggagccactataacatcgaggatttcatttacttttcccaccatcagagggaagagcacggccatatgcaccacttcgctctcaaccccatctttagacactatactaagttcttcttgaaggagatcctccgcctggggtttaaaagctgtctctattaccgcgtttaccctaagagccgggagggtaagttccagaacccatatgcccattcattaacctcagctctgcactatcttgttccagtgaggcccagacggcagattgtttaccctcttgagaagctggggatcaacgcaccctctaaggctgtgagcaaagacccaatgtcctacgcactcaatcacacaaatagaaaactgactctcgagccaaagataactgtgaatgccaaaatcatagttgttggggcatccagcgtcgggatcagtttccttgagacactggtattctgcagccatatgaagttcaataacctgacactgatttccacgcacgggctgcccggcaaaaaattgctggatacagagcagagaaagtttctggcgtctgatcattgcttcaacgacaaggactatgcgttaatgtccctgtgttcatgggtcaatgtggtagtgggccggatgacagggatagacagggctgcaaagcacgtagtcttatcaactgacgagattgtgccctatgatcacctcatactgtgcacaggccagcagtaccaggtaccttgcccgactgaggccgacatttctcagcatttgaccaatcgggaggtgcccaactccagccagagaagatacactggaaaggtgccatgtaaccacttcacgctaaatgaggaagaagactgctttaaggccctcatctggatccgcaacaactccataactaccgaaggcaacatcattgtgtacggaaacactattgatacgtacaccacagtagaaaccctgctcaacctcggagtgtccggatctagaattcacctggtccaacccccccctgcatctaccattacctgcatcaataattatagcgttgagtctgccgtcgccgatgcgctgggcgctgccggagttaccatgtaccgtgatgcaatcctggcccaatggaatgatggactgcacccagaccccatctacagtgcctccttcaccactccaactaagccattccgcctgcagtgttcaatgttcttcagcttttgcgagaagaatgtagattacgagacctttaaggctctgaatgatgcctgccttgtttatgattcaagactcgtgatcgatactaactttcacactaatgatatcgccatccgcgcagcaggctcattgacaaaattctctaacagatactactcaaacgaatggacccactctaattttagcagcaaggaaattggatttcagcttgcggcagctatgctgcacctctttgatcccacccttgaacctgtgacagaaccccccgccaatttggacagactgatcccaatgtataaaggggcaaagattcaggggggaatcttgcccggcagctaccattatctccacatcgccaaacccgccattcctacaccgctcgaggtgcagatggcccagcccaactacggcttagaattagtgaccgggtctgctaaaaacggcacctactttaggatacacataaacaagtataagatggtagagacaataacttgccttagtcgcgagcccttccccgccagcaattacattcgtctgttcgggcaacatgagcagctgctaaacaacctctgtgcccgatacgacgagaatctcattacagatttgtatagctactttaccgagccctggtgcctcgcactctttcacgacagattcatcgacctacgaaaggaattgaggcaaattcttgccagtaaggaggaagaagacctgccatccattgagcagctggctcatcagatcgaggacgaagaaattaaccctacagaaaaaccacgccagtacctcaaaagagtgttcgaagaatccatatacaaaacgctcgttgagagatccacgctagattacctgcattataatagataccacctaccaatgtatgcctggcctggtatcgtgtag

SEQ ID NO: 187422 - DNA, 3612 bp, Artificial Sequence
  derived and/or modified sequence
atgagtgtgctgactagccctagggggaaggtagaggtggttcattgtaggcggactgaatctcaggacgtctactgcataaaatctctgatccgcaagttcacttgtaagctgttcggaaagctgaacatcatttatcttctggagaaggctaacttggctgtgactctttgtaatgataaagaagagattatggcccaggccacgttcttggactatcccaattggaacgtggctaagcaggacgactgggttagcgtcttccgtgagcttgattccgacatcccatgcactcctttgaataccctattcatgcacctctttgtcgctgtggatgagtacagcgtcggctgctgcaaggagatcctgcgcacagtgtacaaggcagttcccgaactacattttattttcctgatcgttccttcgtacatgtccctcggatccacgctgatcaccgtgtttgatcaagtggggaatataccttgcttgacttacgaagaggatttcgcggtccatatttgccacagacattcccattacccacagctccacgtaaggaaagccagagttgaggaccacgatgacctcatgccaatctttatgcggtacgatacaatactaaaggagacttacggcgagtactttctcgccgaactgatcgaggcgcaggacgaagaaaaccacgctgtggtatgtgaggtagaagggactgccgtggggttcatgtccgtgtgttcaagggtcaatatgcagttgttgcatgaatgctttgacctggggcctttccacgggctctgtttcccgcatccagatgacgtcctcgagtcccctcaggatctgtccgtccgacgatcacaggatgctgaactacggtcctcatcccagggaagtcaaaaaatcgtcgaagaacttcaggagcccgtctcgccggataccatggaaaatatccaggggaatatagctcgggaggcagctagcgaagaagcgctcactgccgttcagtctggcaacgttagcgagcccgaagatatcgaaaaactttccgatatctctaccgggtacgcccagtaccaccatgtgagctcaaggtccttagcttctctggtactgccggaagaacccgtgcactttaggcctatatacagaggcgcttccgcagccttctgcattcagctgttttgtattgatgagaaatatgaagctagaagcctcgactttatgaacttcgtgttctctctgttttctaatttcgttaaaatggtcccctttaatacctgtacacttgagcaggacttatatgtctttcatagagcgggtctcctaaagtctatcaatattagatttgcaacgcttctcgacacccccggagtggagaatttggttagcaccctaatgctcaacaagtccatattggaggatttggatcgctacaataaggcaagaaaagaccctgatggtacacttcttcaagcttttgtcgcagaagtagctgagcagattgtcggcatcgcggtgatccgaaatgagatggatattgagtatattcgcagtcactacaatatagaagactttatctacttttcacaccaccagcgagaggagcacggacacatgcatcactttgcgcttaaccctatcttccgacattacaccaagttcttccttaaggagattttgcgcctggggtttaagagctgtctttactacagagtctaccctaagagtagggagggaaagtttcagaatccatacgcgcacagccttacatcagcgctgcactacctcgtccccgttcgaccgcgaaggcagatagtataccccctggagaaactgggtatcaacgcacccagcaaggccgtgagtaaagaccctatgagttacgcactgaaccacaccaatagaaagctgactctcgagcccaagatcaccgtaaatgcaaagatcattgtggttggcgctagtagtgtcgggatcagtttcctggaaactcttgttttctgctcccacatgaaatttaacaatctcactctgatctctacacacggtttaccaggcaaaaaactccttgacaccgaacagagaaaatttctggcaagtgaccattgctttaacgataaggactacgcactcatgtctctctgctcatgggtcaatgttgttgtggggaggatgacaggaattgaccgcgcagcaaaacacgtggtgctctccacggacgagatcgtcccatatgatcatcttattctgtgtacaggccagcaataccaggtaccatgtccaaccgaggcagatattagtcagcacctgaccaacagggaagtgcctaattcctcccaaagaaggtataccggtaaggtcccatgcaaccatttcaccctgaatgaagaagaggattgctttaaagctctaatttggatccgtaataattctattacaacagaggggaatatcatcgtgtacggaaatactattgatacatacacaaccgtagagactcttctgaacttgggagtctccgggagccggatcaataattactccgtggaaagcgccgtcgccgatgccctgggagcagcaggcgtcactatgtaccgggatgccattctggcccagtggaacgacggtttgcacccagatcccatctactcggcctcctttacaactccgacaaagccattcagactgcagtgctcaatgttttttagtttctgcgagaaaaatgtggattacgagacctttaaggcccttaatgacgcctgtctcgtctacgacagtcgtctcgtaatcgatactaatttccataccaacgatatcgccatccgcgccgccggaagcctgactaagttttcaaacaggtattattcaaatgaatggacacacagtaacttctccagcaaggagatagggttccagcttgccgcagcaatgctgcacctgttcgaccccacgctggagcccgtgactgagccccctgctaatctcgatcgcctgattcccatgtacaagggagcgaagattcagggtgggatcctgcccgggtcttatcactacctgcacatcgctaaaccagcaatccccactccgcttgaagtgcagatggctcagcctaactatggacttgagctggttactggatccgccaaaaatggtacctatttccggatccacattaataaatacaaaatggtggaaacaataacttgcctgtcaagagagccctttcccgcctccaattacatcaggcttttcgggcaacatgaacagctgctgaataacctgtgtgctcggtacgatgaaaatttgatcaccgatctgtacagctacttcaccgaaccatggtgcctggcgctgtttcatgatcgatttattgacctccggaaggagcttcgacaaattctggccagtaaagaggaagaggatctgccttcgattgagcagttagcgcaccaaatcgaggatgaagaaataaacccaacagaaaagccccgccagtaccttaagcgagtgtttgaagaaagcatatataaaaccttagtggagcggtctactctggactacttacattataacagataccacttgccaatgtatgcctggcccggaatagtatag

SEQ ID NO: 187423 - DNA, 3714 bp, Artificial Sequence
  derived and/or modified sequence
atgtctgtgctgaccagcccccggggcaaggtggaggtggtgcactgcagaagaacagagagccaggatgtgtactgcatcaagagcctcatcaggaagttcacctgcaagctgtttgggaagctgaacatcatctacctgctggagaaggccaacctggccgtgaccctgtgcaatgacaaggaggagatcatggcccaggccaccttcctggactaccccaactggaatgtggccaagcaggatgactgggtgtctgtgttccgggagctggacagcgacatcccctgcacccccctgaacaccctcttcatgcacctgtttgtggccgtggatgagtacagcgtgggctgctgcaaggagatcctgaggacagtgtacaaggctgtgcctgagctgcacttcatcttcctgattgtgcccagctacatgagcctgggcagcaccctcatcaccgtgtttgaccaggtgggcaacatcccctgcctgacctatgaagaagattttgctgtgcacatctgccaccgccacagccactacccccagctgcacgtgaggaaggcccgggtggaggaccatgatgacctgatgcccatcttcatgagatatgacaccatcctgaaggagacctatggagagtacttcctggccgagctgattgaggcccaggatgaggagaaccacgctgtggtgtgtgaggtggagggcacagctgtgggcttcatgtctgtgtgcagccgggtgaacatgcagctgctgcatgaatgttttgacctgggccccttccacggcctgtgcttcccccacccagatgatgtgctggagagcccccaggacctgtctgtgagaagaagccaggatgctgagctgcggagcagcagccagggcagccagaagatcgtggaggagctgcaggagcctgtgtccccagacaccatggagaacatccagggcaacatcgcccgggaggccgccagcgaggaggccctgacagctgtgcagagcggaaatgtgtctgagcctgaggacatcgagaagctgagtgacatcagcacaggctacgcccagtaccaccacgtgagcagccgcagcctggccagcctggtgctgcctgaggagcctgtgcacttccggcccatctacagaggagccagcgctgccttctgcatccagctgttctgcattgatgagaagtatgaggcccggagcctggacttcatgaactttgtgttcagcctcttcagtgacaagaacttctgtgtgatcagcctgccccacctgaccccagagttcttcctgatccagaactttgtgaagatggtgcccttcaacacctgcaccctggagcaggacctgtatgtgttccaccgggccggcctgctgaagagcatcaacatccgctttgccaccctgctggacaccccaggagtggagaacctggtgtccaccctgatgctgaacaagagcatcctggaggacctggaccgctacaacaaggccaggaaggaccctgatggcaccctgctgcaggcctttgtggccgaggtggccgagcagatcgtgggcattgctgtgatcagaaatgagatggacatcgagtacatccgcagccactacaacatcgaggacttcatctacttcagccaccaccagcgggaggagcacggccacatgcaccactttgccctgaaccccatcttccgccactacaccaagttcttcctgaaggagatcctgcggctgggcttcaagagctgcctgtactacagagtgtaccccaagagccgggagggcaagttccagaacccctatgcccacagcctgaccagcgccctgcactacctggtgcctgtgcggccccggcggcagatcgtgtaccccctggagaagctgggcatcaatgcccccagcaaggctgtgtccaaggaccccatgtcctatgccctgaaccacaccaacaggaagctgaccctggagcccaagatcaccgtgaatgccaagatcatcgtggtgggcgccagctctgtgggcatctccttcctggagaccctggtgttctgcagccacatgaagttcaacaacctgaccctcatcagcacccacggcctgcccgggaagaagctgctggacacagagcagaggaagttcctggccagtgaccactgcttcaatgacaaggactatgccctgatgagcctgtgctcctgggtgaatgtggtggtgggccgcatgactggaattgaccgggccgccaagcacgtggtgctgagcacagatgaaattgtgccctatgaccacctgatcctgtgcaccggccagcagtaccaggtgccctgccccacagaagctgacatcagccagcacctgaccaaccgggaggtgcccaacagcagccagaggcgctacacaggcaaggtgccctgcaaccacttcaccctgaatgaggaggaggactgcttcaaggccctgatctggatccggaacaacagcatcaccacagagggcaacatcatcgtgtatggcaacaccatcgacacctacaccaccgtggagaccctgctgaacctgggcgtgtctggcagccgcatccacctggtgcagcccccaccagccagcaccatcacctgcatcaacaactacagcgtggagagcgctgtggctgatgccctgggcgctgctggggtgaccatgtacagagatgccatcctggcccagtggaatgatggcctgcacccagaccccatctacagcgccagcttcaccacccccaccaagcccttccggctgcagtgcagcatgttcttctccttctgtgagaagaatgtggactatgagaccttcaaggccctgaatgatgcctgcctggtgtatgacagccggctggtgattgacaccaacttccacaccaatgacatcgccatccgggctgctggcagcctgaccaagttcagcaaccgctactacagcaatgagtggacccacagcaacttcagcagcaaggagatcggcttccagctggccgccgccatgctgcacctgtttgaccccaccctggagcctgtgacagagcccccagccaacctggacaggctcatccccatgtacaagggggccaagatccagggcggcatcctgcccggcagctaccactacctgcacatcgccaagccagccatccccacccccctggaggtgcagatggcccagcccaactacggcctggagctggtgacaggcagcgccaagaatggcacctacttccgcatccacatcaacaagtacaagatggtggagaccatcacctgcctgagccgggagcccttccctgccagcaactacatccggctgtttggccagcacgagcagctgctgaacaacctgtgtgcccgctatgatgaaaatctcatcacagacctgtacagctacttcacagagccctggtgcctggccctcttccatgaccgcttcatcgacctgaggaaggagctgcggcagatcctggccagcaaggaggaggaggacctgcccagcattgagcagctggcccaccagattgaagatgaggagatcaaccccacagagaagccccggcagtacctgaagagggtgtttgaggagagcatctacaagaccctggtggagaggagcaccctggactacctgcactacaaccgctaccacctgcccatgtatgcctggccaggcatcgtgtag

SEQ ID NO: 187424 - DNA, 3534 bp, Artificial Sequence
  derived and/or modified sequence
atgtctgtgctgaccagcccccggggcaaggtggaggtggtgcactgcagaagaacagagagccaggatgtgtactgcatcaagagcctcatcaggaagttcacctgcaagctgtttgggaagctgaacatcatctacctgctggagaaggccaacctggccgtgaccctgtgcaatgacaaggaggagatcatggcccaggccaccttcctggactaccccaactggaatgtggccaagcaggatgactgggtgtctgtgttccgggagctggacagcgacatcccctgcacccccctgaacaccctcttcatgcacctgtttgtggccgtggatgagtacagcgtgggctgctgcaaggagatcctgaggacagtgtacaaggctgtgcctgagctgcacttcatcttcctgattgtgcccagctacatgagcctgggcagcaccctcatcaccgtgtttgaccaggtgggcaacatcccctgcctgacctatgaagaagattttgctgtgcacatctgccaccgccacagccactacccccagctgcacgtgaggaaggcccgggtggaggaccatgatgacctgatgcccatcttcatgagatatgacaccatcctgaaggagacctatggagagtacttcctggccgagctgattgaggcccaggatgaggagaaccacgctgtggtgtgtgaggtggagggcacagctgtgggcttcatgtctgtgtgcagccgggtgaacatgcagctgctgcatgaatgttttgacctgggccccttccacggcctgtgcttcccccacccagatgatgtgctggagagcccccaggacctgtctgtgagaagaagccaggatgctgagctgcggagcagcagccagggcagccagaagatcgtggaggagctgcaggagcctgtgtccccagacaccatggagaacatccagggcaacatcgcccgggaggccgccagcgaggaggccctgacagctgtgcagagcggaaatgtgtctgagcctgagagcctggacttcatgaactttgtgttcagcctcttcagtgacaagaacttctgtgtgatcagcctgccccacctgaccccagagttcttcctgatccagaactttgtgaagatggtgcccttcaacacctgcaccctggagcaggacctgtatgtgttccaccgggccggcctgctgaagagcatcaacatccgctttgccaccctgctggacaccccaggagtggagaacctggtgtccaccctgatgctgaacaagagcatcctggaggacctggaccgctacaacaaggccaggaaggaccctgatggcaccctgctgcaggcctttgtggccgaggtggccgagcagatcgtgggcattgctgtgatcagaaatgagatggacatcgagtacatccgcagccactacaacatcgaggacttcatctacttcagccaccaccagcgggaggagcacggccacatgcaccactttgccctgaaccccatcttccgccactacaccaagttcttcctgaaggagatcctgcggctgggcttcaagagctgcctgtactacagagtgtaccccaagagccgggagggcaagttccagaacccctatgcccacagcctgaccagcgccctgcactacctggtgcctgtgcggccccggcggcagatcgtgtaccccctggagaagctgggcatcaatgcccccagcaaggctgtgtccaaggaccccatgtcctatgccctgaaccacaccaacaggaagctgaccctggagcccaagatcaccgtgaatgccaagatcatcgtggtgggcgccagctctgtgggcatctccttcctggagaccctggtgttctgcagccacatgaagttcaacaacctgaccctcatcagcacccacggcctgcccgggaagaagctgctggacacagagcagaggaagttcctggccagtgaccactgcttcaatgacaaggactatgccctgatgagcctgtgctcctgggtgaatgtggtggtgggccgcatgactggaattgaccgggccgccaagcacgtggtgctgagcacagatgaaattgtgccctatgaccacctgatcctgtgcaccggccagcagtaccaggtgccctgccccacagaagctgacatcagccagcacctgaccaaccgggaggtgcccaacagcagccagaggcgctacacaggcaaggtgccctgcaaccacttcaccctgaatgaggaggaggactgcttcaaggccctgatctggatccggaacaacagcatcaccacagagggcaacatcatcgtgtatggcaacaccatcgacacctacaccaccgtggagaccctgctgaacctgggcgtgtctggcagccgcatccacctggtgcagcccccaccagccagcaccatcacctgcatcaacaactacagcgtggagagcgctgtggctgatgccctgggcgctgctggggtgaccatgtacagagatgccatcctggcccagtggaatgatggcctgcacccagaccccatctacagcgccagcttcaccacccccaccaagcccttccggctgcagtgcagcatgttcttctccttctgtgagaagaatgtggactatgagaccttcaaggccctgaatgatgcctgcctggtgtatgacagccggctggtgattgacaccaacttccacaccaatgacatcgccatccgggctgctggcagcctgaccaagttcagcaaccgctactacagcaatgagtggacccacagcaacttcagcagcaaggagatcggcttccagctggccgccgccatgctgcacctgtttgaccccaccctggagcctgtgacagagcccccagccaacctggacaggctcatccccatgtacaagggggccaagatccagggcggcatcctgcccggcagctaccactacctgcacatcgccaagccagccatccccacccccctggaggtgcagatggcccagcccaactacggcctggagctggtgacaggcagcgccaagaatggcacctacttccgcatccacatcaacaagtacaagatggtggagaccatcacctgcctgagccgggagcccttccctgccagcaactacatccggctgtttggccagcacgagcagctgctgaacaacctgtgtgcccgctatgatgaaaatctcatcacagacctgtacagctacttcacagagccctggtgcctggccctcttccatgaccgcttcatcgacctgaggaaggagctgcggcagatcctggccagcaaggaggaggaggacctgcccagcattgagcagctggcccaccagattgaagatgaggagatcaaccccacagagaagccccggcagtacctgaagagggtgtttgaggagagcatctacaagaccctggtggagaggagcaccctggactacctgcactacaaccgctaccacctgcccatgtatgcctggccaggcatcgtgtag

SEQ ID NO: 187425 - DNA, 3612 bp, Artificial Sequence
  derived and/or modified sequence
atgtctgtgctgaccagcccccggggcaaggtggaggtggtgcactgcagaagaacagagagccaggatgtgtactgcatcaagagcctcatcaggaagttcacctgcaagctgtttgggaagctgaacatcatctacctgctggagaaggccaacctggccgtgaccctgtgcaatgacaaggaggagatcatggcccaggccaccttcctggactaccccaactggaatgtggccaagcaggatgactgggtgtctgtgttccgggagctggacagcgacatcccctgcacccccctgaacaccctcttcatgcacctgtttgtggccgtggatgagtacagcgtgggctgctgcaaggagatcctgaggacagtgtacaaggctgtgcctgagctgcacttcatcttcctgattgtgcccagctacatgagcctgggcagcaccctcatcaccgtgtttgaccaggtgggcaacatcccctgcctgacctatgaagaagattttgctgtgcacatctgccaccgccacagccactacccccagctgcacgtgaggaaggcccgggtggaggaccatgatgacctgatgcccatcttcatgagatatgacaccatcctgaaggagacctatggagagtacttcctggccgagctgattgaggcccaggatgaggagaaccacgctgtggtgtgtgaggtggagggcacagctgtgggcttcatgtctgtgtgcagccgggtgaacatgcagctgctgcatgaatgttttgacctgggccccttccacggcctgtgcttcccccacccagatgatgtgctggagagcccccaggacctgtctgtgagaagaagccaggatgctgagctgcggagcagcagccagggcagccagaagatcgtggaggagctgcaggagcctgtgtccccagacaccatggagaacatccagggcaacatcgcccgggaggccgccagcgaggaggccctgacagctgtgcagagcggaaatgtgtctgagcctgaggacatcgagaagctgagtgacatcagcacaggctacgcccagtaccaccacgtgagcagccgcagcctggccagcctggtgctgcctgaggagcctgtgcacttccggcccatctacagaggagccagcgctgccttctgcatccagctgttctgcattgatgagaagtatgaggcccggagcctggacttcatgaactttgtgttcagcctcttcagcaactttgtgaagatggtgcccttcaacacctgcaccctggagcaggacctgtatgtgttccaccgggccggcctgctgaagagcatcaacatccgctttgccaccctgctggacaccccaggagtggagaacctggtgtccaccctgatgctgaacaagagcatcctggaggacctggaccgctacaacaaggccaggaaggaccctgatggcaccctgctgcaggcctttgtggccgaggtggccgagcagatcgtgggcattgctgtgatcagaaatgagatggacatcgagtacatccgcagccactacaacatcgaggacttcatctacttcagccaccaccagcgggaggagcacggccacatgcaccactttgccctgaaccccatcttccgccactacaccaagttcttcctgaaggagatcctgcggctgggcttcaagagctgcctgtactacagagtgtaccccaagagccgggagggcaagttccagaacccctatgcccacagcctgaccagcgccctgcactacctggtgcctgtgcggccccggcggcagatcgtgtaccccctggagaagctgggcatcaatgcccccagcaaggctgtgtccaaggaccccatgtcctatgccctgaaccacaccaacaggaagctgaccctggagcccaagatcaccgtgaatgccaagatcatcgtggtgggcgccagctctgtgggcatctccttcctggagaccctggtgttctgcagccacatgaagttcaacaacctgaccctcatcagcacccacggcctgcccgggaagaagctgctggacacagagcagaggaagttcctggccagtgaccactgcttcaatgacaaggactatgccctgatgagcctgtgctcctgggtgaatgtggtggtgggccgcatgactggaattgaccgggccgccaagcacgtggtgctgagcacagatgaaattgtgccctatgaccacctgatcctgtgcaccggccagcagtaccaggtgccctgccccacagaagctgacatcagccagcacctgaccaaccgggaggtgcccaacagcagccagaggcgctacacaggcaaggtgccctgcaaccacttcaccctgaatgaggaggaggactgcttcaaggccctgatctggatccggaacaacagcatcaccacagagggcaacatcatcgtgtatggcaacaccatcgacacctacaccaccgtggagaccctgctgaacctgggcgtgtctggcagccgcatcaacaactacagcgtggagagcgctgtggctgatgccctgggcgctgctggggtgaccatgtacagagatgccatcctggcccagtggaatgatggcctgcacccagaccccatctacagcgccagcttcaccacccccaccaagcccttccggctgcagtgcagcatgttcttctccttctgtgagaagaatgtggactatgagaccttcaaggccctgaatgatgcctgcctggtgtatgacagccggctggtgattgacaccaacttccacaccaatgacatcgccatccgggctgctggcagcctgaccaagttcagcaaccgctactacagcaatgagtggacccacagcaacttcagcagcaaggagatcggcttccagctggccgccgccatgctgcacctgtttgaccccaccctggagcctgtgacagagcccccagccaacctggacaggctcatccccatgtacaagggggccaagatccagggcggcatcctgcccggcagctaccactacctgcacatcgccaagccagccatccccacccccctggaggtgcagatggcccagcccaactacggcctggagctggtgacaggcagcgccaagaatggcacctacttccgcatccacatcaacaagtacaagatggtggagaccatcacctgcctgagccgggagcccttccctgccagcaactacatccggctgtttggccagcacgagcagctgctgaacaacctgtgtgcccgctatgatgaaaatctcatcacagacctgtacagctacttcacagagccctggtgcctggccctcttccatgaccgcttcatcgacctgaggaaggagctgcggcagatcctggccagcaaggaggaggaggacctgcccagcattgagcagctggcccaccagattgaagatgaggagatcaaccccacagagaagccccggcagtacctgaagagggtgtttgaggagagcatctacaagaccctggtggagaggagcaccctggactacctgcactacaaccgctaccacctgcccatgtatgcctggccaggcatcgtgtag

SEQ ID NO: 187426 - DNA, 3714 bp, Artificial Sequence
  derived and/or modified sequence
atgagcgtgctgaccagcccccggggcaaggtggaggtggtgcactgtaggagaaccgaatcacaggatgtctattgtataaaatctctcattcggaaatttacatgtaagctgtttggcaagctgaacatcatttaccttctcgaaaaagccaatctggccgtcactctgtgcaatgataaggaagagattatggcccaagcaacctttctggactatcctaactggaacgtcgcgaagcaggatgactgggtaagtgtgtttcgggaactagattccgatatcccctgcactccccttaataccttgtttatgcacttgtttgtagcagtggatgaatactctgtgggctgttgtaaggaaatcctacgcactgtatacaaagcagtaccagagttacacttcatctttctaattgtgccatcatacatgagtcttggttccaccctgattacggtgtttgatcaggtcggtaacataccgtgcctcacttatgaggaggacttcgcagttcacatctgtcatcgtcatagtcactatccacagcttcacgtgcgcaaggcccgggtggaggaccatgatgatttgatgccaatttttatgaggtatgacacaatcctgaaggaaacctacggcgagtacttccttgccgagctcatcgaagcccaggacgaggaaaaccacgctgttgtctgcgaagttgagggcacagccgtcggatttatgtcagtctgcagtcgggtcaatatgcaattgcttcatgaatgcttcgatttaggaccattccacggcctctgcttcccacatcccgacgatgtcctggagagcccccaggacctctccgtgagaagatcacaagacgctgagctcagatcctcaagtcagggcagtcagaaaatcgtcgaggaactgcaggaacccgtgtcccctgatacaatggaaaatattcagggaaatatcgccagggaagctgcttcagaagaagctttaacagcagtgcagagtggaaatgtgtctgaacccgaggacattgagaagctttccgacatctcaacaggttatgcacaataccaccacgtgtcttctcgctcactggcatctctcgtgttaccagaggagcctgtccacttccggccaatctatcgtggtgccagtgctgctttctgtatccaactgttctgtatcgatgaaaagtatgaagcccggtcactcgacttcatgaactttgtgttctccttgttttctgataagaacttctgtgtgattagtctacctcatctgacgccagagttctttctcatacagaacttcgtgaagatggtaccatttaacacctgcacattagagcaggacctgtatgtgtttcacagagctggtctattgaagagcattaacatccggtttgctacactgttggacacccctggggtcgagaatctcgtgagcaccctgatgcttaataagagcatcttagaagaccttgatcgttacaacaaggcccggaaggatccagacggaacactgcttcaagccttcgtggcagaagtggccgagcaaattgttggaatcgcagttatacggaatgaaatggatatcgagtatatcaggagccactacaacatcgaggactttatctacttttcacatcaccagagggaggaacacggacacatgcaccactttgctcttaaccctatcttccgacattatactaaattcttcctgaaagagatcctgcgactaggctttaagtcatgtctgtactatcgcgtgtatcccaagtctcgggaggggaaatttcagaatccttatgcacactctctcacgtcagcactgcactatctcgtgccggtgaggccgagacgacagatagtctatccgctggagaagctaggcattaacgcaccttctaaagccgtgagtaaggacccaatgagctacgccttgaaccatactaacaggaaactaacactcgagccgaagataacagttaacgccaagattatcgtggttggcgctagctccgtaggaatctctttcctcgagacactggtattttgttcacacatgaagttcaataacttgacactgatatccacacacggcctcccaggcaagaagctcctggacacggagcagcgcaagtttctggcaagcgatcattgtttcaatgacaaggactacgcattaatgtcactatgcagttgggtgaacgtggtggtcggacgaatgaccgggatcgacagggccgcgaaacatgtcgtcctctccactgacgagatcgtgccttatgatcatctgatcttatgcacgggtcagcagtaccaggtcccctgtccaactgaggccgacatatctcaacaccttacaaacagagaagtaccaaattcctctcagcgaagatatactggtaaggtcccatgcaaccattttacactcaacgaagaggaagactgttttaaagccctgatttggattaggaacaatagcattaccacggagggtaatataattgtctatgggaacactatcgatacttataccactgtggagactctcctgaatctcggcgtatccgggtctcggatccacctggtccagcccccacccgcctcaactattacttgcatcaacaactacagcgtggagagcgccgtggcggacgctcttggtgccgcaggggtaaccatgtatcgcgacgccattctggctcaatggaacgacggtttacaccccgatccaatttattctgcctcctttactacgccaaccaaaccgtttaggctgcagtgttcaatgttcttttccttctgcgaaaagaatgtggattacgagactttcaaggccttgaacgatgcatgcctggtgtacgatagtcgactcgtgatcgacactaattttcacaccaatgacattgcaataagggctgccgggtcactcactaaattttcaaatcggtactatagcaatgagtggacccattcgaacttttcaagtaaagagatcggcttccagctcgcggcagcaatgttacacttgtttgatcctacgctcgagcctgtgacggaaccgcctgccaacctcgatcggctgattcccatgtacaagggagcaaagattcagggcggaatactgcccgggtcctaccattatttgcacatagctaaacctgctattcccacccctctggaagtacagatggcccagccaaattacggactggaactggtcacaggctcagcaaagaacggaacttattttagaatccatattaacaagtacaaaatggtggaaaccattacatgtctgtctcgggaaccatttcctgcgagtaactatattcgtctctttggacagcatgagcagctacttaacaacctctgcgcccgctatgacgaaaatcttattacagatttgtatagttacttcacagagccctggtgtctggccctgttccacgacaggtttatcgatttgaggaaggaactaaggcagatcctggccagtaaagaggaggaggatcttccttccatcgagcagctcgctcatcagatagaggacgaagagatcaatccaacagagaagcctcgacagtatctgaaacgggtgttcgaagaaagtatatataaaaccctcgtagagaggtccaccttggactatttgcattacaaccgttatcatttacctatgtacgcttggccaggtatcgtgtag

SEQ ID NO: 187427 - DNA, 3534 bp, Artificial Sequence
  derived and/or modified sequence
atgagcgtgctgaccagcccccggggcaaggtggaggtggtgcactgtcgaaggacagagagccaagacgtatattgcatcaaaagtctgataagaaagttcacatgcaagctgtttgggaaactgaacatcatttacctgctggaaaaggcgaatttagcagtcactctgtgcaacgacaaggaagagatcatggcccaggccaccttcttggattatcctaattggaatgtagccaaacaagatgattgggtctcggtgtttcgggagcttgatagtgatataccgtgtacaccccttaacacgctatttatgcacctatttgtggccgtggacgaatatagtgtcgggtgttgcaaagagatcttgagaacagtttataaggccgtgcctgaactgcattttattttcctcatcgttccaagctatatgtcccttggctctactctgattacagtgtttgaccaagtgggtaatattccatgtctgacatatgaagaggactttgcggtccacatttgtcaccgccacagccattacccccagcttcacgttcgcaaagcacgagttgaggaccacgacgacttgatgccaatattcatgcggtatgacacaattctgaaggagacctatggggaatattttctggcagaactgatcgaggcgcaggatgaggaaaaccacgcagtcgtgtgtgaggtggaagggacagcggtgggcttcatgagcgtctgttcacgggtgaatatgcagctccttcatgagtgcttcgatctgggaccgttccatggtctgtgcttcccccaccccgacgatgtgctagagagccctcaggacctgtcggtgcgccgaagtcaagacgcagaactgcggtcaagctcccaagggtcccagaaaatagtggaagagctgcaggagccagtaagtcctgataccatggagaatatccagggtaacatagccagggaggccgcatccgaagaagccctcaccgccgtgcagtccggtaacgtgagtgaaccagaatcattggatttcatgaattttgtcttctcgttattcagtgacaaaaatttttgtgtaatctccctgccacacctgactccagagttcttccttatccagaatttcgtcaaaatggttcccttcaacacatgcacattggagcaggatctttatgtcttccatcgcgctggactgctcaagtccatcaatattcggttcgccaccctgctggacactccaggcgtcgagaacctggtttccacattaatgttgaacaaatcgattttggaggacctggatcgatataacaaggcaagaaaagaccctgatggtacactcctgcaggctttcgtggcggaggtcgccgagcagattgtaggtattgctgtgatccgcaacgagatggacattgaatatatccggtcccactataatatcgaggactttatctacttctcacaccaccagagggaagagcacggtcacatgcaccatttcgccctgaatcccattttccggcattacacgaaattctttctgaaggaaattttgcgcctggggttcaaatcctgtttgtattaccgagtttaccctaaatccagggaagggaagttccagaacccgtatgctcactctctgacgagcgccctgcactaccttgtcccagtgaggcccagacgtcagattgtgtaccccctggagaagttgggcattaatgccccctcaaaggccgtaagtaaggatccaatgtcctacgcacttaaccataccaaccggaaactaaccctggagcccaaaattacagtcaacgcgaagattatcgtggtaggggcgtcctcggtcggaatcagtttcctggagaccctggtcttttgcagtcatatgaaattcaataatttgactctcatctccactcacggactgccaggcaagaagctgctggatacagagcaacgaaagttcctcgcctccgatcattgttttaatgataaagactatgctctgatgagcctgtgttcctgggtcaatgtggtggtcggtcgcatgacaggcatcgatcgcgccgccaaacacgtggtgctgtctactgatgaaatagtcccgtatgatcacctcatcctgtgcacagggcaacagtaccaagtgccatgcccaacagaagccgacatcagtcagcacttgactaaccgcgaagtccctaattcatcacagcggaggtataccggcaaagtaccctgtaatcacttcactttaaacgaagaggaggattgcttcaaggccctgatctggattagaaacaatagtattacaactgaaggcaatattattgtttacgggaatacaatcgatacctatacgaccgtcgaaacccttctgaatctgggagtctctggaagcagaattcacctagtccagccacctcccgcgagcactatcacttgcatcaataactattccgtggagagtgccgtggccgatgcgctcggcgccgctggcgtaaccatgtatcgggacgccatcctggcccagtggaacgacggcctgcaccctgacccaatctactctgcatcctttactacccccacaaagccatttaggttacagtgctcaatgttcttctccttttgcgagaaaaacgtggactacgaaacattcaaagctctcaatgacgcctgtctcgtttatgactcccgtctcgtcattgataccaatttccacacgaacgacatcgccatcagagccgccggtagcctgactaaattctcaaaccggtattattcaaatgaatggacacactcgaatttttccagtaaagagatcggatttcagctcgccgctgcgatgctccatctgttcgatcccaccctagagcctgtgaccgagccccccgccaacctcgaccgcttaataccaatgtacaagggggcaaagatccagggggggatactgcccgggtcatatcattatttgcacatcgcaaaacctgctattcccacgcctctggaagtgcaaatggcacaaccaaactacgggcttgaacttgttacagggagtgccaagaacggtacttacttccgcatccacataaataagtataagatggtggagacgatcacgtgtctgagccgagaacccttccctgcaagcaattatatccgcctgttcggccagcatgagcagctcctgaacaatctttgtgctcgatacgacgagaacctgatcaccgatctgtacagctatttcaccgagccatggtgcctggccctttttcacgatagattcatcgaccttcgcaaggaacttcgacaaattctggcctctaaggaagaggaagacttgccgtcaattgaacagttagctcaccagattgaggacgaagaaatcaacccaaccgagaagcccaggcaatatctcaagcgtgtgtttgaggaatctatctataagacgctagttgagaggtccacgctggactacctgcactacaacaggtatcatctgcctatgtacgcctggcccggcatcgtatag

SEQ ID NO: 187428 - DNA, 3612 bp, Artificial Sequence
  derived and/or modified sequence
atgagcgtgctgaccagcccccggggcaaggtggaggtggtgcactgccggaggactgaaagccaggacgtatattgcattaagtcacttatccgcaagtttacatgcaagctgttcggaaaactgaacattatttatctccttgagaaggctaatctagcagtcacactatgcaatgacaaagaggaaatcatggctcaggccactttcctggactatcccaactggaacgtggcaaagcaggatgactgggtgagtgtatttcgcgagctggattcagatatcccttgtacaccactcaatacactgttcatgcatctctttgtggctgtcgacgagtatagcgtgggatgctgcaaagagatcctgagaactgtttacaaggctgttccagaactgcatttcattttccttatagtcccaagctatatgtccctcggatctacactcattacggtatttgaccaagtcgggaatatcccatgcctgacgtatgaagaagatttcgccgtgcacatctgtcacagacactcacactatccacagcttcatgtgaggaaagctcgcgtagaggaccatgacgatttaatgcctatcttcatgaggtatgataccattcttaaagagacatacggagaatactttctggccgagctcatcgaagctcaggatgaggagaatcacgccgttgtatgcgaggtcgaaggaaccgctgtaggcttcatgtccgtatgttctcgggttaacatgcagctgttgcacgagtgttttgacctgggacccttccacggactgtgttttcctcatcccgatgatgtcctcgaaagtccgcaggacctgtctgtgaggcggagccaggacgcagagcttaggtcatccagtcagggctctcagaagatcgttgaagagctacaagaacccgtttcacccgatacaatggagaacatacagggcaatatcgccagagaggcagcgtcagaagaggctctgactgccgtgcagagtggtaacgtgagcgaaccagaggatatcgagaagctcagcgatataagcactggctacgcacaataccaccacgtgtccagccggtctttggctagtttggtactgccggaagagcctgtacacttccgacctatttaccgcggagcctcggcggcattttgcattcagctgttctgtattgacgagaaatatgaagcaaggtctttagactttatgaacttcgttttctccttgttctccaattttgtaaaaatggttcctttcaatacctgtacactcgagcaggatctttacgtttttcacagagcaggccttctcaaatccattaatattcgtttcgccaccctgctagacaccccaggcgtcgagaacctggtatccaccttgatgcttaacaagagcatactggaagacttagatagatataacaaagccagaaaagacccagatggtacactgcttcaagccttcgtcgccgaggtggccgagcagattgttggcatcgctgtgataagaaacgaaatggacatagagtatataagatcacattacaatattgaagacttcatatactttagccaccaccagcgggaggagcatggacatatgcatcactttgctctcaaccctattttcagacactataccaagttcttcctcaaagagatcctgcggcttggattcaagagctgtctgtactaccgggtgtaccctaaatctagagagggaaagttccaaaacccctacgcacattcactgacctctgccttacactatctggtgccagtccgacctagacgacagattgtgtaccccctggagaagttgggtatcaacgctcctagcaaggccgtctccaaagacccaatgtcatatgctctgaatcacacgaaccggaagttgactttagagccaaagattaccgtgaacgccaagataatcgtggtgggggcttcctcggtgggcatttctttcctcgagacattggttttctgctcacacatgaaatttaataaccttactcttatcagcactcacggcttgcctggcaaaaaactgttggatacagaacagcgaaagtttctggcatccgatcactgcttcaatgacaaagactacgccttaatgagcctctgcagttgggtcaatgttgtggtcgggagaatgacaggcatcgatcgggcagcaaaacatgtcgtgctgagcacagacgagatagtgccctatgaccacttgatcttgtgtaccgggcagcagtatcaggtaccgtgtcctaccgaggcggatatttcacagcacttgacgaacagggaggtgcctaacagcagtcagagacgctatacaggtaaagttccatgcaaccacttcaccctcaatgaggaggaggactgttttaaggctctgatatggatacgcaacaattctattacaacagaggggaacataatcgtgtatggcaatacaatcgacacatatactaccgtggaaactctcctgaacttgggcgtgtcaggaagcaggataaacaactattctgttgaatccgccgtggctgatgctctgggcgccgctggagttactatgtatagggacgccattctagctcagtggaatgacgggcttcatcccgaccctatctacagcgcatcctttacgacgccaaccaaaccattccggctacaatgctccatgtttttctccttctgcgaaaaaaacgtggactatgaaacgttcaaagccctgaatgacgcatgccttgtctacgattctcgcctggtgattgacaccaactttcacaccaacgacatcgccatccgcgctgctgggtccttgacgaaattttcaaataggtactattcaaacgaatggacacatagcaatttttcctctaaagaaattggttttcagctggcagccgcaatgctacacctttttgatcctaccttggagcccgtgactgaaccacctgctaacttagaccggctaatacctatgtataaaggcgcgaagatacaggggggcattctgccggggtcctatcattacctgcacatcgctaagccagcaattcctacgcctctggaagttcagatggcccagcccaactacgggctagaactggtaacaggctccgctaagaacggtacatactttcgcattcatatcaataagtataagatggtagaaaccatcacctgtctctcgcgtgaaccgttcccagcttcaaactacattcgcctcttcggtcaacatgagcagctactgaacaacctgtgcgccagatacgacgaaaatcttatcaccgatctctacagctacttcaccgaaccttggtgccttgctctgtttcatgaccggtttattgacctaagaaaggagttgagacaaatacttgcctctaaggaagaagaggatctcccttctattgagcaattggcgcatcaaatcgaggatgaggagattaatcccacagaaaagcccagacagtacctgaagcgcgtttttgaagaaagtatttacaaaacactggtggaacgctccacattagactacttacattacaatcggtatcaccttccgatgtacgcttggcccggcatcgtatag

SEQ ID NO: 187429 - DNA, 3714 bp, Artificial Sequence
  derived and/or modified sequence
atgtccgtacttaccagcccacgtggcaaagtggaagtggttcactgccgtcgcaccgagagtcaagacgtgtattgcattaagagcttgatcaggaagttcacctgcaagctgttcggaaagctgaatatcatctatctccttgaaaaggctaatctggccgtgactctctgcaacgataaggaagagatcatggcgcaagcgacttttctagactacccaaattggaatgtcgccaagcaggacgattgggtaagtgtgttccgcgagttggatagcgatattccatgcacccctcttaacacactgtttatgcacctgtttgtggcagtggatgaatactcagtcggttgctgtaaagaaatactacgtaccgtttacaaagcggtcccagagctgcactttatatttttgattgtgccctcctacatgtccctcggctccaccttgatcacggtattcgatcaggtcgggaacattccctgtctaacatacgaggaagactttgctgtccatatttgtcaccgccatagccactatccccagctgcatgtcagaaaagcccgagtggaggatcacgatgatttaatgccaattttcatgaggtacgacacaatcctgaaagaaacttatggcgagtattttcttgctgagctgatcgaagcccaggatgaagagaaccacgcggttgtgtgcgaggtggaagggactgccgttggctttatgagcgtttgtagtcgtgtgaacatgcagctgttacacgagtgttttgacttagggcctttccacgggctctgcttcccccatcccgacgatgtcttggagagcccccaggatctgtcggtccgccgttcccaagatgctgaattgagatcatcatcccagggaagtcagaagatcgtggaggagcttcaggagccagtcagccctgacactatggagaacattcagggaaacatcgcccgtgaggccgctagtgaagaggcactcacagcagtccagtctggcaatgtgagcgagcctgaagatattgaaaagttatcagatattagtacaggttatgcccagtaccaccacgtctctagccgaagtctggcctcacttgtgctccccgaagagccagtccacttccgacctatctacaggggcgctagcgccgctttttgtatccaacttttttgtattgacgagaaatatgaggctcgcagtttggatttcatgaacttcgtgttcagtctgttcagcgacaaaaatttttgcgtcatcagcctgcctcatcttacgcctgagtttttccttatccaaaacttcgtgaagatggtaccttttaatacctgcactttggaacaggacctctatgttttccacagagcaggcctcctgaaatccatcaacattcgcttcgccacgctccttgacactcctggggtagaaaacctcgtcagcactctgatgctcaataaaagtatcttagaggatctcgaccgttacaataaggcacgcaaagaccccgacggcaccttgttacaggcttttgtggctgaggtggcagagcaaattgtcggtattgccgtgatccgtaatgagatggacatcgagtatatcagaagccattataacatcgaagacttcatttacttcagccaccaccagagagaggagcacggtcatatgcaccattttgccctgaaccccatttttcgccactatacaaagttttttctgaaggaaatactgcgattaggtttcaaatcctgcctatactaccgggtgtaccctaaatcccgggaggggaagttccaaaacccatatgcacactcccttacgagtgctctgcactaccttgttcccgtgcggcctcgtcgccagatcgtgtaccctttggaaaagctggggatcaatgctcctagcaaggcagtgagtaaggaccccatgagctacgctctcaatcacaccaacagaaagcttaccttggaacctaagatcactgtgaacgcgaagattatcgtggttggtgccagcagtgtaggcatctcatttctggagaccctggttttttgcagccacatgaagttcaataacttgaccctgatatctacacacgggctgccgggaaaaaaactattagacacagagcaaaggaaattcctcgcctctgatcactgctttaacgataaggattatgccctcatgtctctttgctcttgggtcaacgtcgtggtcggacgcatgaccggtattgacagggctgccaagcacgtggtgttgtctaccgatgaaatcgttccttacgatcacctgattctgtgtaccggtcagcagtatcaggtgccttgcccgacagaagcagatatctctcaacacttgactaatagagaagtccctaactctagccaacggaggtatacaggcaaggtcccctgtaatcactttaccttaaatgaggaggaagattgctttaaggctctcatttggattaggaataacagtatcactactgagggtaacattatcgtttatgggaacacaatcgacacctacactactgtggagactctcctcaacctgggagtttccggcagcaggattcatctggttcaacctcctcctgcttccaccattacatgtatcaacaattacagcgtagagtccgccgttgccgatgcactcggagcagccggtgtgacgatgtacagagacgcaatcctagcccagtggaatgacggcctgcaccccgatcctatttacagcgcctccttcactactccaaccaaaccattccgcctccagtgttctatgtttttctctttctgcgagaagaatgtggactatgaaacctttaaagctctgaatgatgcatgtctggtgtacgactcaagactcgttattgacactaactttcatactaacgatattgccattcgcgctgcaggaagtctcactaaattctccaaccgttactactcgaatgagtggacccactcaaatttctccagcaaggagattggatttcaactggcagcagccatgctccacctgtttgatccaaccctggagcccgtgaccgagcctcccgctaatctggatcgcctgatccctatgtacaaaggtgccaaaatacagggtgggattctcccaggatcttatcattacttgcacattgctaagcccgctatacctacaccgcttgaagtgcaaatggcccagcccaactacggacttgaactcgtgacaggatctgccaagaatggcacctattttaggattcatattaataaatacaaaatggttgagactatcacttgtctgtcccgggaaccgttcccagcttctaattatattcgactattcggacagcacgagcaactcttgaacaacctttgcgctagatacgatgagaatttaattacagacctgtattcctacttcactgaaccttggtgcctcgctctcttccatgatagattcatcgatctgagaaaggaactccggcagatactggcgtcaaaagaggaggaggacctgcctagtatcgagcagctggcacaccaaatagaggatgaagaaatcaatcccactgagaagccacggcagtacctgaaacgggtattcgaagagtccatctataagacactggttgagaggagcacactcgactacctccattataatcgctatcacctgcctatgtacgcttggcctggcattgtgtag

SEQ ID NO: 187430 - DNA, 3534 bp, Artificial Sequence
  derived and/or modified sequence
atgtccgttctgaccagtccccgaggcaaggttgaagttgtgcactgtcggaggacggaaagtcaagatgtttattgcattaagtccctcattaggaaatttacttgcaagctgttcggcaagctaaacattatctatctcctggagaaagcgaatctggcagtgaccctgtgcaacgataaagaggagataatggcacaggccacatttctggactaccccaattggaacgttgccaagcaggatgactgggtgagtgttttcagagaactagacagcgacattccatgcaccccgctgaacacactcttcatgcacctgtttgtcgcagtggacgagtactctgtgggatgctgtaaagagatattgaggaccgtgtataaggcggttccagaacttcactttatctttctcatcgtcccttcttatatgtctctggggagcaccctgattactgtttttgaccaagtgggcaatattccctgtctcacttacgaggaggatttcgcagtgcatatatgccaccgccattctcattatccccagctgcacgttcggaaggcaagggtagaggatcacgacgatctgatgcccatctttatgcgatatgacacaatactcaaggagacttacggggagtactttctggccgagttgatcgaagcccaggatgaggagaaccacgccgtggtttgcgaggtggaagggactgcggtgggtttcatgtctgtgtgttcccgggtgaatatgcagctcctccacgagtgctttgacttagggccattccatgggttgtgctttccccatcccgacgacgtgctcgaatctccccaggatctgagcgttaggcggtctcaggacgccgagctccggagttcgtcgcaaggtagtcagaaaattgtagaagagcttcaggaacccgtgtcccctgacacaatggagaacatacagggcaacatcgcccgtgaggccgctagtgaggaggcactgactgctgtgcagtcggggaatgtgtccgaacccgagagcctagacttcatgaatttcgtcttctccctcttttccgacaagaacttctgcgtgatttccctgccccatttaactccggaattcttccttatccaaaattttgttaaaatggtcccgtttaatacatgtacactggagcaggacctttacgtgttccatagagccggtctgctcaagtccatcaacattcggttcgccactctgttggacacacctggggttgagaacctcgttagtactctcatgcttaacaaatccattctcgaggatctagacaggtataataaggccagaaaagacccggatggaaccctactgcaggctttcgtggctgaggtggccgagcagattgtaggtattgccgtgatcaggaacgaaatggatattgaatatataagatcccactacaatatcgaggacttcatctacttcagccaccaccagagagaggaacacggccatatgcatcattttgccttgaatcccatattcagacactacacaaaattttttctcaaagaaattctcaggttgggatttaaatcctgcctctactacagggtctatcccaagtcgcgggaaggcaagttccagaatccctatgcgcactcactgactagcgccttacattatctagtgccagtgcgccctagaaggcaaatcgtttatcctttagaaaagctggggattaacgcaccttccaaagccgtctcaaaggacccaatgtcttacgctctgaaccatacaaataggaaattaactctggagccgaagatcaccgtgaacgcaaaaatcattgtggtcggcgcatcctcagttggaatctcatttctcgagactcttgtgttttgctctcacatgaaatttaataacttgacactcattagcacacacggtttacctggaaagaagctcctggatactgaacagcggaagtttttggcgtccgaccactgcttcaacgacaaggactatgccctcatgtctctttgtagttgggtgaatgtggtggttggcaggatgacaggaatcgaccgggcagctaagcacgtggtgctgtcaactgacgaaattgtaccctatgaccacctgatcctgtgcacaggacagcagtatcaggtcccctgtcccacggaggctgacatctctcaacacctcactaaccgcgaggttccaaattccagccagcgcaggtacacgggcaaagtaccgtgcaaccacttcacattaaacgaggaagaggactgcttcaaagcattaatttggatccgaaataacagcattactacagaaggaaacataattgtgtacggtaataccatcgacacctacaccaccgtggaaacactgctgaatctgggggtgtctggaagccggattcatctggtacagcccccacccgctagcactattacatgcatcaataactacagcgtggaatctgctgttgctgacgctcttggcgcagccggtgtaacgatgtacagggacgcaatcctggctcagtggaacgacggcctgcatcctgacccgatctactctgcgagctttaccacacccacaaagcctttccggcttcagtgctctatgttcttcagcttttgtgagaaaaacgtggactacgagacttttaaagcgctaaatgacgcctgtttggtgtacgatagcaggttggttatcgataccaattttcacactaacgacatcgccataagggctgcagggtccctgactaagttctctaaccggtattacagcaacgagtggacacattccaacttttcctcgaaagagatcggtttccagttggcagccgcaatgttacacctgttcgatcccacactcgaacccgtaacagagcctccagcgaacctggaccgactgattcctatgtataaaggtgcaaaaatccaggggggtatcctgccagggtcctaccactacctccacatcgccaagcctgctattccgacaccattggaggttcagatggcccaacccaattatggactcgagttagtcacaggcagcgccaagaacggtacttatttccgaattcatatcaacaagtacaagatggtggagacaataacctgtctttctagggagcccttccctgcttccaattacattcgtttgttcgggcagcatgagcaactgctaaataacctgtgcgcccgatacgatgagaaccttatcacagatctctactcttacttcacagaaccgtggtgcctggccctgttccacgacaggttcatcgatcttaggaaggagcttcggcagatcctggcctcgaaagaggaagaagatctcccctccattgaacagctggctcatcagatcgaagacgaagagattaacccgaccgagaagccacgccagtatcttaagagggtcttcgaggaatcaatctacaaaaccctggtcgaacgctcgactctggattacctgcactataatcgataccatctgccaatgtatgcgtggcctggaatagtgtag

SEQ ID NO: 187431 - DNA, 3612 bp, Artificial Sequence
  derived and/or modified sequence
atgagcgtccttacaagcccaagaggcaaagtggaggttgtccactgtcgcagaaccgagagccaggatgtgtattgcataaaatctcttatcaggaagttcacatgcaagctgtttggaaagctcaacatcatttacctcctggagaaggccaacttagcggtaacactgtgcaatgataaggaagagatcatggctcaagcgaccttcttggactatccgaactggaacgtggccaagcaagacgactgggtgtctgtgtttagagagctggattcagacatcccttgcactcctctcaatacactgtttatgcatctgtttgtagcggtcgacgaatattccgtcggctgttgtaaagagattttgcggacagtctacaaagctgtacctgagttgcacttcatctttctgattgtgcctagctatatgtctctgggctccaccctcattaccgtctttgatcaggtaggcaacataccgtgtctcacatatgaggaggactttgccgtgcatatttgtcatcgccactcacactacccacagcttcacgttagaaaggctcgggtggaggaccatgatgatttaatgcctatatttatgcggtacgacaccattcttaaggagacttatggcgaatactttctggcagaacttatagaagcccaggacgaggagaatcatgcagtcgtatgcgaggttgaaggtaccgcggttggatttatgtccgtctgctccagggtcaatatgcagttattgcacgagtgttttgaccttggcccattccatggcctgtgtttcccccaccccgacgatgtcctggaatccccccaggatcttagtgtcaggcgtagccaggatgctgaactacggtcctccagtcaaggctcacagaagattgtggaggaactgcaagagccagtgagtcctgacaccatggagaacatacaggggaacatcgcccgtgaggctgcctctgaggaggctctgacagccgtgcagagtggtaacgtttcagagcctgaagatatagagaagctgtctgacatctcaacaggatatgcgcagtatcatcatgtgagctccaggtccctggcctcactggtgctcccggaggagcctgtccacttcaggccaatctacagaggcgcttcggccgcattctgcatccagctcttttgcatcgacgagaagtacgaggcccgatcattggattttatgaactttgtctttagcctcttctccaattttgtgaagatggtaccatttaacacttgcaccctggagcaagacctgtatgtgtttcatcgggctgggcttttgaagtcgattaatatacgcttcgcaaccctgctcgacactcctggtgtggaaaatctggtgagcactctcatgttgaataagtctatactggaggacctggatcgatacaataaggcacgaaaagaccccgatggcacactcttgcaggctttcgtcgccgaagtggcggagcaaatagtgggaatcgctgtcattcgcaacgaaatggacatcgagtatattcggagccactacaatatcgaagactttatctacttctcacaccatcagcgcgaggagcacggacacatgcaccatttcgcactgaaccccattttcagacactataccaagttttttctcaaggagattctgcgccttgggttcaaatcgtgtctgtactaccgagtctatcccaagtccagagagggtaagtttcagaacccctatgcacacagcttgacaagcgcacttcactatctggttccagtgcgccctcggcgacagatcgtgtaccccctggagaagctcgggatcaacgctccttccaaggccgtgagcaaggatccaatgagctatgctttgaatcacaccaacaggaagctgaccctggaaccaaagatcactgtgaatgctaaaattatcgtagtcggcgcatcttcagtcggaatttctttcttggagaccctggtgttttgtagtcacatgaaattcaataatcttaccctgatatctacccatggactgccaggcaagaagcttctggacacagagcaaaggaagttcctagcctcggaccattgctttaatgataaagactatgcgctgatgagcctgtgctcttgggtaaatgtcgtggtgggccgaatgactggaatcgacagggccgcaaaacatgtcgtgctgagcactgacgagattgtgccatacgatcacctaatcctgtgtaccggacaacaataccaggttccatgcccaactgaagctgacattagccagcaccttaccaatagagaagtgcccaacagttcccagcggagatataccggtaaggttccctgcaatcatttcacactgaacgaggaagaggattgttttaaagccttgatctggatacgcaacaattcgatcaccaccgagggcaacattatcgtgtacggaaataccattgatacctataccacggtggagactctgctgaatctgggagtaagtggatcacgaatcaacaattacagcgtcgagagtgccgtagccgatgccttaggggctgctggggtaactatgtaccgggatgccatcctggcccagtggaacgatgggctgcacccagaccccatctattctgccagtttcactactcccacaaagcctttccgacttcagtgcagtatgtttttcagtttttgtgagaaaaatgtggactatgaaaccttcaaggccctgaacgatgcctgtttagtatacgactcaaggctagtgatcgacaccaactttcacactaatgatattgccataagagccgcagggtctcttacaaaattctcaaaccggtattacagcaacgagtggacccattcaaactttagtagtaaagagattggattccagctggccgcagcaatgctgcacttgtttgatcccacgcttgaacccgttactgaaccacccgctaatttagatcgcttgatacctatgtataagggtgccaagatccaaggcggaatcctgcctggcagttatcattacctacatatcgcgaagcctgcaattcctacccccctggaagtgcagatggctcagccgaactatggcctcgagctagtgacgggaagtgcaaagaatggaacctatttccgaattcacataaacaagtataagatggtggagactataacctgcctcagccgcgagccatttcccgcatccaactatataaggctgtttgggcagcatgaacagcttctgaataacttatgcgcccgttacgatgagaacctcatcaccgatctgtatagctactttaccgaaccttggtgtctggcactgtttcacgatagatttatcgaccttagaaaagaattgaggcagatcctggccagtaaagaggaggaggatttaccaagtatcgaacagctcgcgcaccagattgaagacgaagagatcaaccccaccgaaaagcctcgtcagtatctgaaaagagtattcgaggaaagcatttataagacactggtcgagcggtcaaccctggactacctgcattataacaggtaccatctacctatgtatgcatggcccggtattgtgtag

SEQ ID NO: 187432 - protein, 717 aa, Artificial Sequence
  derived and/or modified sequence
MFRDQVGVLAGWFKGWNECEQTVALLSLLKRVSQTQARFLQLCLEHSLADCAELHVLEREANSPGIINQWQQESKDKVISLLLTHLPLLKPGNLDAKVEYMKLLPKILAHSIEHNQHIEESRQLLSYALIHPATSLEDRSALAMWLNHLEDRTSTSFGGQNRGRSDSVDYGQTHYYHQRQNSDDKLNGWQNSRDSGICINASNWQDKSMGCENGHVPLYSSSSVPTTINTIGTSTSTILSGQAHHSPLKRSVSLTPPMNVPNQPLGHGWMSHEDLRARGPQCLPSDHAPLSPQSSVASSGSGGSEHLEDQTTARNTFQEEGSGMKDVPAWLKSLRLHKYAALFSQMTYEEMMALTECQLEAQNVTKGARHKIVISIQKLKERQNLLKSLERDIIEGGSLRIPLQELHQMILTPIKAYSSPSTTPEARRREPQAPRQPSLMGPESQSPDCKDGAAATGATATPSAGASGGLQPHQLSSCDGELAVAPLPEGDLPGQFTRVMGKVCTQLLVSRPDEENISSYLQLIDKCLIHEAFTETQKKRLLSWKQQVQKLFRSFPRKTLLDISGYRQQRNRGFGQSNSLPTAGSVGGGMGRRNPRQYQIPSRNVPSARLGLLGTSGFVSSNQRNTTATPTIMKQGRQNLWFANPGGSNSMPSRTHSSVQRTRSLPVHTSPQNMLMFQQPEFQLPVTEPDINNRLESLCLSMTEHALGDGVDRTSTI

SEQ ID NO: 187433 - protein, 718 aa, Artificial Sequence
  derived and/or modified sequence
MMFRDQVGVLAGWFKGWNECEQTVALLSLLKRVSQTQARFLQLCLEHSLADCAELHVLEREANSPGIINQWQQESKDKVISLLLTHLPLLKPGNLDAKVEYMKLLPKILAHSIEHNQHIEESRQLLSYALIHPATSLEDRSALAMWLNHLEDRTSTSFGGQNRGRSDSVDYGQTHYYHQRQNSDDKLNGWQNSRDSGICINASNWQDKSMGCENGHVPLYSSSSVPTTINTIGTSTSTILSGQAHHSPLKRSVSLTPPMNVPNQPLGHGWMSHEDLRARGPQCLPSDHAPLSPQSSVASSGSGGSEHLEDQTTARNTFQEEGSGMKDVPAWLKSLRLHKYAALFSQMTYEEMMALTECQLEAQNVTKGARHKIVISIQKLKERQNLLKSLERDIIEGGSLRIPLQELHQMILTPIKAYSSPSTTPEARRREPQAPRQPSLMGPESQSPDCKDGAAATGATATPSAGASGGLQPHQLSSCDGELAVAPLPEGDLPGQFTRVMGKVCTQLLVSRPDEENISSYLQLIDKCLIHEAFTETQKKRLLSWKQQVQKLFRSFPRKTLLDISGYRQQRNRGFGQSNSLPTAGSVGGGMGRRNPRQYQIPSRNVPSARLGLLGTSGFVSSNQRNTTATPTIMKQGRQNLWFANPGGSNSMPSRTHSSVQRTRSLPVHTSPQNMLMFQQPEFQLPVTEPDINNRLESLCLSMTEHALGDGVDRTSTI

SEQ ID NO: 187434 - DNA, 2154 bp, Artificial Sequence
  derived and/or modified sequence
atgttcagagaccaggtgggcgtgctggccggctggttcaagggctggaacgagtgcgagcagaccgtggccctgctgagcctgctgaagagagtgagccagacccaggccagattcctgcagctgtgcctggagcacagcctggccgactgcgccgagctgcacgtgctggagagagaggccaacagccccggcatcatcaaccagtggcagcaggagagcaaggacaaggtgatcagcctgctgctgacccacctgcccctgctgaagcccggcaacctggacgccaaggtggagtacatgaagctgctgcccaagatcctggcccacagcatcgagcacaaccagcacatcgaggagagcagacagctgctgagctacgccctgatccaccccgccaccagcctggaggacagaagcgccctggccatgtggctgaaccacctggaggacagaaccagcaccagcttcggcggccagaacagaggcagaagcgacagcgtggactacggccagacccactactaccaccagagacagaacagcgacgacaagctgaacggctggcagaacagcagagacagcggcatctgcatcaacgccagcaactggcaggacaagagcatgggctgcgagaacggccacgtgcccctgtacagcagcagcagcgtgcccaccaccatcaacaccatcggcaccagcaccagcaccatcctgagcggccaggcccaccacagccccctgaagagaagcgtgagcctgaccccccccatgaacgtgcccaaccagcccctgggccacggctggatgagccacgaggacctgagagccagaggcccccagtgcctgcccagcgaccacgcccccctgagcccccagagcagcgtggccagcagcggcagcggcggcagcgagcacctggaggaccagaccaccgccagaaacaccttccaggaggagggcagcggcatgaaggacgtgcccgcctggctgaagagcctgagactgcacaagtacgccgccctgttcagccagatgacctacgaggagatgatggccctgaccgagtgccagctggaggcccagaacgtgaccaagggcgccagacacaagatcgtgatcagcatccagaagctgaaggagagacagaacctgctgaagagcctggagagagacatcatcgagggcggcagcctgagaatccccctgcaggagctgcaccagatgatcctgacccccatcaaggcctacagcagccccagcaccacccccgaggccagaagaagagagccccaggcccccagacagcccagcctgatgggccccgagagccagagccccgactgcaaggacggcgccgccgccaccggcgccaccgccacccccagcgccggcgccagcggcggcctgcagccccaccagctgagcagctgcgacggcgagctggccgtggcccccctgcccgagggcgacctgcccggccagttcaccagagtgatgggcaaggtgtgcacccagctgctggtgagcagacccgacgaggagaacatcagcagctacctgcagctgatcgacaagtgcctgatccacgaggccttcaccgagacccagaagaagagactgctgagctggaagcagcaggtgcagaagctgttcagaagcttccccagaaagaccctgctggacatcagcggctacagacagcagagaaacagaggcttcggccagagcaacagcctgcccaccgccggcagcgtgggcggcggcatgggcagaagaaaccccagacagtaccagatccccagcagaaacgtgcccagcgccagactgggcctgctgggcaccagcggcttcgtgagcagcaaccagagaaacaccaccgccacccccaccatcatgaagcagggcagacagaacctgtggttcgccaaccccggcggcagcaacagcatgcccagcagaacccacagcagcgtgcagagaaccagaagcctgcccgtgcacaccagcccccagaacatgctgatgttccagcagcccgagttccagctgcccgtgaccgagcccgacatcaacaacagactggagagcctgtgcctgagcatgaccgagcacgccctgggcgacggcgtggacagaaccagcaccatctag

SEQ ID NO: 187435 - DNA, 2157 bp, Artificial Sequence
  derived and/or modified sequence
atgatgttcagagaccaggtgggcgtgctggccggctggttcaagggctggaacgagtgcgagcagaccgtggccctgctgagcctgctgaagagagtgagccagacccaggccagattcctgcagctgtgcctggagcacagcctggccgactgcgccgagctgcacgtgctggagagagaggccaacagccccggcatcatcaaccagtggcagcaggagagcaaggacaaggtgatcagcctgctgctgacccacctgcccctgctgaagcccggcaacctggacgccaaggtggagtacatgaagctgctgcccaagatcctggcccacagcatcgagcacaaccagcacatcgaggagagcagacagctgctgagctacgccctgatccaccccgccaccagcctggaggacagaagcgccctggccatgtggctgaaccacctggaggacagaaccagcaccagcttcggcggccagaacagaggcagaagcgacagcgtggactacggccagacccactactaccaccagagacagaacagcgacgacaagctgaacggctggcagaacagcagagacagcggcatctgcatcaacgccagcaactggcaggacaagagcatgggctgcgagaacggccacgtgcccctgtacagcagcagcagcgtgcccaccaccatcaacaccatcggcaccagcaccagcaccatcctgagcggccaggcccaccacagccccctgaagagaagcgtgagcctgaccccccccatgaacgtgcccaaccagcccctgggccacggctggatgagccacgaggacctgagagccagaggcccccagtgcctgcccagcgaccacgcccccctgagcccccagagcagcgtggccagcagcggcagcggcggcagcgagcacctggaggaccagaccaccgccagaaacaccttccaggaggagggcagcggcatgaaggacgtgcccgcctggctgaagagcctgagactgcacaagtacgccgccctgttcagccagatgacctacgaggagatgatggccctgaccgagtgccagctggaggcccagaacgtgaccaagggcgccagacacaagatcgtgatcagcatccagaagctgaaggagagacagaacctgctgaagagcctggagagagacatcatcgagggcggcagcctgagaatccccctgcaggagctgcaccagatgatcctgacccccatcaaggcctacagcagccccagcaccacccccgaggccagaagaagagagccccaggcccccagacagcccagcctgatgggccccgagagccagagccccgactgcaaggacggcgccgccgccaccggcgccaccgccacccccagcgccggcgccagcggcggcctgcagccccaccagctgagcagctgcgacggcgagctggccgtggcccccctgcccgagggcgacctgcccggccagttcaccagagtgatgggcaaggtgtgcacccagctgctggtgagcagacccgacgaggagaacatcagcagctacctgcagctgatcgacaagtgcctgatccacgaggccttcaccgagacccagaagaagagactgctgagctggaagcagcaggtgcagaagctgttcagaagcttccccagaaagaccctgctggacatcagcggctacagacagcagagaaacagaggcttcggccagagcaacagcctgcccaccgccggcagcgtgggcggcggcatgggcagaagaaaccccagacagtaccagatccccagcagaaacgtgcccagcgccagactgggcctgctgggcaccagcggcttcgtgagcagcaaccagagaaacaccaccgccacccccaccatcatgaagcagggcagacagaacctgtggttcgccaaccccggcggcagcaacagcatgcccagcagaacccacagcagcgtgcagagaaccagaagcctgcccgtgcacaccagcccccagaacatgctgatgttccagcagcccgagttccagctgcccgtgaccgagcccgacatcaacaacagactggagagcctgtgcctgagcatgaccgagcacgccctgggcgacggcgtggacagaaccagcaccatctag

SEQ ID NO: 187436 - DNA, 2154 bp, Artificial Sequence
  derived and/or modified sequence
atgtttcgcgaccaagttggcgtgcttgcaggttggttcaagggttggaacgagtgcgagcagacagttgccctcctgagtctgctcaagcgcgtttcccagacacaggcccggtttctccaactctgccttgaacactccctcgccgattgcgccgagctccacgtgttggagagggaagcaaatagccctggcatcattaatcagtggcagcaggagtcaaaagataaggtgatctcactactgctcactcacctgccattactgaaacccggcaacctagacgctaaggtggaatacatgaagctgctgccgaaaattctggcgcactccattgaacacaatcagcacattgaagaaagtcgacagttactgtcatacgctctgattcaccctgccacgagcttggaagatcggtctgccctcgccatgtggctgaaccatctcgaggacaggacctccacaagcttcgggggtcagaaccgaggccgttcagacagcgtggattacggccagacccactactaccaccaacgccagaatagcgatgacaagttaaatggctggcagaactcgagagattccggcatttgtataaacgcaagcaactggcaggacaagagtatgggatgcgagaatggccatgtgccattatactcttcctcttccgtgcccacaaccatcaatactatcggaacttctacatctacaatcctgtctggccaagcgcaccactcccctttgaaaaggtccgtctcactgacgccccccatgaatgttcctaatcagcccttaggtcacggatggatgagccacgaagatctcagagcacggggccctcagtgcctcccatccgatcatgctcccttgagcccacagtccagcgtggcaagctccggaagcggcgggtccgagcacttggaagatcagaccacggccagaaacacattccaagaggaaggcagcggaatgaaagacgtgcccgcctggttgaaatcactccgtctacacaagtacgctgcactgttttcccaaatgacttacgaggagatgatggcactaacagagtgccagctggaagcccaaaacgttactaagggcgccagacataagatcgtgatcagcatccagaagcttaaggaacggcaaaacttgctcaagtcccttgagcgcgacattatagaaggaggaagtctgaggattccgctccaagagcttcatcagatgattctgacacccatcaaagcctactcttctccaagtaccacacccgaggcccgtcgacgcgagccacaagctcccaggcagccaagccttatgggccctgagtcacagagtcctgattgcaaagacggagcggctgcaaccggcgctactgccacgccctccgccggtgctagcggggggctgcaaccacaccagttgagcagctgcgatggcgaactggccgtggctcccctgccggagggcgatctgcctggccagtttactcgggtcatggggaaggtgtgtacacagctgctggtgtcgcggccagatgaggaaaatatctccagctatcttcagctgattgacaaatgcctgattcacgaggcgtttaccgaaacacagaagaagagattgctatcatggaaacaacaggttcagaagctcttccgctcttttccgcggaagacccttctcgacatcagcggctatcgccaacagcgtaaccgcgggtttggccagtccaactcccttccgactgctggaagcgtggggggaggtatggggagaaggaacccacgacagtaccagataccatccaggaatgtaccgagtgctagattgggtctcctcggaacgtcggggttcgtgtcatcgaatcaaaggaataccacagcaactccaactataatgaagcagggcaggcagaatttgtggtttgcaaatcccggagggtccaactccatgcccagtaggacccattcatccgtccagcgaacaaggtcattaccagtgcacaccagccctcaaaatatgcttatgtttcaacagcccgaattccagctgcctgtcacggagccagacatcaataaccgtctggaatctctgtgtctgtccatgaccgaacacgctctcggcgacggagtggatcgcacctccactatatag

SEQ ID NO: 187437 - DNA, 2157 bp, Artificial Sequence
  derived and/or modified sequence
atgatgtttagagatcaggtgggagtgttggcagggtggtttaaagggtggaatgagtgcgagcagactgttgcgctgctatccttgctgaaacgggtttctcaaactcaggccaggtttctgcagctttgcctggagcattcactggctgactgcgctgagctccacgtgttggagagggaggcgaacagcccgggtataattaaccagtggcagcaagagtcaaaggacaaggtgatttccctgttgcttacccatctccccctccttaaacccggcaatctcgatgctaaggtggaatacatgaagttactgcctaagatcctcgctcatagtatcgaacacaatcagcatatcgaagaatctcgccagctcctgtcgtatgcactcatccatcccgcgactagtctggaggatcgctcggcactcgcgatgtggctaaaccatttggaggatcgcacttccacatcttttggcgggcagaatagggggcggtccgactctgtggactatggccagacccactattaccaccaaagacagaattcggacgataaattgaacggatggcagaatagcagggattctgggatctgtataaacgcctctaactggcaagacaaaagcatgggatgcgaaaatggccacgtgcctttgtattcaagctcctccgtgcccacgactataaacaccattggcacttcaacctccaccatcctgtcggggcaagctcatcactcacccctgaaacgctctgtgagcctgacccctcctatgaatgtgcctaatcagccgctggggcatggctggatgagccacgaagatctgcgcgcccgtgggcctcagtgcctgccctcagatcacgcgccactcagccctcagagttccgtggccagctctggatccggaggctctgagcacttagaggatcagacaacagcacgcaatacattccaggaagagggatccggcatgaaagacgtgcctgcttggctgaagagcctgcgcctgcataagtatgcggcactctttagtcagatgacttatgaagagatgatggccctgactgaatgtcagctcgaagctcagaatgtgactaagggggcacggcacaagattgtgatttcaattcagaaacttaaagagaggcagaatctcctcaaatccctggagcgtgacattatcgaaggggggtcactgaggatcccattgcaggagctgcaccagatgattttaaccccaataaaagcttatagttccccctctacgacccctgaagcgagaagacgagagccccaggcgcctcgacagccctccctgatgggacccgaatcacagtcccccgactgcaaggatggggcggcagctacgggggccactgcaacaccctctgcgggcgcctcaggcggtctgcagccccaccagctgagttcgtgtgatggtgaactagccgtggctccactccctgaaggagacctgccgggtcagtttacccgcgtgatgggcaaagtttgcactcagctcctggtgtccagacctgacgaggagaacatatcctcttacctgcaacttatagataagtgtctaattcacgaagcgttcactgagacacagaagaaacggctgcttagttggaagcagcaagtacaaaaactattcaggtctttcccaagaaaaaccctgttggacatatccggttacaggcaacagcgaaatagaggcttcggtcagtccaattctttgccgacggctgggtccgtcgggggaggcatgggccgtagaaaccctagacaataccagatcccatcaaggaatgtgccctccgcacgactgggattgttagggacaagtgggtttgtatcgtccaaccaacggaataccaccgccacacccacgattatgaagcaaggacgccagaatttgtggtttgctaaccctggaggaagtaattctatgccatcccggacacacagttccgtccagagaacccgcagtctgcctgtgcatacttcaccccagaatatgctcatgtttcagcaaccggaatttcagctgccagtgacagagccggatatcaacaacaggcttgagagtctctgcctgtccatgaccgagcacgctctgggcgatggcgtggatcgcacatctaccatttag

SEQ ID NO: 187438 - DNA, 2157 bp, Artificial Sequence
  derived and/or modified sequence
atgatgtttagagatcaagtgggagtgctggccggctggttcaagggttggaatgagtgcgagcagactgtggcactgctgtccctcttgaagagggtctcccaaacacaagctagattcctacagttgtgtctggaacactccttggcagattgcgccgagctccacgttctggagagagaagccaattctcccggtatcatcaaccagtggcagcaggaatccaaggacaaggtgatctccctgctgctcacgcacctaccactgctgaagccaggaaatttggatgctaaagtggaatatatgaagctccttcccaaaattctggcccattctatagagcacaatcagcacattgaggaatcccgccagctattgtcctatgcactcatccatcccgctaccagtctggaggacagaagtgctctcgctatgtggctgaatcatctcgaagaccgaacgagcacgagctttgggggccagaaccgaggcagaagtgactccgtggattacggacagacccactactaccaccagcggcagaacagcgacgacaagctgaatgggtggcagaactcccgcgactctgggatctgtatcaatgcctctaactggcaggacaaatccatggggtgcgagaatggtcatgtgcccctgtacagtagctctagtgtgcctacaaccataaacactataggtacaagtacgtccacaatcctctcagggcaggcccaccattccccattaaagagatccgtatctctcaccccaccgatgaacgtccctaaccaacctcttggacatggctggatgtctcatgaggatttgcgagcgcgaggtccccagtgcttgccttcggaccacgctcctctgagcccacaatcaagcgttgcatcttccgggagcggaggatcagagcatctcgaagaccagaccaccgctcgaaacacattccaggaggaaggatccgggatgaaagatgttcccgcgtggctgaagagcctcagactgcacaagtacgcagctctgttctcccagatgacgtacgaggaaatgatggcacttacagagtgccagctcgaggcccagaatgtgaccaagggggctagacataagatcgttatcagcattcaaaagctgaaagagagacagaatctgcttaagtccctggagcgggacatcatcgaaggaggcagcctgcgcatcccactgcaggaactgcaccagatgatattgacgccaatcaaggcttactccagcccatcaactacaccagaggccaggagacgtgagcctcaggcaccaaggcagccctccctcatgggtccagagtcccaaagccctgattgtaaagacggggcagctgccaccggggcgacggcaactccctctgcaggtgcttcaggaggcctgcagcctcatcagctgtcatcctgtgacggcgaactcgctgtagcccccttaccagagggggacctccctgggcagtttacaagggtaatgggtaaagtgtgtacacaactcctggtctcacgaccagacgaagagaacattagtagctaccttcaactgatagacaagtgcctgatacatgaggccttcaccgagactcagaagaaacgcttgttgtcttggaaacagcaggttcagaagctcttcagaagcttcccgagaaaaaccctgctggatatatctgggtatcgccagcagaggaaccggggcttcggccaaagcaatagcctgccgaccgctggcagtgtaggcggtggcatgggcaggagaaacccccgacagtatcagattccaagtagaaacgtgccttcagcacgcctcggactactgggcacttccgggttcgtctcttcaaatcagcgtaacacaactgccacaccgacgattatgaagcagggacgccaaaacctttggttcgccaacccgggaggcagtaatagcatgccttcccgcactcattcttctgtccagagaactcgctcgttgccagtccatactagcccacagaatatgttaatgttccagcaacccgaatttcagctacccgtaacagagccagatatcaataaccggctggaatctctgtgtttgtccatgactgaacacgccttaggagacggagtggaccgcacctccactatctag

SEQ ID NO: 187439 - DNA, 2154 bp, Artificial Sequence
  derived and/or modified sequence
atgttccgggaccaggtgggcgtgctggccggctggttcaagggctggaatgaatgtgagcagacagtggccctgctgagcctgctgaagagggtgtcccagacccaggcccgcttcctgcagctgtgcctggagcacagcctggccgactgtgccgagctgcacgtgctggagcgggaggccaacagccctggcatcatcaaccagtggcagcaggagagcaaggacaaggtgatcagcctgctgctgacccacctgcccctgctgaagccaggcaacctggatgccaaggtggagtacatgaagctgctgcccaagatcctggcccacagcattgagcacaaccagcacatcgaggagagccggcagctgctgtcctatgccctgatccacccagccaccagcctggaggacagaagtgccctggccatgtggctgaaccacctggaggacaggaccagcaccagctttggaggccagaacagaggccgcagtgacagcgtggactatggccagacccactactaccaccagaggcagaacagtgatgacaagctgaatggctggcagaacagccgggacagcggcatctgcatcaatgccagcaactggcaggacaagtccatgggctgtgaaaatggacatgtgcccctgtacagcagcagctctgtgcccaccaccatcaacaccatcggcaccagcaccagcaccatcctgagcggccaggcccaccacagccccctgaagaggtctgtgtccctgaccccacccatgaatgtgcccaaccagcccctgggccacggctggatgagccatgaggacctgcgggcccggggcccccagtgcctgcccagcgaccacgcccccctgagcccccagagctctgtggccagcagcggcagcggcggcagcgagcacctggaggaccagaccacagccaggaacaccttccaggaggagggcagcggcatgaaggatgtgcctgcctggctgaagagcctgcggctgcacaagtatgctgccctcttcagccagatgacctatgaggagatgatggccctgacagagtgccagctggaggcccagaatgtgaccaagggggcccggcacaagatcgtcatcagcatccagaagctgaaggagcggcagaacctgctgaagagcctggagcgggacatcatcgagggcggcagcctgcgcatccccctgcaggagctgcaccagatgatcctgacccccatcaaggcctacagcagccccagcaccaccccagaggcccggcggcgggagccccaggccccccggcagcccagcctgatgggccctgagagccagagcccagactgcaaggatggagctgctgccaccggggccacagccaccccatctgctggggccagcggcggcctgcagccccaccagctgagcagctgtgatggagagctggccgtggcccccctgcctgagggggacctgcccggccagttcaccagggtgatgggcaaggtgtgcacccagctgctggtgtccaggccagatgaggagaacatcagcagctacctgcagctgattgacaagtgcctgatccacgaggccttcacagagacccagaagaagaggctgctgtcctggaagcagcaggtgcagaagctgttccgctccttccccaggaagaccctgctggacatcagcggctaccggcagcagaggaacagaggcttcggccagagcaacagcctgcccacagctggctctgtgggcggcggcatgggcagaagaaacccccggcagtaccagatccccagcagaaatgtgcccagcgcccggctgggcctgctgggcaccagcggctttgtgagcagcaaccagaggaacaccacagccacccccaccatcatgaagcagggccggcagaacctgtggtttgccaaccctgggggcagcaacagcatgcccagcaggacccacagctctgtgcagaggaccaggagcctgcctgtgcacaccagcccccagaacatgctgatgttccagcagcctgagttccagctgcctgtgacagagccagacatcaacaaccggctggagagcctgtgcctgtccatgacagaacatgccctgggagatggagtggacaggaccagcaccatctag

SEQ ID NO: 187440 - DNA, 2157 bp, Artificial Sequence
  derived and/or modified sequence
atgatgttccgggaccaggtgggcgtgctggccggctggttcaagggctggaatgaatgtgagcagacagtggccctgctgagcctgctgaagagggtgtcccagacccaggcccgcttcctgcagctgtgcctggagcacagcctggccgactgtgccgagctgcacgtgctggagcgggaggccaacagccctggcatcatcaaccagtggcagcaggagagcaaggacaaggtgatcagcctgctgctgacccacctgcccctgctgaagccaggcaacctggatgccaaggtggagtacatgaagctgctgcccaagatcctggcccacagcattgagcacaaccagcacatcgaggagagccggcagctgctgtcctatgccctgatccacccagccaccagcctggaggacagaagtgccctggccatgtggctgaaccacctggaggacaggaccagcaccagctttggaggccagaacagaggccgcagtgacagcgtggactatggccagacccactactaccaccagaggcagaacagtgatgacaagctgaatggctggcagaacagccgggacagcggcatctgcatcaatgccagcaactggcaggacaagtccatgggctgtgaaaatggccacgtgcccctgtacagcagcagctctgtgcccaccaccatcaacaccatcggcaccagcaccagcaccatcctgagcggccaggcccaccacagccccctgaagaggtctgtgtccctgaccccacccatgaatgtgcccaaccagcccctgggccacggctggatgagccatgaggacctgcgggcccggggcccccagtgcctgcccagcgaccacgcccccctgagcccccagagctctgtggccagcagcggcagcggcggcagcgagcacctggaggaccagaccacagccaggaacaccttccaggaggagggcagcggcatgaaggatgtgcctgcctggctgaagagcctgcggctgcacaagtatgctgccctcttcagccagatgacctatgaggagatgatggccctgacagagtgccagctggaggcccagaatgtgaccaagggggcccggcacaagatcgtcatcagcatccagaagctgaaggagcggcagaacctgctgaagagcctggagcgggacatcattgaaggaggcagcctgcgcatccccctgcaggagctgcaccagatgatcctgacccccatcaaggcctacagcagccccagcaccaccccagaggccaggagaagagagccccaggccccccggcagcccagcctgatgggccctgagagccagagcccagactgcaaggatggagctgctgccactggagccacagccacccccagcgctggggccagcggcggcctgcagccccaccagctgagcagctgtgatggagagctggccgtggcccccctgcctgagggggacctgcccggccagttcaccagggtgatgggcaaggtgtgcacccagctgctggtgtccaggccagatgaggagaacatcagcagctacctgcagctgattgacaagtgcctgattcatgaggccttcacagagacccagaagaagaggctgctgtcctggaagcagcaggtgcagaagctgttccgctccttccccaggaagaccctgctggacatcagcggctaccggcagcagaggaacagaggatttggccagagcaacagcctgcccacagctggctctgtgggcggcggcatgggcagaagaaacccccggcagtaccagatccccagcagaaatgtgcccagcgcccggctgggcctgctgggcaccagcggctttgtgagcagcaaccagaggaacaccacagccacccccaccatcatgaagcagggccggcagaacctgtggtttgccaaccctgggggcagcaacagcatgcccagcaggacccacagctctgtgcagaggaccaggagcctgcctgtgcacaccagcccccagaacatgctgatgttccagcagcctgagttccagctgcctgtgacagagccagacatcaacaaccggctggagagcctgtgcctgtccatgacagagcacgccctgggagatggagtggacaggaccagcaccatctag

SEQ ID NO: 187441 - DNA, 2154 bp, Artificial Sequence
  derived and/or modified sequence
atgttccgggaccaggtgggcgtgctggccggctggttcaagggctggaacgagtgtgaacagaccgtcgccctgctgagcctgctcaaaagagtgagccagacacaagctaggttcctgcagttatgtcttgagcacagtctagctgattgtgccgagctccatgtgctggagcgtgaagcaaattcgcccgggattattaaccagtggcagcaagagagcaaggacaaagtgattagcctgctgttaacacatctgcctttgctcaagcccggcaacctggacgcaaaagtggaatatatgaaacttttacctaagatcttggcgcactctatcgagcacaaccaacacatagaagagtccaggcagctgctaagttacgcattgatccaccccgccactagtttagaagaccgatctgctctggcgatgtggttaaatcatctagaggatcgaacatcgacttcatttggaggccagaacagaggcaggagtgactccgtggattatggtcaaacacattactatcaccaacggcagaactctgacgacaagttgaacggttggcagaacagccgagacagcgggatctgcatcaacgcttctaattggcaggacaagagtatgggctgtgagaatggtcatgttccactgtacagttcttcgtctgtgccaaccaccattaacactattggcaccagcacgagcactatcctcagtgggcaggctcatcactctccactgaagagatctgttagcctcaccccaccgatgaacgttccaaaccagcctctcgggcatgggtggatgtcacatgaggatttgcgggctcgtgggcctcagtgcctgcccagcgaccacgctccgctgagcccccagagctctgtggccagctcagggtctgggggcagcgagcatctggaagaccagacaaccgctagaaatactttccaggaggagggaagcggaatgaaggacgtgccggcatggctgaaaagcttaaggctgcacaaatacgcagctttattttcccagatgacctatgaggagatgatggctctgactgagtgtcagcttgaagcccagaacgttacgaagggcgcgcgccataaaattgtcatcagtatacaaaagctgaaagagcggcaaaacctattgaagtccttggagagggacatcatcgaaggcggctctttgagaattccactgcaggaactccaccagatgatattgacgcccattaaagcctattcctccccatccactacccccgaggcacgcaggcgggaaccacaggctccccgacagccaagcctcatggggcctgaaagtcaaagccccgactgcaaagacggggctgccgctacaggggcaactgccaccccgtccgccggggcctctggaggcctgcagccacatcaattatccagctgcgatggcgagctggctgtcgcacctctccctgagggagacctgccaggacagttcacacgagtcatgggaaaggtatgcactcagttactggtgagccgccctgatgaagagaatattagcagttaccttcagctgattgataaatgcttaatccacgaagcctttacagagactcagaaaaaacgcttactctcatggaaacagcaggtgcaaaaactattcagatcattcccacggaaaacactgcttgatatttctggctaccgccaacagcggaaccgggggtttgggcagtccaattcattgcctacggccggtagtgtcggcggtgggatgggccgtcggaatcctcggcagtaccaaatcccgagtcgaaatgtgcccagtgcacgcctcggtttgcttggtacttccggcttcgtttcctctaaccagcgtaacaccacagctactcccaccatcatgaagcagggtaggcagaacctgtggtttgccaaccctggagggtcgaattctatgccttctagaacccacagctctgttcagcgtacacgtagcctgcccgtacacactagtccccagaacatgttgatgtttcaacaacccgaattccagctgcccgtgaccgagcccgatattaacaacagacttgaaagcctttgtctgtccatgactgagcatgctcttggagatggggtggataggacctccaccatctag

SEQ ID NO: 187442 - DNA, 2157 bp, Artificial Sequence
  derived and/or modified sequence
atgatgttccgggaccaggtgggcgtgctggccggctggttcaaggggtggaatgaatgtgagcagaccgtggccctgctttcattgctcaaacgcgtgtcacagacacaggcacgcttcttgcagttgtgcctggaacactctttggccgactgtgcagaactgcatgtgctcgaaagggaggctaactcccctgggataattaatcagtggcagcaagaatctaaggacaaggtgatctccttgcttctgacccatctcccactgttgaagcccggtaatctcgatgctaaagtagaatatatgaaactcttaccaaaaatccttgctcacagcatcgagcataatcaacacatcgaagagagtaggcagctactatcctacgcacttatccaccctgccacaagtctggaagaccggtctgccctcgctatgtggctcaatcatctggaagacaggacttcgactagcttcgggggccagaacaggggccgctcggactctgtcgattatggacagacccattattaccaccagcggcagaactctgacgacaagctgaacggttggcagaacagcagagattcaggcatctgcatcaatgcctctaactggcaggacaagagtatgggatgcgagaacggacacgttccattatatagctctagttcagtgccgactaccataaacacaattgggaccagtacgtctacaatcctctccggacaggcccaccattccccgcttaaacgctccgtgtcgctcaccccccctatgaatgtccctaatcagccgctgggccacggctggatgagccatgaagacctgagagccaggggcccacagtgtctccctagcgaccatgccccactgtccccccagtcttccgtggcttcgtccggctccgggggcagcgagcatctcgaggaccagaccacagcccgcaatacttttcaagaggaggggtccggcatgaaagacgtaccagcctggcttaagtctttgagactgcataaatatgccgccctcttctcgcaaatgacttatgaggaaatgatggccttgacggagtgtcagctggaagctcaaaacgtgacaaaaggggcgcgccataaaatcgtgattagtattcagaaactcaaagaaaggcagaacttgctgaaatcccttgaacgagatatcatcgagggaggtagtctgagaatcccattgcaggaactccatcagatgatcttaaccccaatcaaggcgtacagttctccatcaactactccggaagcccggcgaagagagcctcaggctccgaggcagccttcactgatggggccggagagtcaatccccggactgcaaggacggcgccgctgctactggtgccacagctacaccaagtgccggcgcatcaggcggcctgcagccgcatcagttatcatcctgtgatggggagcttgccgtcgctccccttcctgagggcgacctgcccggacagtttacccgcgtgatgggtaaagtctgcacccagctactggtgtccagaccagatgaagagaatatctcctcttacctccagctcattgacaagtgtctgatccacgaggctttcacagagacacagaagaagcgtctgctgtcttggaaacagcaggtgcaaaaactcttcagatccttccccagaaagaccctgcttgatattagcggctaccgccaacagcgcaaccgcggttttggacagagcaacagtctaccaacagctgggtcagttgggggaggcatgggaagaaggaacccaaggcagtaccagattccatccagaaatgtgcccagcgcccgtcttgggctcttaggaaccagcggtttcgtaagctctaatcagcggaacactacagccactcctacaatcatgaagcaaggaaggcagaatctatggtttgccaatcctggaggttctaactctatgcctagtagaacccacagcagtgtgcagcgtaccaggagcctcccggttcacacgtcaccacagaacatgcttatgttccagcaacctgaatttcaactcccagtgaccgaaccagatataaacaaccgcctggaatctctctgcctgtctatgaccgaacacgcgctaggagatggggtggatcggacttctacaatctag

SEQ ID NO: 187443 - DNA, 2157 bp, Artificial Sequence
  derived and/or modified sequence
atgatgttccgggaccaggtgggcgtgctggccggctggttcaagggttggaacgagtgtgagcagaccgtggcattgctatctctcctgaaaagagtctctcagacccaggccaggttcctacaactttgtctcgaacacagtctggctgactgtgccgaactgcacgtactagagagagaagctaattcccccgggattataaaccaatggcaacaagaaagcaaagacaaagtgatcagcctgttgctcacccatttacctttattgaaaccagggaatctcgatgctaaggtggaatacatgaagttactgcctaaaatactcgcacattctattgaacacaaccagcacattgaagaatcacggcagcttctgagctatgccctaatccaccctgctacgagtctggaggatcgctccgcactcgctatgtggctgaaccatctcgaggacagaacttcaaccagttttggcggccagaaccgggggcgtagcgactcagtagattacggccagacgcattattatcaccagcgccagaatagcgatgataaactcaacggatggcaaaactctagggactcaggaatatgtatcaacgccagtaattggcaggacaagagcatggggtgtgaaaacggccacgtgccactgtattcgtcctcatctgtgcccacaaccattaatacaatcgggacttccacgagtaccatactgtccggccaggcacatcattcacccctgaagcggtccgttagccttacccctcccatgaacgtgccaaaccagcccctgggacatggatggatgagccacgaagacttgagggctagaggacctcagtgtctgcctagcgaccacgctccgctttcaccacagagctctgtggcatcttccggttctggggggtctgagcacttagaggaccagacaacggccaggaataccttccaggaggaggggtcaggtatgaaagatgtcccagcatggctgaaatcactgaggctgcataagtatgcagccttgttctcacagatgacttacgaggagatgatggctctcaccgagtgccagctggaagcccagaatgttaccaagggcgcccgccacaagatagtgatcagtattcaaaagctgaaggagagacaaaatctgctgaaatcgctagaacgagacattatcgagggaggtagcctaagaatcccgttgcaggagctgcatcaaatgatacttactcccatcaaagcatactcctccccttctacaaccccggaagcaagacggcgggaacctcaggctcctaggcagcccagcttaatgggaccagaaagtcagagcccagactgcaaagatggggccgctgctacgggtgctacagcaacaccttcagctggtgcctcaggtggcctccagccccatcagctgagctcctgcgatggagagcttgctgtggccccactgccagaaggcgatctccccggccaatttacacgagtaatgggtaaggtatgtacgcagctgctagtgtcccggccggacgaggagaacatctcatcctacctccagttaatagataagtgccttatccatgaagctttcaccgaaacacagaagaagcgcctccttagttggaaacagcaggtacaaaagttatttcgttcctttcctagaaagacacttctggatatcagtggatacaggcagcagaggaatcggggtttcggccaatcaaattccttacctactgctggaagtgtggggggaggaatgggcaggcggaacccacggcaataccagattcctagcaggaatgtgccgtcggctaggctgggactgctggggactagcgggttcgtgtctagcaaccaaagaaatacaacggctacccctacaattatgaagcagggcagacagaacctatggtttgctaaccctggcggaagtaacagcatgccctccaggacccattcgagtgtgcagcgcactcggagcctccccgtgcacactagcccccaaaatatgctgatgttccagcagccggaattccagctccccgtgacagagccagacattaataatcgcctggagagcctctgtttgagcatgactgagcatgcattgggggacggagtcgatagaacgtcaacgatatag

SEQ ID NO: 187444 - DNA, 2154 bp, Artificial Sequence
  derived and/or modified sequence
atgtttcgtgatcaagtgggcgtcctcgccggttggttcaaaggatggaacgaatgtgaacaaaccgtggcactcttgtcactgttaaaacgcgtatcacagactcaggccaggtttctgcaactgtgcttggagcactctctggcggactgtgcagaactccacgtgctcgaacgagaagccaatagtccaggaattattaatcagtggcagcaggagagcaaggataaggtgatttccctgttgttgacccacctgcccctgctcaaaccaggcaacctcgatgcaaaagttgagtatatgaagttgctgcccaaaatcctagcacattcgatcgagcacaatcagcacattgaagagtctagacagctgttatcttatgccctgatccaccctgctaccagcctggaagacagatctgctctggctatgtggctgaatcaccttgaggatagaactagcaccagttttgggggacagaatcggggtcggagcgatagcgttgactatggacagactcattattaccaccagcgtcaaaactccgatgataagcttaatgggtggcagaattcacgggattccggcatctgcatcaacgctagcaactggcaggacaagagcatgggatgcgagaacggccacgttcccctgtatagttcttcatcagtgcctactacgatcaatactattggtacgagtacctctactatcctgtctggccaagcccaccacagtcccctaaagaggtcagtgagccttacgccacccatgaacgtccctaaccagcctctgggacacggctggatgtctcacgaggatctgcgcgcaagggggcctcaatgcctcccatccgatcatgcacctttgtcgccccaatcctctgtggcatcaagcgggtcgggcggtagcgaacacctggaagatcagacaacagccaggaatacattccaggaagaagggtcggggatgaaagatgtaccagcctggctcaagtcgctccgtctacacaagtatgctgcgctgttctcacagatgacatatgaggagatgatggctttaaccgagtgtcaactcgaggcccagaacgtgactaagggcgctcggcacaagatagttatctcaatacagaaacttaaagagcgccagaatctgcttaagtccctggagcgagatataatcgagggtggatcactaagaatcccactccaggagttacaccaaatgattctcactcctatcaaagcctattccagcccatctacaactccggaggccaggcggcgtgagcctcaggcccctagacagccctctcttatgggccctgaaagtcagagcccagattgtaaagatggagctgctgctacaggcgctactgccacccccagcgccggtgcctctggcggtcttcagccccaccagctgagcagttgtgatggggagctagctgtggctcctctccccgagggcgacctccccggacaatttacaagagtgatggggaaggtgtgtactcagctcctggtttccagaccagacgaggagaacatctcaagctaccttcagttgatagacaagtgcttaatccacgaagcttttacagaaactcaaaaaaagaggctgctcagctggaaacagcaggtgcagaagctgtttcggtcttttcccagaaagaccctccttgacatctcaggataccgccaacagcgcaacagaggctttggacagtccaattccctgcctacggctgggtcagttggcggaggcatggggagaagaaatcccagacagtatcagataccatcacgaaacgttccatccgccagactcggacttctaggcacctctggcttcgtatcctctaatcagcggaatacaactgcaacccccaccataatgaaacaagggaggcagaatctatggtttgcaaatccgggtggcagcaattctatgcctagccgaacccacagcagcgtgcaacgcacacgcagtctgccagtgcatacaagcccgcagaacatgcttatgtttcagcagcccgagtttcagctcccagtgacagagccagacatcaataacaggttggaaagtctgtgtctctctatgactgaacacgccctgggggacggcgtggaccgcacctcaaccatttag

SEQ ID NO: 187445 - DNA, 2157 bp, Artificial Sequence
  derived and/or modified sequence
atgatgttcagggaccaggttggcgtgcttgctggatggttcaaaggttggaacgagtgtgagcagacagtcgctctcctgtccttgctgaaacgggtcagccaaacccaggctcgcttcctgcaactctgcctggagcactcattggccgactgtgcggaacttcatgtcctggagagagaagctaactcacccggaatcattaatcagtggcagcaagagagcaaggataaggtgatctcccttctgttaacccacctgcccctcctcaagccaggcaacctggatgctaaggtagaatacatgaagctcctacctaaaatactcgctcactctatcgaacacaaccagcacattgaagaatcccggcagctgctttcctatgccctgattcacccggcaacaagtttggaggaccggagcgcgctggccatgtggcttaatcatctggaggacaggacttccacatcttttgggggtcagaatcgaggacgaagtgacagcgtggattacgggcaaacccactactaccatcagcgccaaaacagcgatgacaagttgaacggctggcagaacagcagagattcgggcatctgtatcaatgcatccaattggcaagacaagtctatgggttgcgaaaacgggcacgttccactgtatagcagctcttctgtccccaccaccatcaacaccatcggcacttccacaagtactatcctgtccgggcaggcacaccatagtccactgaaaaggtcggttagtcttacacctccaatgaacgtgcccaaccagccactgggacatgggtggatgagccacgaagatctccgggctaggggaccacaatgtcttccctctgaccatgcaccattgagcccccaaagcagtgtcgctagttccgggtctggcggaagtgaacatttggaggaccagacaaccgctaggaacacttttcaggaggagggatccgggatgaaagacgtgcctgcctggctcaaatctctgcggctccacaagtatgccgcactttttagccagatgacatatgaagaaatgatggccctaaccgaatgtcagctggaggcacaaaacgtcactaagggggcacggcataaaattgtaatttcaatccagaagcttaaagaacgacagaatctgctcaagtctctggagcgcgacatcattgaaggaggcagcctaaggatacccttacaggagttgcatcagatgatactcacccctattaaggcatactcctcccctagtaccacacccgaggctcgtagacgcgaaccccaggcacctcgccaaccctcattgatggggccagaatcccagagtccagattgcaaggacggagccgcagcaacaggagctacagccaccccaagcgccggagcatctggcggactacagccccatcagctgagcagctgtgatggggagctggctgtggccccattgcctgagggagatctgcctggtcagttcactcgagtaatgggcaaggtatgcacgcagctgctagtgtctagacccgacgaggaaaacatctccagctatcttcagctcatagacaaatgcttgatccatgaagcttttaccgagacacaaaagaaacgcctcctctcatggaagcagcaggtgcagaaactgttcaggagttttccacggaaaacactcctggatatctctggctatcgacagcagcggaataggggattcggacagagcaattccctcccgacagctgggtcagtgggcggagggatggggagaaggaacccaaggcagtaccagattccatctcgcaatgtaccgtcagctcgcctggggttgctcggaacatcaggttttgtgtcttctaaccaaagaaacacaaccgccacacctaccatcatgaagcagggaagacagaacctctggttcgctaaccccggtggctctaacagcatgccttccagaacacacagcagtgtgcagagaacccgtagtctacctgtgcatacatcgccacagaacatgctgatgtttcaacagcccgagttccagctgcctgtcaccgagcctgatatcaacaacagactggaaagtctgtgtctgtcgatgacagagcacgcacttggagacggggtggaccggacaagcacaatttag

SEQ ID NO: 187446 - DNA, 2157 bp, Artificial Sequence
  derived and/or modified sequence
atgatgttcagggaccaggtcggggtgctggccggatggtttaaaggatggaacgagtgtgaacagaccgtggccctgctgagtctactgaagagagtgtcccaaacccaggccaggtttctacagttgtgcctggaacatagcctagccgactgtgcggagctccacgtcctggaacgtgaagcaaattcaccaggaatcattaaccagtggcagcaggagtcgaaagacaaagttatcagtctgcttttgactcatctccctcttcttaaacccggaaatctcgacgctaaagtggaatatatgaagctgctgcccaaaattctcgcccactctatcgagcacaaccagcatatcgaagaatccagacagctgctgagttacgctctcatccaccccgctacctcacttgaagataggtccgcactcgctatgtggctgaatcacctggaagacagaacctcgacaagcttcggaggacaaaaccggggacgatcggatagcgtggactatggtcagacacactattaccatcagaggcagaactccgacgataaactgaacgggtggcaaaattcacgcgattccgggatctgtatcaacgcctctaactggcaagacaagtcaatgggctgcgagaatgggcatgtgccactttactcttcatcctccgtcccaacgacaattaacacaatcgggacgtccacatccactattctttcaggccaggcccaccactctcctctgaaacgctccgtgagtttaacaccaccaatgaacgtgcccaaccagccattgggccacggctggatgagccacgaggacctgagagccagggggccacagtgtctgccctccgatcacgcccctttgtctccacagagctccgtggctagcagcggtagtggcggaagcgaacacctcgaagaccagacaacagcacggaacaccttccaagaagagggaagcggtatgaaggacgtcccggcttggcttaaaagtcttaggcttcacaagtatgcagccctgttctcccagatgacctatgaggaaatgatggctctcaccgagtgtcagctcgaggcccagaacgtgactaaaggagctcgtcataagatcgtgatatcaattcagaaactgaaggaacgccagaaccttctcaaatcccttgaaagggacatcatagagggagggtccctcagaattcccttacaggaattgcatcaaatgatcctgactccgatcaaggcctattcctctccaagtacaactccagaagcccgacgaagagagcctcaggcccctagacagcctagtttaatgggccctgaatctcagagccccgactgcaaagatggggcagccgctactggcgctaccgccactcctagcgctggcgcaagtggcggattacagccacatcagcttagctcttgcgatggagagctggctgtcgctcccctccctgaaggcgaccttcccggtcagttcacgcgagtgatgggcaaggtctgcacacagttactggtaagccggcctgatgaagaaaacatctcatcctatttgcagctgattgacaagtgtttgatccacgaagcgttcaccgagacccagaagaagcgtctcctctcgtggaaacaacaggtccagaagttgttccgctcgtttccccgaaagacactgcttgatattagcggctatcggcagcagcggaaccgagggtttggacagtccaacagcttaccgactgcgggaagcgtagggggagggatgggcagacgcaatcctcgacagtatcaaatcccgtctcgtaacgtacccagtgccagactgggcttactcggaacttccggtttcgtgtcttccaaccagaggaacacaacagcgacgcctacgatcatgaaacagggaaggcagaacctctggttcgctaaccccggagggtctaatagtatgccgagccgaactcattctagcgtgcagaggactagatccctgccggtgcacacttctccccagaatatgcttatgttccagcaacctgagtttcagctcccggttacagagccagatattaataacagactagagtccctgtgtctctccatgacagagcatgctctgggggacggagtggacaggacctccacaatatag

SEQ ID NO: 187447 - DNA, 6526 bp, Artificial Sequence
  derived and/or modified sequence
gatgtttcgcgaccaggtcggggtgctggcgggctggtttaagggctggaacgagtgcgagcagactgttgcgctgctgtcgctgctcaagcgcgtgagccagacccaggcccgcttcctccagctctgcctggagcactcgctggccgactgcgccgagctgcacgtcctcgaacgcgaggccaacagccccggaatcattaaccaatggcaacaggaatccaaggataaagtgatttccctcctgttaactcatctgcctttgctgaagccaggaaacctcgacgcgaaagtagaatatatgaaactgctgcccaaaatcctggctcactctattgaacacaaccagcacattgaggagagcaggcagctgctgtcctatgctttgatacatccagccacttcgttagaagaccgtagtgctttagccatgtggctgaatcacttggaggaccgcacgtcgaccagctttggtggccagaaccgaggccgctcagactctgtggattatggacagacacactactatcaccaaagacagaactctgatgacaagctcaatgggtggcagaactctcgggattctgggatttgcatcaatgcctccaactggcaggacaaaagcatggggtgtgagaatggccatgtgcccctctactcctcctcatctgtccccaccacaatcaatacgattggaaccagcacaagtacaattctctcaggccaggcacaccacagccctttgaaacgatctgtgtcccttaccccacccatgaatgtgccaaaccagcctctaggacatggatggatgtctcatgaggacttacgagctagaggaccccagtgcctcccatccgatcatgcccccctgtctccacaaagcagtgtagcctcttcaggaagtggtgggagtgaacacttagaagatcagaccactgctcgtaacacattccaagaagaaggtagtgggatgaaagatgttccagcctggctgaaaagcctccgcctgcacaaatatgccgcgcttttctcccagatgacctatgaggagatgatggccctcaccgagtgccagctggaggcgcagaatgttaccaaaggtgcaagacacaaaattgtcatcagtattcagaagctcaaagaaagacaaaatctcctgaagtctttggaaagggacatcatcgaggggggcagcctgcgcatcccgctccaggaactgcaccagatgatcctgactccgatcaaggcctacagctccccgagcaccacccccgaggctcgccgccgggagccccaggccccgcgtcagccctcactgatgggccccgagagccagagccccgactgcaaagatggggccgcagccactggcgccacggccaccccctcggccggggccagcggggggctccagccgcaccagctgagcagctgcgatggggagctggccgtcgcccccctgccagagggggacctccccgggcagttcacacgcgtcatggggaaagtgtgcacacagctcttggtctccagacctgatgaggaaaatataagttcctatttacagctcatagacaagtgtctaattcatgaggcatttacagagacacagaaaaaaagattgttgtcatggaaacagcaggtgcagaagctctttcggtctttccctcggaaaacccttctagacatatcaggatatcgacagcaaagaaatcgaggctttgggcaatccaactccctcccgacggctggctctgtgggcggtggcatgggcagacggaacccgcgccagtaccagatcccctctcggaacgtcccttccgcccgcctgggcctcttgggcaccagtggattcgtcagctccaaccagcgcaacaccacagctacccccaccatcatgaaacaaggaagacagaacctgtggtttgccaaccccgggggcagcaatagcatgccaagccgcacccacagctcagtccagaggacccgctcgctgcccgtgcacacttccccacagaacatgctgatgttccagcagccagaattccagcttcccgtgaccgaacctgacatcaacaacaggctggagtcgttgtgcctcagtatgaccgaacacgccctgggagacggggttgaccggacctccaccatctagaagctgaagacgagagtgaccgcgctggccgtgaaatcgactgctgcgggtccagtgtccgccatcttcagggttgcacagaatcctccaagatactttgcagccttttttccccctggtccctctcccgttttgattttgtgagagcgtaggtcatcctcgtaaacatatcagtagacctggggttggttattttgtcatttgtttctgtcatgggatggtttggtgtgtggggtggggaggggtctctagggaattatgagactgggaggggggtggagggaatgcaggtagctctctggatggaacggggacaggggaaagagtactgccatgaaagagataggagacacataagaggacagcagaagccctggccctggggaggcttctcggaaggcctggcttcacaggcaggccacagaaggatatcgcgggcacgtgcacccaaagcaagatagtggcttcccttttatatccaatctaatcctgattggatgtccctgaggcccctgctggaaacagccataggagagggcccatggcagtaggggaaagaaggaagaaattccctgcaacaaaacttcagctaaactttgatttgtgtattgtttacataataattttaaagggtacataatgtgtaaagagtttggatagaacctctcttcatactatggttttcgtaaaggatctgttgttgttacggattcattttttccctctatttttataagagcagcagagttgtcttctcaaaacggctgccaagctctgcttcttgggaagatggatgcagtcatgtaggcctgagctgtccgtctttcaccgttaggtgggaggagcgtatgggtggacttgaaggacatggacgtggctggaatgagcacagcattgggtgagcgcacaaggatgaggacatcatgtgatcagttatgggtttgctcgcagggcacccagagattctcaaagaatcctgcagcctctttctgtgctggatttgcttgtcacggagaggcctccctccctttccaccccacccatggggcattatcctgtcactcccagccttgctccacacacacacaggtgggtacaagttccactggaggagaaaaggcaaggatggactttttccccttgtgagaggtttgatacccagaaaatgagctcaaaacctttacattagggttgcttgtaggaactggagcctggaggctgcatctacttcacctgtcactgctgagggagaggaggggagaaaggcccagcaacagcgtacagaggggtcagtcagcaagtccagagagcacatgcagggagatgtttggcccacaccgcacagccccgccatctccagtgggcgatgaaagatgtaggaaaggttgatttcaagatggaaatgacagcgctatccgcacagtatgaattagggatttgctgtgttagttgatttatccatccacacagaggggaggaaaaagacactcgttacttggtgggagattgagaaactgtggtacctaccacaaagtaatagctctgtttatgaagggcaagaaaggctacatttcagaatttgacacagtggagggtattagaggaaatcaaagaggagttgtgtggaaaatcaggttgtgtaaatgaaggtatgaatgctcagccagaggcaagatcagggagatggtacaaggcctgtttgttacatggatgagtcgggtgcctggttgtgtgtgtgtgtgtgtgtgtgtgtgtgtgtgtgtgaagtcagagttgaaattcagaagatcagactatggaaatcactgcccttttttttttaaaagctaatgaactacatacagacctaaaaggccttaatgaaatccgaacaattttcttttactttcaagatcaaaaacatgcacccaacccagccttggatgccaccaccaggtttttgaagcccttttgagtctaagaaggtgagaacaatgtaaccatagaaagcctttcgtgagcagagaaggcttgaatccacaatttcattcgctgaattaaaaaaaaaaggttcagacctctccttgggtgactaagttctaaagatgcaaatccatgtgcagaaagagatggcattttttagttgattatttttaaccaagtgccattaacattcatcccccacatcccttttctaaacaagcttagtgttacttggggaatgtgttgggatggacgatcacatgtaaggcaggaagaataggtcaaaggttgaaggccaaaggtaagaccagagggtttgcgaatgtgggtttgtaggatactgagaaagtgaataaagaggagaaaaaaccatggtattacacatcttgctgagaaaggaaagcattcggatctgctgcaaaaacacatatatccataaagactcatgttattcagaaaacagattgtgaacacaatcacattcgcatgaatcctttaaaaggaagaagaccttaaagtatctgcaaatctgaatttctatttattccttcactgaatatagaaacaatggttatctgattattagagatattattttggatatgttacttattaacttgctatggctggtaaccatgataaagtctgttattaataacaacataattctttttttaaagaagaaaagcttatttttcattgacagtgtatagatttatctacttagttgtgttttgctattagtgttttaattttttttttaagttgagtgtttgataaattttaagaccctgtccccaccttgttttgagtcctgtgttgactacaggtatatagctcaatttaaaaatcctaaagcaaaagaattttatttataaaagaatcaaacagttgcatgcatgaggctgtgaagtcagatatttagtaataaaagcagcagtgcctttttttgtatttacccattgacccccaccaaatgcaactgttttatattaagaaaatagtaacaattttaaaatctcagagtaaaatctatttcactacatgcttttccccccttgttctgatttaagcagtgtgtacttggcatctctacattgtcctagggacagtggtgttctacaatattatcatgtatgatgttttattggtgctttttattcatagtggcttcttaccagaaacagtaggaagaaacacatgaactgtgtacaagacatgaaacattgctgctgatatgttgttttttcacatgcttttgagttttcactttttaaacgagagccagcaagcaaaatagatgtggctgggtctgcctgtccgggcggctctttgcaccgagctctcaaatcctgtgtattgagggttcctttttggtactcaggattggagctacagctgggcccccctctctcccattcgtttgaagagacactgagggaaacaagggtttcttttgaggtgtccttggctgccttttacgggatgggagccttctccggatcttttgttcttctgcacctcttgtagctactgccggtgcaaggttgtagatgttattccccaggagcctgggcttgggggctgagctgggctgaatgcaaaagcatgcaaccagaaggcgggcaaggggaggaaaagcaggcctggcctcattggtcccctggagatgtctgtagcagtcagctccagcttgggcctggggaagcagcctgaccaaggcgctcaggtgtgcctgttacaagaagaacctgcagaaggataatttgcacatggagctgtgataacactaatgttgattttttttttttttacaagtcatcagagatgtttgcaaagtgagttttatttttttgtaattcctttatctttacttaaaggtgaatgtgtattcctctgggaggaataggaagaaaacaggaatgttaataatgtcgaacagaaaacttcctcccttattaatatataatcctcatgtatttatgcctaatgtaagctgacttttaaaaagctttcttttgttgcatgccctgtgcaggcatctgtattgtacatgcatgcctttcgtcctgttttcctgtataaagttagtgaacaaagaaatatttttgcctagttcatgttgccaagcaatgcatattttttaaatttgtcatatatggaaagagcatgtttgttacatgtaaaagctttactgatatacagatatactaatgtttgaagatgctgttctttgcaagtgtacagttttcaaatgttgttaccagtgaaacacccttgtggtttaaacttgctacaatgtatttattattcatttcctcccatgtaactaagaatcatggctatatttcatatcaacgttatattgaaagtgaagggaaatgattaatacaaggttttgtaacactg

SEQ ID NO: 187448 - DNA, 6528 bp, Artificial Sequence
  derived and/or modified sequence
atgatgtttcgcgaccaggtcggggtgctggcgggctggtttaagggctggaacgagtgcgagcagactgttgcgctgctgtcgctgctcaagcgcgtgagccagacccaggcccgcttcctccagctctgcctggagcactcgctggccgactgcgccgagctgcacgtcctcgaacgcgaggccaacagccccggaatcattaaccaatggcaacaggaatccaaggataaagtgatttccctcctgttaactcatctgcctttgctgaagccaggaaacctcgacgcgaaagtagaatatatgaaactgctgcccaaaatcctggctcactctattgaacacaaccagcacattgaggagagcaggcagctgctgtcctatgctttgatacatccagccacttcgttagaagaccgtagtgctttagccatgtggctgaatcacttggaggaccgcacgtcgaccagctttggtggccagaaccgaggccgctcagactctgtggattatggacagacacactactatcaccaaagacagaactctgatgacaagctcaatgggtggcagaactctcgggattctgggatttgcatcaatgcctccaactggcaggacaaaagcatggggtgtgagaatggccatgtgcccctctactcctcctcatctgtccccaccacaatcaatacgattggaaccagcacaagtacaattctctcaggccaggcacaccacagccctttgaaacgatctgtgtcccttaccccacccatgaatgtgccaaaccagcctctaggacatggatggatgtctcatgaggacttacgagctagaggaccccagtgcctcccatccgatcatgcccccctgtctccacaaagcagtgtagcctcttcaggaagtggtgggagtgaacacttagaagatcagaccactgctcgtaacacattccaagaagaaggtagtgggatgaaagatgttccagcctggctgaaaagcctccgcctgcacaaatatgccgcgcttttctcccagatgacctatgaggagatgatggccctcaccgagtgccagctggaggcgcagaatgttaccaaaggtgcaagacacaaaattgtcatcagtattcagaagctcaaagaaagacaaaatctcctgaagtctttggaaagggacatcatcgaggggggcagcctgcgcatcccgctccaggaactgcaccagatgatcctgactccgatcaaggcctacagctccccgagcaccacccccgaggctcgccgccgggagccccaggccccgcgtcagccctcactgatgggccccgagagccagagccccgactgcaaagatggggccgcagccactggcgccacggccaccccctcggccggggccagcggggggctccagccgcaccagctgagcagctgcgatggggagctggccgtcgcccccctgccagagggggacctccccgggcagttcacacgcgtcatggggaaagtgtgcacacagctcttggtctccagacctgatgaggaaaatataagttcctatttacagctcatagacaagtgtctaattcatgaggcatttacagagacacagaaaaaaagattgttgtcatggaaacagcaggtgcagaagctctttcggtctttccctcggaaaacccttctagacatatcaggatatcgacagcaaagaaatcgaggctttgggcaatccaactccctcccgacggctggctctgtgggcggtggcatgggcagacggaacccgcgccagtaccagatcccctctcggaacgtcccttccgcccgcctgggcctcttgggcaccagtggattcgtcagctccaaccagcgcaacaccacagctacccccaccatcatgaaacaaggaagacagaacctgtggtttgccaaccccgggggcagcaatagcatgccaagccgcacccacagctcagtccagaggacccgctcgctgcccgtgcacacttccccacagaacatgctgatgttccagcagccagaattccagcttcccgtgaccgaacctgacatcaacaacaggctggagtcgttgtgcctcagtatgaccgaacacgccctgggagacggggttgaccggacctccaccatctagaagctgaagacgagagtgaccgcgctggccgtgaaatcgactgctgcgggtccagtgtccgccatcttcagggttgcacagaatcctccaagatactttgcagccttttttccccctggtccctctcccgttttgattttgtgagagcgtaggtcatcctcgtaaacatatcagtagacctggggttggttattttgtcatttgtttctgtcatgggatggtttggtgtgtggggtggggaggggtctctagggaattatgagactgggaggggggtggagggaatgcaggtagctctctggatggaacggggacaggggaaagagtactgccatgaaagagataggagacacataagaggacagcagaagccctggccctggggaggcttctcggaaggcctggcttcacaggcaggccacagaaggatatcgcgggcacgtgcacccaaagcaagatagtggcttcccttttatatccaatctaatcctgattggatgtccctgaggcccctgctggaaacagccataggagagggcccatggcagtaggggaaagaaggaagaaattccctgcaacaaaacttcagctaaactttgatttgtgtattgtttacataataattttaaagggtacataatgtgtaaagagtttggatagaacctctcttcatactatggttttcgtaaaggatctgttgttgttacggattcattttttccctctatttttataagagcagcagagttgtcttctcaaaacggctgccaagctctgcttcttgggaagatggatgcagtcatgtaggcctgagctgtccgtctttcaccgttaggtgggaggagcgtatgggtggacttgaaggacatggacgtggctggaatgagcacagcattgggtgagcgcacaaggatgaggacatcatgtgatcagttatgggtttgctcgcagggcacccagagattctcaaagaatcctgcagcctctttctgtgctggatttgcttgtcacggagaggcctccctccctttccaccccacccatggggcattatcctgtcactcccagccttgctccacacacacacaggtgggtacaagttccactggaggagaaaaggcaaggatggactttttccccttgtgagaggtttgatacccagaaaatgagctcaaaacctttacattagggttgcttgtaggaactggagcctggaggctgcatctacttcacctgtcactgctgagggagaggaggggagaaaggcccagcaacagcgtacagaggggtcagtcagcaagtccagagagcacatgcagggagatgtttggcccacaccgcacagccccgccatctccagtgggcgatgaaagatgtaggaaaggttgatttcaagatggaaatgacagcgctatccgcacagtatgaattagggatttgctgtgttagttgatttatccatccacacagaggggaggaaaaagacactcgttacttggtgggagattgagaaactgtggtacctaccacaaagtaatagctctgtttatgaagggcaagaaaggctacatttcagaatttgacacagtggagggtattagaggaaatcaaagaggagttgtgtggaaaatcaggttgtgtaaatgaaggtatgaatgctcagccagaggcaagatcagggagatggtacaaggcctgtttgttacatggatgagtcgggtgcctggttgtgtgtgtgtgtgtgtgtgtgtgtgtgtgtgtgtgaagtcagagttgaaattcagaagatcagactatggaaatcactgcccttttttttttaaaagctaatgaactacatacagacctaaaaggccttaatgaaatccgaacaattttcttttactttcaagatcaaaaacatgcacccaacccagccttggatgccaccaccaggtttttgaagcccttttgagtctaagaaggtgagaacaatgtaaccatagaaagcctttcgtgagcagagaaggcttgaatccacaatttcattcgctgaattaaaaaaaaaaggttcagacctctccttgggtgactaagttctaaagatgcaaatccatgtgcagaaagagatggcattttttagttgattatttttaaccaagtgccattaacattcatcccccacatcccttttctaaacaagcttagtgttacttggggaatgtgttgggatggacgatcacatgtaaggcaggaagaataggtcaaaggttgaaggccaaaggtaagaccagagggtttgcgaatgtgggtttgtaggatactgagaaagtgaataaagaggagaaaaaaccatggtattacacatcttgctgagaaaggaaagcattcggatctgctgcaaaaacacatatatccataaagactcatgttattcagaaaacagattgtgaacacaatcacattcgcatgaatcctttaaaaggaagaagaccttaaagtatctgcaaatctgaatttctatttattccttcactgaatatagaaacaatggttatctgattattagagatattattttggatatgttacttattaacttgctatggctggtaaccatgataaagtctgttattaataacaacataattctttttttaaagaagaaaagcttatttttcattgacagtgtatagatttatctacttagttgtgttttgctattagtgttttaattttttttttaagttgagtgtttgataaattttaagaccctgtccccaccttgttttgagtcctgtgttgactacaggtatatagctcaatttaaaaatcctaaagcaaaagaattttatttataaaagaatcaaacagttgcatgcatgaggctgtgaagtcagatatttagtaataaaagcagcagtgcctttttttgtatttacccattgacccccaccaaatgcaactgttttatattaagaaaatagtaacaattttaaaatctcagagtaaaatctatttcactacatgcttttccccccttgttctgatttaagcagtgtgtacttggcatctctacattgtcctagggacagtggtgttctacaatattatcatgtatgatgttttattggtgctttttattcatagtggcttcttaccagaaacagtaggaagaaacacatgaactgtgtacaagacatgaaacattgctgctgatatgttgttttttcacatgcttttgagttttcactttttaaacgagagccagcaagcaaaatagatgtggctgggtctgcctgtccgggcggctctttgcaccgagctctcaaatcctgtgtattgagggttcctttttggtactcaggattggagctacagctgggcccccctctctcccattcgtttgaagagacactgagggaaacaagggtttcttttgaggtgtccttggctgccttttacgggatgggagccttctccggatcttttgttcttctgcacctcttgtagctactgccggtgcaaggttgtagatgttattccccaggagcctgggcttgggggctgagctgggctgaatgcaaaagcatgcaaccagaaggcgggcaaggggaggaaaagcaggcctggcctcattggtcccctggagatgtctgtagcagtcagctccagcttgggcctggggaagcagcctgaccaaggcgctcaggtgtgcctgttacaagaagaacctgcagaaggataatttgcacatggagctgtgataacactaatgttgattttttttttttttacaagtcatcagagatgtttgcaaagtgagttttatttttttgtaattcctttatctttacttaaaggtgaatgtgtattcctctgggaggaataggaagaaaacaggaatgttaataatgtcgaacagaaaacttcctcccttattaatatataatcctcatgtatttatgcctaatgtaagctgacttttaaaaagctttcttttgttgcatgccctgtgcaggcatctgtattgtacatgcatgcctttcgtcctgttttcctgtataaagttagtgaacaaagaaatatttttgcctagttcatgttgccaagcaatgcatattttttaaatttgtcatatatggaaagagcatgtttgttacatgtaaaagctttactgatatacagatatactaatgtttgaagatgctgttctttgcaagtgtacagttttcaaatgttgttaccagtgaaacacccttgtggtttaaacttgctacaatgtatttattattcatttcctcccatgtaactaagaatcatggctatatttcatatcaacgttatattgaaagtgaagggaaatgattaatacaaggttttgtaacactg

SEQ ID NO: 187449 - DNA, 3003 bp, Artificial Sequence
  derived and/or modified sequence
ttagctcccacccccacccccgcgccccttcgcagccgcattgcaagttttctgcgcggggaagatctgttgctggtgctggcgttcttaagcacggcgcccgaggccaccccaggcgggccgtgaggggagcaccagccgttggcagcggcagcaacaggaagccgcggggtctcctcccgcacctgggaagcaggcttctcgctgttacccggtggggaatagcccatctcccacatcggtggtgatcgccgctcgggaatgcgggcgtgaagggtccgagttgccgcccagcggggaggagaccccaggacgccggaaatcaccatcccaaagctgcaagaaggggggagaaagcattcttcattcagttgtgtgccttgtgggggatttttaaaaagtcgtttttttttttaaagaaacatttccgtgctactgtctgtcatcgtctctggggaaatcagccagaaccaccggaacgtaactgaaaccagacaagagaggcaggagcccaggcagtacctgcagcgtccgggcaccagagccaccttggaacaggaacgcgtctccggccgcggggctgcggctccgccaaactttggggcgggcggggcgggctggggcgcccagggggctctgtagaccgagggcggccccctaaccatgatgtttcgcgaccaggtcggggtgctggcgggctggtttaagggctggaacgagtgcgagcagactgttgcgctgctgtcgctgctcaagcgcgtgagccagacccaggcccgcttcctccagctctgcctggagcactcgctggccgactgcgccgagctgcacgtcctcgaacgcgaggccaacagccccggaatcattaaccaatggcaacaggaatccaaggataaagtgatttccctcctgttaactcatctgcctttgctgaagccaggaaacctcgacgcgaaagtagaatatatgaaactgctgcccaaaatcctggctcactctattgaacacaaccagcacattgaggagagcaggcagctgctgtcctatgctttgatacatccagccacttcgttagaagaccgtagtgctttagccatgtggctgaatcacttggaggaccgcacgtcgaccagctttggtggccagaaccgaggccgctcagactctgtggattatggacagacacactactatcaccaaagacagaactctgatgacaagctcaatgggtggcagaactctcgggattctgggatttgcatcaatgcctccaactggcaggacaaaagcatggggtgtgagaatggccatgtgcccctctactcctcctcatctgtccccaccacaatcaatacgattggaaccagcacaagtacaattctctcaggccaggcacaccacagccctttgaaacgatctgtgtcccttaccccacccatgaatgtgccaaaccagcctctaggacatggatggatgtctcatgaggacttacgagctagaggaccccagtgcctcccatccgatcatgcccccctgtctccacaaagcagtgtagcctcttcaggaagtggtgggagtgaacacttagaagatcagaccactgctcgtaacacattccaagaagaaggtagtgggatgaaagatgttccagcctggctgaaaagcctccgcctgcacaaatatgccgcgcttttctcccagatgacctatgaggagatgatggccctcaccgagtgccagctggaggcgcagaatgttaccaaaggtgcaagacacaaaattgtcatcagtattcagaagctcaaagaaagacaaaatctcctgaagtctttggaaagggacatcatcgaggggggcagcctgcgcatcccgctccaggaactgcaccagatgatcctgactccgatcaaggcctacagctccccgagcaccacccccgaggctcgccgccgggagccccaggccccgcgtcagccctcactgatgggccccgagagccagagccccgactgcaaagatggggccgcagccactggcgccacggccaccccctcggccggggccagcggggggctccagccgcaccagctgagcagctgcgatggggagctggccgtcgcccccctgccagagggggacctccccgggcagttcacacgcgtcatggggaaagtgtgcacacagctcttggtctccagacctgatgaggaaaatataagttcctatttacagctcatagacaagtgtctaattcatgaggcatttacagagacacagaaaaaaagattgttgtcatggaaacagcaggtgcagaagctctttcggtctttccctcggaaaacccttctagacatatcaggatatcgacagcaaagaaatcgaggctttgggcaatccaactccctcccgacggctggctctgtgggcggtggcatgggcagacggaacccgcgccagtaccagatcccctctcggaacgtcccttccgcccgcctgggcctcttgggcaccagtggattcgtcagctccaaccagcgcaacaccacagctacccccaccatcatgaaacaaggaagacagaacctgtggtttgccaaccccgggggcagcaatagcatgccaagccgcacccacagctcagtccagaggacccgctcgctgcccgtgcacacttccccacagaacatgctgatgttccagcagccagaattccagcttcccgtgaccgaacctgacatcaacaacaggctggagtcgttgtgcctcagtatgaccgaacacgccctgggagacggggttgaccggacctccaccatctagaagctgaagacgagagtgaccgcgctggccgtgaaatcgactgctgcgggtccagtgtccgccatcttcagggttgcacagaatcctccaagatactttgcagccttttttccccctggtccctctcccgttttgattttgtgagagcgtaggtcatcctcgtaaacatatcagtagacctgg

SEQ ID NO: 187450 - protein, 159 aa, Artificial Sequence
  derived and/or modified sequence
MRNARSIRPARAESWRLSLCFLNWQDAIISKPHCPAGRTCPTAAASHGSRGAGHSDKDQGRSPKHVVCHVEHKKQCPAEFTDSRGVHNAAASISSQVGFPGHLTARTAAHKREALAVSPTPTLQVNAPGAKLRAPKAPRTPEALGRGPKRAGEWKTGCF

SEQ ID NO: 187451 - protein, 871 aa, Artificial Sequence
  derived and/or modified sequence
MDGESEVDFSSNSITPLWRRRSIPQPHQVLGRSKPRPQSYQSPNGLLITDFPVEDGGTLLAAQIPAQVPTASDSRTVHRSPLLLGAQRRAVANGGTASPEYRAASPRLRRPKSPKLPKAVPGGSPKSPANGAVTLPAPPPPPVLRPPRTPNAPAPCTPEEDLTGLTASPVPSPTANGLAANNDSPGSGSQSGRKAKDPERGLFPGPQKSSSEQKLPLQRLPSQENELLENPSVVLSTNSPAALKVGKQQIIPKSLASEIKISKSNNQNVEPHKRLLKVRSMVEGLGGPLGHAGEESEVDNDVDSPGSLRRGLRSTSYRRAVVSGFDFDSPTSSKKKNRMSQPVLKVVMEDKEKFSSLGRIKKKMLKGQGTFDGEENAVLYQNYKEKALDIDSDEESEPKEQKSDEKIVIHHKPLRSTWSQLSAVKRKGLSQTVSQEERKRQEAIFEVISSEHSYLLSLEILIRMFKNSKELSDTMTKTERHHLFSNITDVCEASKKFFIELEARHQNNIFIDDISDIVEKHTASTFDPYVKYCTNEVYQQRTLQKLLATNPSFKEVLSRIESHEDCRNLPMISFLILPMQRVTRLPLLMDTICQKTPKDSPKYEVCKRALKEVSKLVRLCNEGARKMERTEMMYTINSQLEFKIKPFPLVSSSRWLVKRGELTAYVEDTVLFSRRTSKQQVYFFLFNDVLIITKKKSEESYNVNDYSLRDQLLVESCDNEELNSSPGKNSSTMLYSRQSSASHLFTLTVLSNHANEKVEMLLGAETQSERARWITALGHSSGKPPADRTSLTQVEIVRSFTAKQPDELSLQVADVVLIYQRVSDGWYEGERLRDGERGWFPMECAKEITCQATIDKNVERMGRLLGLETNV

SEQ ID NO: 187452 - DNA, 2616 bp, Artificial Sequence
  derived and/or modified sequence
atggacggcgagagcgaggtggacttcagcagcaacagcatcacccccctgtggagaagaagaagcatcccccagccccaccaggtgctgggcagaagcaagcccagaccccagagctaccagagccccaacggcctgctgatcaccgacttccccgtggaggacggcggcaccctgctggccgcccagatccccgcccaggtgcccaccgccagcgacagcagaaccgtgcacagaagccccctgctgctgggcgcccagagaagagccgtggccaacggcggcaccgccagccccgagtacagagccgccagccccagactgagaagacccaagagccccaagctgcccaaggccgtgcccggcggcagccccaagagccccgccaacggcgccgtgaccctgcccgcccccccccccccccccgtgctgagaccccccagaacccccaacgcccccgccccctgcacccccgaggaggacctgaccggcctgaccgccagccccgtgcccagccccaccgccaacggcctggccgccaacaacgacagccccggcagcggcagccagagcggcagaaaggccaaggaccccgagagaggcctgttccccggcccccagaagagcagcagcgagcagaagctgcccctgcagagactgcccagccaggagaacgagctgctggagaaccccagcgtggtgctgagcaccaacagccccgccgccctgaaggtgggcaagcagcagatcatccccaagagcctggccagcgagatcaagatcagcaagagcaacaaccagaacgtggagccccacaagagactgctgaaggtgagaagcatggtggagggcctgggcggccccctgggccacgccggcgaggagagcgaggtggacaacgacgtggacagccccggcagcctgagaagaggcctgagaagcaccagctacagaagagccgtggtgagcggcttcgacttcgacagccccaccagcagcaagaagaagaacagaatgagccagcccgtgctgaaggtggtgatggaggacaaggagaagttcagcagcctgggcagaatcaagaagaagatgctgaagggccagggcaccttcgacggcgaggagaacgccgtgctgtaccagaactacaaggagaaggccctggacatcgacagcgacgaggagagcgagcccaaggagcagaagagcgacgagaagatcgtgatccaccacaagcccctgagaagcacctggagccagctgagcgccgtgaagagaaagggcctgagccagaccgtgagccaggaggagagaaagagacaggaggccatcttcgaggtgatcagcagcgagcacagctacctgctgagcctggagatcctgatcagaatgttcaagaacagcaaggagctgagcgacaccatgaccaagaccgagagacaccacctgttcagcaacatcaccgacgtgtgcgaggccagcaagaagttcttcatcgagctggaggccagacaccagaacaacatcttcatcgacgacatcagcgacatcgtggagaagcacaccgccagcaccttcgacccctacgtgaagtactgcaccaacgaggtgtaccagcagagaaccctgcagaagctgctggccaccaaccccagcttcaaggaggtgctgagcagaatcgagagccacgaggactgcagaaacctgcccatgatcagcttcctgatcctgcccatgcagagagtgaccagactgcccctgctgatggacaccatctgccagaagacccccaaggacagccccaagtacgaggtgtgcaagagagccctgaaggaggtgagcaagctggtgagactgtgcaacgagggcgccagaaagatggagagaaccgagatgatgtacaccatcaacagccagctggagttcaagatcaagcccttccccctggtgagcagcagcagatggctggtgaagagaggcgagctgaccgcctacgtggaggacaccgtgctgttcagcagaagaaccagcaagcagcaggtgtacttcttcctgttcaacgacgtgctgatcatcaccaagaagaagagcgaggagagctacaacgtgaacgactacagcctgagagaccagctgctggtggagagctgcgacaacgaggagctgaacagcagccccggcaagaacagcagcaccatgctgtacagcagacagagcagcgccagccacctgttcaccctgaccgtgctgagcaaccacgccaacgagaaggtggagatgctgctgggcgccgagacccagagcgagagagccagatggatcaccgccctgggccacagcagcggcaagccccccgccgacagaaccagcctgacccaggtggagatcgtgagaagcttcaccgccaagcagcccgacgagctgagcctgcaggtggccgacgtggtgctgatctaccagagagtgagcgacggctggtacgagggcgagagactgagagacggcgagagaggctggttccccatggagtgcgccaaggagatcacctgccaggccaccatcgacaagaacgtggagagaatgggcagactgctgggcctggagaccaacgtgtag

SEQ ID NO: 187453 - DNA, 2616 bp, Artificial Sequence
  derived and/or modified sequence
atggatggagagagcgaagtggacttcagctccaatagcatcacccccctgtggcgccgtaggtctatccctcagccacaccaggttctcgggcgtagcaaacctaggccccagagctatcaaagccccaacggccttctcattacagatttccccgtcgaggacggcgggacattactggcagctcaaattccagcccaggtaccaacagccagtgactctcggaccgtacatcgctcccctctgctgttaggagcccaacgtcgagctgtagcaaatgggggaacagcctccccggaataccgcgccgcctctccaagattaagaaggcctaagtcacccaagctgcctaaggcagtccctgggggcagcccgaaaagcccagctaacggtgcagttaccctgccagctccccctcctccaccagtgctcaggcccccgagaacccccaacgcacctgccccttgcaccccagaggaagacctaactgggctgaccgcaagccctgtgcctagtcccactgccaacggtctggccgctaacaacgatagccccggatcagggagtcagagcggacgtaaagccaaggaccctgagcgtggactgttccctggccctcagaagagctcctcagaacaaaagctgcccttacagagactaccctcacaggagaacgagctgcttgagaatccctcagtggtgctgtccacaaatagtcctgctgccctgaaagtaggcaagcagcagattatcccaaagtctctggcgagtgaaatcaagataagcaaatccaacaatcaaaacgtcgaaccccataaacgcctgctgaaggtccgctccatggttgaggggctcgggggacctctcggccatgccggagaggagtcggaggttgataacgacgtggattcccctggttccctgcgaagggggctccggtcaacttcatatagaagagccgtagtctctggctttgactttgactcccccacgagtagtaagaaaaagaatcggatgtcccagccggtgctcaaggtggtaatggaggataaagagaaattttcatcccttggacggatcaaaaagaagatgctcaagggacagggaaccttcgacggtgaagagaacgctgtgctgtatcagaactacaaggagaaagcactggacattgatagcgatgaggaatctgagccaaaagagcagaagtcagacgagaaaattgtcatccatcacaagcctctccggtccacttggtctcaactaagcgcggtgaagaggaaaggcctgtcccaaaccgtttcccaggaggagcgcaagcggcaagaagccatctttgaagttataagttccgaacactcctaccttctgtcactggagattcttatccgaatgttcaaaaattctaaggaactctcagacacaatgaccaagactgaacgacaccacctgttcagcaacattaccgatgtatgcgaggccagcaaaaaatttttcatcgagctcgaggccagacatcagaacaacatatttatcgacgatataagcgatatcgtcgaaaagcatacagcctctacattcgacccatatgtcaaatactgtacgaatgaggtataccaacaacggacactgcaaaagttactcgctactaacccttcattcaaagaggtactgtccagaatcgaatcccatgaggactgtagaaatctccctatgattagcttcctcatcctgccaatgcagcgcgtgactcgcctgcccctacttatggacacaatctgccaaaagactcctaaggatagccctaagtacgaggtctgcaagcgggcactgaaggaggtgagcaaactggtgcgtctgtgtaacgaaggcgctaggaagatggagcggaccgagatgatgtataccataaatagtcagctagagttcaagattaagcctttccctctcgtgtcgtcgtctcgatggctggtgaagcggggtgagttaacagcatacgtggaggacactgtgttgttctctcgaaggacatccaaacagcaggtgtacttctttctgttcaacgacgtgctcatcatcaccaaaaagaaatccgaggaatcttacaacgtgaacgattacagcttgagagatcaactcttggtcgaatcttgcgataacgaggaactgaacagcagcccaggaaaaaatagctcaaccatgctgtattctaggcagagttccgcgtcccaccttttcactcttaccgtcttgtctaatcacgccaacgagaaagtcgaaatgctcctaggcgcagagacgcagtccgagagggcccgctggatcaccgcactcggccattcctccggaaaaccacccgcggatcggacatcgctgactcaggtggagatcgtacggtcattcaccgccaaacaaccagacgagctgagccttcaagtagccgacgtggtcctcatctatcagcgtgtatccgatggatggtacgaaggagaacggctgcgcgacggtgaacggggctggtttccgatggagtgcgcaaaggagattacttgccaggctaccatagataagaacgtcgaaagaatggggagattactgggtctggaaaccaatgtgtag

SEQ ID NO: 187454 - DNA, 2616 bp, Artificial Sequence
  derived and/or modified sequence
atggatggtgagagcgaggtggacttctcgagtaattccattacccctctgtggaggcgtcgatccattccacagccccaccaagtgttgggtcgctctaagccaagacctcaaagttatcagagcccaaatgggctgctcattacagatttcccagtggaggacggcggcacattgttggctgcgcagattcccgctcaggttcccaccgcttccgattctcgcacagttcatcgctctcccctgctgctcggggcccagagaagagcggtcgccaacggtgggacagcttctccagaataccgagccgcctctccaaggttgcgccggcccaagtcaccaaagctacccaaggccgtgcccggtggctccccaaagtcccccgctaacggagccgttaccctgcctgcccccccacctcctcccgtgcttcggccgccacggaccccaaacgctccagctccctgcacgcccgaggaggaccttaccggactaactgcaagtccggtgccttctcccaccgccaatgggttggccgcgaataatgactcccccggttccggcagtcagagtggacgcaaggccaaggaccccgaaagaggactgtttcctggcccccaaaagtctagcagcgagcagaaattgccactgcaaagacttccatcacaggagaacgaattgctggagaacccctccgttgtgctgtctaccaactctccggctgccctcaaagtgggcaaacaacagattattcctaaaagtctcgcctctgagataaaaatcagtaagagcaacaaccagaacgtggagcctcataagagactgcttaaggtacgtagcatggtggagggactgggcggcccattgggccacgccggtgaggagtccgaggtcgacaatgacgtggacagcccaggatccttgaggaggggactcaggtctacctcctatcggcgtgccgtggtatcgggattcgatttcgattcgcccacatcctctaaaaagaaaaacaggatgtctcagcctgtgcttaaggtggttatggaggataaggaaaaattcagctcgttaggaaggatcaagaaaaagatgttaaagggccagggaacgttcgacggggaggagaacgctgttctgtaccagaactacaaggagaaggcattggatatcgatagcgacgaggagtcggaaccaaaggaacaaaaatcggacgagaagatcgtgattcatcacaaacccctgcgctcaacttggagccagctatctgccgtgaagcgaaaaggcctgagtcaaaccgtgagtcaggaagagaggaaaagacaagaggcaatcttcgaggtcatcagtagcgaacattcctacctccttagcttagagatcctgattcgcatgtttaagaattccaaagagttaagcgacaccatgacaaaaacagagaggcatcacctcttttccaacattaccgacgtttgcgaagcaagcaagaaattcttcatcgagctggaggcccgccaccagaataacattttcatcgacgacatttctgacatagtggagaaacatacagcctctacctttgacccttatgtgaagtactgtactaatgaggtgtaccagcagcgcacgctgcagaagctacttgctacaaacccttcttttaaagaggttcttagtcggatagagagccacgaggactgtcgaaatcttccaatgattagctttctgatcctaccgatgcagagggtgacacgactgcccctgctgatggatactatttgtcagaagactccaaaggatagtccaaagtatgaagtctgcaagcgcgctctaaaggaggtgtcaaagttagtgcggctttgtaatgaaggggcccgcaagatggagaggaccgaaatgatgtacactatcaacagccagctggaattcaagattaaaccttttccactggtatcgagttctcgttggctggttaaacgcggtgagctgaccgcctatgtggaggatacagtgctgttctcgcgccgtacctcaaagcagcaggtttattttttcctgttcaacgatgtcctcatcattacaaaaaaaaagtctgaggaatcatacaatgttaatgattatagtttgagggatcaacttctggttgagtcttgtgacaacgaggagctgaacagctcgccaggaaagaactccagcactatgctttactctaggcaatcctctgccagtcacttgttcactttaacagtgttgtctaaccacgctaatgaaaaggtggagatgctccttggagccgagacccagtccgagcgtgcgcgttggatcaccgccctcggacactctagtggcaagcctcccgctgacaggaccagccttacgcaagtcgaaatcgtgcgttcctttacagccaagcagccagacgaattgtcattacaggtcgcagacgtggtccttatctatcagcgagtttccgatggctggtacgaaggtgagagactgcgcgacggcgagagagggtggtttccaatggagtgtgcaaaggaaataacttgtcaagctacaatcgataagaatgtagagcgcatgggcaggttactgggcctcgagaccaacgtctag

SEQ ID NO: 187455 - DNA, 2616 bp, Artificial Sequence
  derived and/or modified sequence
atggatggagagagcgaggtggacttcagcagcaacagcatcacccccctgtggaggcggcgcagcatcccccagccccaccaggtgctgggccgcagcaagccccggccccagagctaccagagccccaacggcctgctgatcacagacttccctgtggaggatggcggcaccctgctggccgcccagatcccagcccaggtgcccacagccagtgacagcaggacagtgcacaggagccccctgctgctgggcgcccagaggagagctgtggccaatggaggaacagccagccctgagtacagagctgccagcccccggctgcggcggcccaagagccccaagctgcccaaggctgtgcctgggggcagccccaagagccctgccaacggggctgtgaccctgcctgcccctcctcctcctcctgtgctgcggccccccaggaccccaaatgccccagccccctgcaccccagaggaggacctgaccggcctgacagccagccctgtgcccagccccacagccaacggcctggccgccaacaatgacagccctggcagcggcagccagagcggcaggaaggccaaggaccctgagcggggcctcttccctggcccccagaagagcagcagcgagcagaagctgcccctgcagaggctgcccagccaggagaatgagctgctggagaaccccagcgtggtgctgagcaccaacagccctgctgccctgaaggtgggcaagcagcagatcatccccaagagcctggccagcgagatcaagatcagcaagagcaacaaccagaatgtggagccccacaagaggctgctgaaggtgcgctccatggtggagggcctgggcggccccctgggccacgccggggaggagagcgaggtggacaatgatgtggacagccctggcagcctgcggcggggcctgcggagcaccagctaccgccgggctgtggtgtctggctttgattttgacagccccaccagcagcaagaagaagaacaggatgagccagcctgtgctgaaggtggtgatggaggacaaggagaagttcagcagcctgggccgcatcaagaagaagatgctgaagggccagggcacctttgatggagaagaaaatgctgtgctgtaccagaactacaaggagaaggccctggacatcgacagtgatgaggagagcgagcccaaggagcagaagagtgatgagaagatcgtcatccaccacaagcccctgcggagcacctggagccagctgtctgctgtgaagaggaagggcctgagccagacagtgtcccaggaggagaggaagaggcaggaggccatctttgaagtcatcagcagcgagcacagctacctgctgagcctggagatcctgatccgcatgttcaagaacagcaaggagctgagtgacaccatgaccaagacagagcggcaccacctgttcagcaacatcacagatgtgtgtgaggccagcaagaagttcttcatcgagctggaggcccggcaccagaacaacatcttcattgatgacatcagtgacatcgtggagaagcacacagccagcacctttgacccctacgtgaagtactgcaccaatgaggtgtaccagcagaggaccctgcagaagctgctggccaccaaccccagcttcaaggaggtgctgagccgcatcgagagccatgaggactgcaggaacctgcccatgatctccttcctgatcctgcccatgcagagggtgacccggctgcccctgctgatggacaccatctgccagaagacccccaaggacagccccaagtatgaggtgtgcaagagggccctgaaggaggtgtccaagctggtgcggctgtgcaatgaaggagccaggaagatggagaggacagagatgatgtacaccatcaacagccagctggagttcaagatcaagcccttccccctggtgagcagcagccgctggctggtgaagagaggagagctgacagcctacgtggaggacacagtgctcttcagcaggaggaccagcaagcagcaggtgtacttcttcctgttcaatgatgtgctgatcatcaccaagaagaagtctgaggagagctacaacgtgaatgactacagcctgcgggaccagctgctggtggagagctgtgacaatgaggagctgaacagcagccctgggaagaacagcagcaccatgctgtacagccggcagagcagcgccagccacctgttcaccctgactgtgctgagcaaccacgccaatgagaaggtggagatgctgctgggcgctgagacccagagcgagcgggcccgctggatcacagccctgggccacagcagcggcaagcccccagctgacaggaccagcctgacccaggtggagatcgtgcgctccttcaccgccaagcagccagatgagctgagcctgcaggtggctgatgtggtgctgatctaccagagggtgtctgatggctggtatgaaggagagcggctgagagatggagagcggggctggttccccatggagtgtgccaaggagatcacctgccaggccaccatcgacaagaatgtggagaggatgggccgcctgctgggcctggagaccaacgtgtag

SEQ ID NO: 187456 - DNA, 2616 bp, Artificial Sequence
  derived and/or modified sequence
atggacggcgagagcgaggtggacttcagcagcaacagcatcaccccactgtggcgacggcgctccataccccagcctcatcaggttctgggccgaagtaagccaaggccccagtcttaccagagcccgaacgggttattgatcacggatttccctgtagaggatggaggaaccctgctggcagcccagataccagcccaggtgcctacagcctctgacagccgcacagtccatcggtcacctttgctgttgggagcccaaagacgggcggttgcgaacggcggaacagccagtcctgagtacagggcggcctctccacggctgcgccgcccaaaatcacctaagctgccaaaagcagttccgggagggtcccccaagagtcctgccaatggtgcagtaactctccccgctcctccgcccccaccagtgctgagacctccccgtacacctaacgctcccgcaccatgcacgcccgaggaggatctcaccggcttaacagcctcacctgtgccctctcctacggccaatggactggccgccaacaacgactcccctgggtccggatcccaatctgggagaaaggctaaagaccccgaaagggggctattccccgggccccaaaagtcatccagtgagcagaagctgcctctgcaacggctcccttcgcaagaaaatgaattgctggaaaacccttctgttgtactgagcactaactcccccgctgctctgaaggtcggaaaacagcaaatcatccctaagtctctggccagcgaaatcaaaatctccaagtctaacaaccagaatgtggagccccataaaagactgctgaaagttcgctccatggtcgagggtctgggaggccccttggggcatgccggggaagaaagtgaagtggataatgatgtggattccccgggctccctcagacgaggtctgcggagtacatcctatcggcgtgcagttgtgagtggctttgatttcgacagccccacctccagcaagaaaaagaaccggatgtcccagcctgtactgaaggtggtgatggaggacaaggaaaaattctcttctctgggcaggattaagaagaagatgctgaagggacagggcacttttgacggggaagagaacgctgttctatatcaaaattataaagagaaggctctggatatagattcagacgaggaaagtgagcctaaagagcagaagagcgacgaaaagatcgttatccaccataaacccctgcgctccacatggtcacaactgtccgccgttaagaggaaggggctgagtcagacagtatctcaggaggaaaggaagaggcaagaggcaattttcgaggtcatttctagtgaacactcttacttactgtctttggagattctgatacgcatgtttaaaaactctaaggaactgagcgacactatgaccaagaccgaacgtcaccatttattttcaaatattaccgacgtatgtgaagcatccaagaagttctttatcgaacttgaagcacgccatcaaaataacatcttcatcgacgatatttctgacattgtggagaaacatactgcgagtacgttcgatccatatgttaagtactgcacaaatgaggtctaccaacaaagaaccctacaaaaactcctcgccacaaatccgtcattcaaagaagtgttatctcggattgaatctcacgaggactgtcgtaaccttcctatgatcagctttctgatcttgccaatgcagcgcgtaactcgactgcccctcctcatggacacaatctgccagaaaacacccaaagacagccccaaatatgaggtgtgcaagcgcgcactgaaggaggtgtcaaagcttgtgcgcctctgcaacgagggagccaggaagatggaaaggactgaaatgatgtacacgatcaattctcagttagagtttaaaatcaagccattcccactggtgtcttcttccagatggctggttaagaggggtgagctgactgcctacgttgaagacacagtgttgttctctagaaggacttccaagcaacaggtatacttcttcctttttaacgacgtgctcatcattactaaaaagaaatcggaagaatcgtataacgtcaacgactactcattgagagaccaactgctggtggagtcgtgtgacaacgaagaattaaatagttcaccagggaagaactcttccaccatgctgtatagtcggcagtcctccgcttcccatctattcaccctcacggtgttgagcaatcacgctaatgagaaggtggagatgttattaggcgccgaaacgcagtccgagcgagcacgatggataaccgctcttgggcatagcagtggtaaaccccctgccgatcgcaccagcctgactcaggtcgagattgtgcggagttttactgcaaagcagcctgacgaactgtccctgcaggtggccgacgtggtgctgatatatcagagagtgagcgacggctggtacgagggagaaagactgcgagacggagagcggggctggtttccaatggagtgtgcaaaagagatcacctgccaggccacaattgacaaaaacgtggagagaatgggcagactcctcgggttagagactaatgtgtag

SEQ ID NO: 187457 - DNA, 2616 bp, Artificial Sequence
  derived and/or modified sequence
atggacggcgagagcgaggtggacttcagcagcaacagcatcaccccactctggcgccgaagatcaataccgcagccgcaccaggtcctgggccgttccaaacctcgtccccaaagctaccagagccccaacggactgttaatcactgatttccccgtagaggacggcgggacgctactcgcagcgcagattcctgcccaggtgcccactgcctccgatagtagaactgttcaccggtctcctctgctgctcggggcccaacgccgcgcagtggcaaatggagggactgcttcccccgagtaccgcgcagcatcccctcggttacgaaggcccaagagccccaaacttcccaaggctgttcccggagggagccccaagagccctgctaacggggctgtcacactcccggccccccctccccccccagtcttgcggcccccccggaccccaaatgcacccgccccttgcacgccagaagaagacctgactggactaaccgctagcccggtaccctccccgacggccaacggcctggcggccaacaacgacagtcctgggagtggtagccaaagtgggaggaaggcaaaagatccagaacgtggactgtttccaggacctcagaagagctcttctgagcagaagttgcccctccaacgtctcccgtcgcaggaaaatgaattactggaaaacccatctgtagtactcagcaccaatagtccggcggccctgaaggtcggaaaacagcagatcattccaaagtctctcgccagcgagattaaaattagcaagtcaaataaccaaaacgtcgagccacacaaaaggcttctgaaggtgcgctcgatggtagagggtctgggcggaccactgggacacgccggagaggaatctgaggtggacaacgatgtcgattcaccaggcagcttgcgcagaggcttaagatctacatcctaccgtagggccgtggtgtctggattcgattttgactctcccacaagttcaaagaagaagaatcggatgagccagccagtgctgaaagtggtcatggaggacaaagagaaatttagctctcttgggagaatcaagaaaaaaatgctgaagggccagggaacattcgacggcgaagagaacgccgtgttgtaccagaactacaaagaaaaggcccttgacattgactctgatgaggagagtgagcctaaagaacagaaaagtgatgaaaagattgtcatacaccataagcccctgcggtccacatggtcacaactcagcgcggttaaacgtaaaggcttgtcccagaccgtgagccaggaggagaggaaacgccaggaggcaatctttgaggtaatctctagtgagcactcctacctgctgagtctggagatactgatcagaatgtttaagaactccaaggaacttagtgatacaatgaccaagacagagcgccaccatctgttctctaatatcacagatgtctgtgaggctagcaaaaagttctttatagagctggaagctcgccaccaaaacaatatctttattgatgatatttctgacatcgtcgagaagcacaccgcgagcacctttgatccttatgtgaaatactgcacaaatgaagtttatcagcaacggacactccagaaactgctcgcaacaaatcccagcttcaaggaggtcctttcccggatcgagtcacatgaggactgcaggaatctgccgatgatctcctttctgatcctgcctatgcaacgagtaactcgcctccccctgctaatggatactatttgccagaaaacccccaaagacagcccaaaatacgaagtgtgcaagagagctctcaaagaggtgagtaaactggtgagattatgtaatgaaggagcacggaaaatggagcgtactgagatgatgtacaccatcaactcgcagctggagttcaaaattaaaccgtttcctttagtttccagtagtcgttggttggtgaagcgtggggagcttacagcttatgtggaggatactgtcctgttctcccgccgaactagtaaacagcaggtgtatttctttctctttaacgacgtcttgatcattacgaaaaaaaaatcggaagagagctataacgtgaacgactactcactgcgcgaccagctcctcgtggaatcatgtgataatgaggagcttaatagcagccccggaaagaacagctcaacaatgctctatagcaggcagtccagtgcatctcatctgttcaccctgaccgtactctctaatcacgccaatgaaaaagtagagatgttgttaggtgccgagactcagtccgaaagagcaaggtggatcaccgctctggggcattcatccggaaagccaccagctgaccgtacttccctaacacaagtagagatcgtgcgctctttcaccgctaagcaacccgatgagctgagtcttcaagtcgcggacgtcgtactaatctatcagagggtgtctgatggttggtatgagggcgagcgcctgagagatggagagcgggggtggttcccaatggaatgcgctaaggaaattacgtgccaggcgaccattgacaagaacgtggagcgtatgggccgattgctcggcctcgagacaaacgtatag

SEQ ID NO: 187458 - DNA, 2616 bp, Artificial Sequence
  derived and/or modified sequence
atggacggagagagtgaagtggacttctcctctaacagtatcacccccttatggcgtcgccgtagcatcccacagccacaccaggttttaggcaggagcaaaccgagaccccaatcgtatcagtcgcccaacgggttattaataacagattttccagtggaggacggcggaacgcttctcgccgctcaaattccggctcaggtgcctacagcctccgactcgagaactgtccatcggtcaccgctgcttctcggggcacagcggagggccgttgccaacgggggaacagcttcaccagagtatagagccgcatccccaagactccggcgtcccaaatcccccaaattgcccaaggcagttcccggtgggagtcccaagtcccctgcaaacggggcagtgacactgcccgcaccccctcccccacccgtcctgcgcccaccacggactccaaacgctccagctccatgtactcccgaagaggatctcactggtctgacagcttcaccagtgccttcacctactgcaaatggccttgccgcaaacaacgactctccagggagcggatcgcagtcggggaggaaggcaaaggatccagaacggggactgttccccggacctcagaagtcaagttcagaacagaaactcccactccagcgcctcccctctcaagagaatgagttgctggagaatccttcagtagtgctttctacgaactcaccagcggctcttaaggtaggtaagcaacaaattattccaaagtctctcgcgtccgagatcaagatcagcaagtcaaataatcaaaatgtggaaccacataaacgactgctgaaggtgagaagcatggttgaaggcctcggtgggccactgggccacgccggagaggaatccgaggttgataacgatgttgactcccctggatctctgaggcgcggtcttcggtctaccagttaccgccgtgcagtcgtgagtggctttgattttgactctcctacatcatcaaaaaaaaaaaacagaatgtcacagccagtgctgaaagttgtgatggaggacaaggagaagtttagcagcctaggacggattaaaaagaagatgctgaaagggcagggcaccttcgatggagaagagaatgccgtcctgtatcagaactacaaggaaaaggctttggacattgactctgacgaagaatctgagccaaaggaacagaagtcggatgaaaaaattgtgatccatcacaagcccctcagatctacatggagtcaattgagcgcggtgaaacgtaagggactgtctcagacggttagccaggaagaacgcaagaggcaggaggccatttttgaagtgatttcctcagaacacagctatctcctttcactggagatacttatccgcatgttcaagaacagcaaagaattaagcgataccatgactaaaaccgagcggcaccacctgttcagtaacataaccgacgtctgcgaggcctccaaaaagtttttcattgaactggaagctagacatcaaaataatattttcatcgatgatatatctgatattgtggagaaacacacagcgtcgacctttgacccatatgtgaagtattgtaccaatgaggtgtaccaacaacgcacactgcagaagctgctggccaccaatccctcttttaaggaagtcctgagtaggatcgaatcccatgaggactgtcggaatctgcccatgattagtttccttattctcccgatgcaacgcgtgactcgactaccactgctcatggacacgatctgccagaaaactcccaaagatagccccaaatacgaagtgtgcaagcgagcattaaaggaagtaagcaaattggtccggctttgcaacgaaggcgcaaggaagatggagaggacagagatgatgtatacgattaattcccagctggagttcaagatcaagccgtttcctcttgtctcctccagtcgctggctcgttaagcgcggagaactgaccgcctacgtggaggacaccgtgctcttttcacgtcggacttcaaagcagcaggtatacttctttctgttcaacgacgttcttattatcaccaagaaaaaaagtgaagaatcatacaacgttaacgactatagcctgcgcgaccagctactagtggaaagttgtgacaacgaagagcttaattcttcacctggaaaaaacagctccaccatgctctacagcaggcagagctcggcctcccatttgttcaccctcacggtcctgagcaatcacgccaatgaaaaagtggagatgctactgggtgccgagacacagagcgagcgggctagatggatcaccgctctcggccactccagcggcaaacctcctgccgacaggacatcactgacacaggttgagatcgttaggtctttcaccgctaaacagcctgacgagctctctttacaggtggcagatgttgtgttgatttatcagcgggtctctgatggctggtacgagggggaacgcttgagggacggggagcggggatggttcccgatggagtgcgcaaaggagattacctgtcaagccactatcgacaaaaacgttgaacgcatggggagacttctgggccttgagaccaacgtgtag

SEQ ID NO: 187459 - DNA, 2616 bp, Artificial Sequence
  derived and/or modified sequence
atggacggggagtctgaggttgacttctcttctaacagcataacgccactctggagacgcaggtcgatccctcagcctcaccaggtactggggcgaagtaaacccagacctcagtcttaccagtccccgaatggcctcctcattaccgatttccccgtcgaggacggtgggaccttactggcagctcagatacccgcacaggtaccgactgcatcagactctcgcactgttcatcgcagcccactcctgctaggggctcaaaggcgagctgtggccaatggcggaacagcatctcctgagtatcgcgcagcctcccccaggctgaggcgaccgaagtcccctaaacttccaaaagcggtgcccggagggagtcctaagagtcctgcaaacggcgctgtgacactgccggcaccccctcctccacctgttctgcgccctcccagaactccaaatgccccagcaccttgtactccagaggaggacctcaccgggctcacagcctcaccggttccctcacctactgcaaacggcctggccgcaaataacgatagcccgggtagtggtagtcagagcggcaggaaagccaaagatcctgagcgagggttgttcccaggaccccagaagtcttcgagtgaacagaagcttcccctacagcggctcccctcacaggagaacgagctgctggagaacccatccgtcgtgttgagcacgaatagccctgccgctctgaaagtcggcaaacagcagatcattcccaaaagtctagcttcagagatcaagatatccaaaagcaataatcagaatgtggagccccacaagagattgctgaaagtgcgctcaatggtggaagggctcgggggacccctgggccacgcgggagaagagtcagaggtagacaatgatgtggatagtcccggatctctccggaggggtctcaggtccacatcttaccgccgagctgtcgtgtctggtttcgactttgactccccaactagctccaaaaaaaaaaatagaatgagccaaccggtgctgaaggtcgtgatggaagataaagaaaagttttcatccctcgggagaataaagaaaaagatgctgaaagggcaaggcacgtttgacggcgaggagaatgctgttctgtatcaaaactacaaggagaaggccctggacattgatagtgatgaggagtctgagcctaaggaacagaaaagcgatgagaaaattgtgatacaccacaagcccttacggtccacctggtcccagttgagcgcagtgaagcggaaggggttgagccagaccgtctctcaagaagagcgtaaaaggcaggaagccatatttgaagtgatcagctccgaacattcttacctcctttccttggaaatcctgattcgaatgttcaagaattccaaagagttgagtgacacaatgacaaaaactgagaggcatcatctcttctctaatattaccgatgtgtgtgaggctagcaaaaagttttttatcgaactggaggcgcgtcatcagaacaatattttcatcgatgatatttcagacatagtggaaaaacataccgcctctactttcgatccctatgttaaatattgtaccaatgaggtataccagcagcggacgcttcaaaagttgctggctacaaatccatcattcaaggaagtgttatcacgaatcgaatcccatgaggactgtagaaacctgccaatgattagcttccttattttgcccatgcagagggtgacacgcctccccctacttatggacaccatctgtcagaaaacccctaaagattctcctaagtacgaagtgtgtaagagggccctgaaggaggtcagcaaactggtgcgtctgtgtaacgagggggctaggaaaatggaacgcacagaaatgatgtatactattaactctcagctggagttcaagataaagcctttccccttggtgagtagctcacgatggctcgtgaagaggggagagctaacggcttacgtagaggatactgtacttttcagccgcagaacaagtaaacagcaggtctacttcttcctattcaacgacgtgttgattattacgaagaaaaaatccgaagaatcatataatgtgaatgattattcactgagagaccagctactggtggagtcttgtgacaatgaagagcttaattcatcccctggtaaaaacagctcaactatgctgtacagccgtcagagctccgcgtcccatttgttcactcttacagttctgtccaatcacgctaatgagaaggtggagatgctgttgggggcagagactcaaagcgagagggccagatggataactgccctgggccattcctccgggaaacccccagcggaccgaacctccttgacccaggtcgagattgtgcgatcctttaccgcaaaacagcccgatgaactttctctccaggttgccgacgtcgtgctgatatatcagagggtgtccgacggatggtacgagggcgaaaggttacgcgatggcgagagaggatggttcccgatggagtgtgccaaagagatcacatgtcaggccacgatagataaaaatgtggagcgaatgggacgcttacttggactggaaaccaacgtttag

SEQ ID NO: 187460 - DNA, 5254 bp, Artificial Sequence
  derived and/or modified sequence
agaactctgcgctactgcccacgcatctcacaaagtctactacgccgcgcgttctcggtttcaacgcacctccaggattcagggcttcctaagctgcaattcagcagggctcccttgcttgttctcactctgtgcccccggcaacgaccccgcgcgcctacactcccgtgccgcctcagctactagtccgcaacttctagccccaaaacgctggagctcagaacccagctcaggcaagactaactcggtgttgctcctcccggcgctgacttcgaggcccggctatggacggcgagagcgaggtggatttttctagcaacagcataacccctttgtggcggaggcggtcgattcctcagccccaccaggttctgggccggagcaagccgaggccccagtcctaccagagccccaacgggttactaattacggatttcccggtggaggacggagggacgctcctcgcagcgcagattcccgcccaggtgcccaccgcctcggacagcaggacggtacataggagccccctgcttctgggcgcccagcggagagcggtggccaatggtgggacggcatccccggagtacagggctgcctctcctcgacttcgacggcccaagtcacccaagctccccaaagcggtgcctggcggctccccgaaatccccagcaaatggcgcggtgaccttgcctgcgccgccgccgccgccggttctgcgccccccgcggactcctaacgcgcccgccccctgcacccccgaggaggaccttactgggttgactgccagcccggtgccttcgcccactgcaaatggccttgccgctaataacgactctcctgggtcaggttcgcagtccggccggaaggcaaaggaccccgaacgggggctctttcctgggccccagaaaagttcttcggaacaaaaactccccctccaaaggctgccctcccaggagaacgagctcctcgagaatccttccgtggttttgagtacaaacagccccgccgccctcaaagtggggaagcagcagatcattccgaagagtctggcctcggaaattaaaataagtaaatccaacaatcaaaatgtggagccccacaagagactcctcaaggtgcgcagcatggtggagggcctaggaggacccctgggtcacgcaggggaggagagtgaggtcgataacgacgtggatagcccagggtctctgcggagaggcttgcggtccacgtcttatcgcagggcagtggtcagtggctttgattttgacagtcctaccagctcgaagaagaagaacagaatgtcccagcctgttctgaaagtggtgatggaagacaaggagaagttttccagtctgggaaggataaagaaaaaaatgctgaaaggacaaggaacatttgatggggaagaaaatgctgtcctgtatcaaaactacaaggaaaaggcccttgacattgattctgatgaagagtcagagcccaaagaacagaagtcagatgaaaaaattgtgattcaccataagccattgagatccacatggagccaactctctgcggtgaaaagaaagggattatctcagacagtaagccaggaggaaagaaagagacaagaggctatctttgaagtcatatcctctgaacattcatatttactcagcttggagatcttgatacgaatgtttaaaaattctaaagaactgagtgatacaatgactaaaaccgagaggcaccatcttttctccaatattacagatgtctgtgaggcaagcaaaaagttctttatagagttggaagcaagacatcagaataatatcttcatagatgacataagtgacattgtggaaaaacacacagcatccacatttgacccatatgtgaaatactgcacaaatgaagtctaccaacaacgaacactacaaaaattgttagctaccaatccatcctttaaggaagtattgtcaaggattgagtcccatgaagactgtaggaacttacccatgatctcttttctcattctccccatgcagagggtgacccgccttcccctgctgatggatactatctgtcaaaaaacacctaaggactctccgaagtatgaagtctgcaaaagagccttgaaggaagttagcaagttggttcgactatgcaatgagggcgcccggaagatggaaaggactgagatgatgtacacaattaactcccagctggaatttaaaattaagccttttcctttagtctcctcttcccggtggttggtaaaaagaggtgaattgacagcctatgttgaagacactgtgcttttctcaagaaggacatccaaacagcaagtctacttctttctctttaacgatgtgctcattatcaccaagaagaagagtgaagaaagttacaacgtcaatgattattccttaagagatcagctattggtggaatcttgtgacaatgaagagcttaattcttctccagggaagaacagctccacaatgctctattcaagacagagctctgccagtcacctctttactctgacagtccttagtaaccacgcgaatgagaaagtggagatgctactaggagctgagacgcagagcgagcgagcccgctggataactgccctgggacacagcagcgggaagccgcctgcagaccgaacctcactgacccaggtggaaatcgttaggtcatttactgctaagcagccagatgaactctccctgcaggtggctgacgtcgtcctcatctatcaacgtgtcagcgatggctggtatgagggggaacgactacgagatggagaaagaggctggtttcctatggaatgtgccaaggagataacatgtcaagctacaattgataagaatgtggagagaatgggacgcttgctaggactggagaccaacgtgtagtctctcagatggtcttttgttactgcaagatttgcacgacacttaccgggctggttggttctgggctagttttattgttaattttgtcacagcctatttaattaaaagaacgaaaacacttgcctttaagcttgccaggttgttctgctctctcatgagaagagcttggatacagtgagtttgcacagctcagtttttacctaaccacacacttgcagacctcctgaggtacacagaatagctgagcagttcacttcagggatcaggtcatctctgctcctcctagtttcaccatgttctggcaataaaaaacacatattatatcctggttttctctatccttgcattactaaggtgactgtctctctttatacatccttgtatggttctcccagtattagcaagattgtatatctgtaaagaatgtccagttttgtaaatatttccctgcctttttttttctttttttacatctgattttaatgcttcgttaacttcaaaaggaactggtagagttcagaaggtgagctgttgtttttctaaacctcttcccaggaaggggacattgacacttgaatttttgtcacctttttcctcattagaaggaaagtagaaagccttactttaggatttttaaaaaaaaatccatctcaccccatattgttcttaaataagtatagactaattaacctaagctacctttaacaacgtagaatttagatgggttcatatatgtgagaaaaacctgaatataggacaggggtcctacttttttccccacctctgtcgcccaggctagagtatagtggtgtgatcttggcccactgcaacctctgcttcctaggttcaagtgattctcctgcctcagcctcccaagtagctgggattgtaagagtatgccaccacgcccagctactttttgtatttttagtagagacagggtttcatcatgttggccaggatggtctcttaactcctgccctcaagtgatccaccagagaggagatcctcggcctccccaagtgctgggattataggcatgagccaccgtgcccagcctactttctaattaattaaaaaaaaaaaaaaaaaaaaaaaaaaaccttcccaaatgagctgataaaaaactgacgtgaggctgctttgccttcaataatacctagttttcagctgttccaactcgtttccaaatagaaattagctggaacacactacagtaatctcaaggaagggaaaattaggccttaaaagataccaagaagtcagcatggtacccaattgaaaccttttgaccttagtgggaattcattctatttgcactaaaagccttaacttgctgtattcagagtccctcttaactgtgagtttctatagaactttactttttccactagtgcacagagagagaaaggttatcttaatagtcggtttcatggagatgaaggatgggagattaagaggggggaaatgatttttactggcagctatattccctctctgttctatttgctttaacaaagggataaaacctggcaaagtgtacattattggaggactcaaatctgtatgtgacatgtcccaactactgtccgctaactagttatccaaattgtaaagctacagaagcccagttgaggggtaagtgtgcctggctcacacagcctgcaccctgtcacctcggcaatgagccagtgtggggcactggggacttctaacccttggattgctctttttgacctgtgcataccttctaattgtaaaatatatttcagaccgtgagtaccttgagatctgagcaactgtgttaatgaagtaatagcaatggtccacagtgaaagatgtgttggggtttgcaaaacaagcattccgtcacctctttaataatgtcacagactttttaaaagagaggctatcaagttgtaatataatctgtcatgttttatttaggaaggaaggtaaatttgtgcttgcacggggatcattttgtattatttttgctaatacccagttgaagctaaaaagcaactatttgaatcctgtgaattaatttataagaatgttaaacagctttggaaatacatgcatcttatgaatcatagccttatttagcaagatcaatgttaaagtgttgttatatggcaagtatttaacacattcacagtgtttgtttgatttcaactgtgaattgtcttaagttttttcaaacctagttgtttctatggacacctgctctgaattgtacattgacttcattactaaagaacaaaaatgttcatttttgtcccagtaaattgagactgcttgtacactttcagaaaaatatgtgaatttataaagattttgtagatacttgt

SEQ ID NO: 187461 - DNA, 3929 bp, Artificial Sequence
  derived and/or modified sequence
aagtgtgggggcgtagtcaggcgtgggggcgggccggcgccggcgccgcggtcggcggcagcgctctcctaagctctcgcggctgcgcttcggtcccggacccgggccacccacggggtagtgggtgctcctcggccccggacattgcaagccccagaaggcaagactaactcggtgttgctcctcccggcgctgacttcgaggcccggctatggacggcgagagcgaggtggatttttctagcaacagcataacccctttgtggcggaggcggtcgattcctcagccccaccaggttctgggccggagcaagccgaggccccagtcctaccagagccccaacgggttactaattacggatttcccggtggaggacggagggacgctcctcgcagcgcagattcccgcccaggtgcccaccgcctcggacagcaggacggtacataggagccccctgcttctgggcgcccagcggagagcggtggccaatggtgggacggcatccccggagtacagggctgcctctcctcgacttcgacggcccaagtcacccaagctccccaaagcggtgcctggcggctccccgaaatccccagcaaatggcgcggtgaccttgcctgcgccgccgccgccgccggttctgcgccccccgcggactcctaacgcgcccgccccctgcacccccgaggaggaccttactgggttgactgccagcccggtgccttcgcccactgcaaatggccttgccgctaataacgactctcctgggtcaggttcgcagtccggccggaaggcaaaggaccccgaacgggggctctttcctgggccccagaaaagttcttcggaacaaaaactccccctccaaaggctgccctcccaggagaacgagctcctcgagaatccttccgtggttttgagtacaaacagccccgccgccctcaaagtggggaagcagcagatcattccgaagagtctggcctcggaaattaaaataagtaaatccaacaatcaaaatgtggagccccacaagagactcctcaaggtgcgcagcatggtggagggcctaggaggacccctgggtcacgcaggggaggagagtgaggtcgataacgacgtggatagcccagggtctctgcggagaggcttgcggtccacgtcttatcgcagggcagtggtcagtggctttgattttgacagtcctaccagctcgaagaagaagaacagaatgtcccagcctgttctgaaagtggtgatggaagacaaggagaagttttccagtctgggaaggataaagaaaaaaatgctgaaaggacaaggaacatttgatggggaagaaaatgctgtcctgtatcaaaactacaaggaaaaggcccttgacattgattctgatgaagagtcagagcccaaagaacagaagtcagatgaaaaaattgtgattcaccataagccattgagatccacatggagccaactctctgcggtgaaaagaaagggattatctcagacagtaagccaggaggaaagaaagagacaagaggctatctttgaagtcatatcctctgaacattcatatttactcagcttggagatcttgatacgaatgtttaaaaattctaaagaactgagtgatacaatgactaaaaccgagaggcaccatcttttctccaatattacagatgtctgtgaggcaagcaaaaagttctttatagagttggaagcaagacatcagaataatatcttcatagatgacataagtgacattgtggaaaaacacacagcatccacatttgacccatatgtgaaatactgcacaaatgaagtctaccaacaacgaacactacaaaaattgttagctaccaatccatcctttaaggaagtattgtcaaggattgagtcccatgaagactgtaggaacttacccatgatctcttttctcattctccccatgcagagggtgacccgccttcccctgctgatggatactatctgtcaaaaaacacctaaggactctccgaagtatgaagtctgcaaaagagccttgaaggaagttagcaagttggttcgactatgcaatgagggcgcccggaagatggaaaggactgagatgatgtacacaattaactcccagctggaatttaaaattaagccttttcctttagtctcctcttcccggtggttggtaaaaagaggtgaattgacagcctatgttgaagacactgtgcttttctcaagaaggacatccaaacagcaagtctacttctttctctttaacgatgtgctcattatcaccaagaagaagagtgaagaaagttacaacgtcaatgattattccttaagagatcagctattggtggaatcttgtgacaatgaagagcttaattcttctccagggaagaacagctccacaatgctctattcaagacagagctctgccagtcacctctttactctgacagtccttagtaaccacgcgaatgagaaagtggagatgctactaggagctgagacgcagagcgagcgagcccgctggataactgccctgggacacagcagcgggaagccgcctgcagaccgaacctcactgacccaggtggaaatcgttaggtcatttactgctaagcagccagatgaactctccctgcaggtggctgacgtcgtcctcatctatcaacgtgtcagcgatggctggtatgagggggaacgactacgagatggagaaagaggctggtttcctatggaatgtgccaaggagataacatgtcaagctacaattgataagaatgtggagagaatgggacgcttgctaggactggagaccaacgtgtagtctctcagatggtcttttgttactgcaagatttgcacgacacttaccgggctggttggttctgggctagttttattgttaattttgtcacagcctatttaattaaaagaacgaaaacacttgcctttaagcttgccaggttgttctgctctctcatgagaagagcttggatacagtgagtttgcacagctcagtttttacctaaccacacacttgcagacctcctgaggtacacagaatagctgagcagttcacttcagggatcaggtcatctctgctcctcctagtttcaccatgttctggcaataaaaaacacatattatatcctggttttctctatccttgcattactaaggtgactgtctctctttatacatccttgtatggttctcccagtattagcaagattgtatatctgtaaagaatgtccagttttgtaaatatttccctgcctttttttttctttttttacatctgattttaatgcttcgttaacttcaaaaggaactggtagagttcagaaggtgagctgttgtttttctaaacctcttcccaggaaggggacattgacacttgaatttttgtcacctttttcctcattagaaggaaagtagaaagccttactttaggatttttaaaaaaaaatccatctcaccccatattgttcttaaataagtatagactaattaacctaagctacctttaacaacgtagaatttagatgggttcatatatgtgagaaaaacctgaatataggacaggggtcctacttttttccccacctctgtcgcccaggctagagtatagtggtgtgatcttggcccactgcaacctctgcttcctaggttcaagtgattctcctgcctcagcctcccaagtagctgggattgtaagagtatgccaccacgcccagctactttttgtatttttagtagagacagggtttcatcatgttggccaggatggtctcttaactcctgccctcaagtgatccaccagagaggagatcctcggcctccccaagtgctgggattataggcatgagccaccgtgcccagcctactttctaattaattaaaaaaaaaaaaaaaaaaaaaaaaaaa

SEQ ID NO: 187462 - protein, 277 aa, Artificial Sequence
  derived and/or modified sequence
MWPLALVIASLTLALSGGVSQESSKVLNTNGTSGFLPGGYTCFPHSQPWQAALLVQGRLLCGGVLVHPKWVLTAAHCLKEGLKVYLGKHALGRVEAGEQVREVVHSIPHPEYRRSPTHLNHDHDIMLLELQSPVQLTGYIQTLPLSHNNRLTPGTTCRVSGWGTTTSPQVNYPKTLQCANIQLRSDEECRQVYPGKITDNMLCAGTKEGGKDSCEGDSGGPLVCNRTLYGIVSWGDFPCGQPDRPGVYTRVSRYVLWIRETIRKYETQQQKWLKGPQ

SEQ ID NO: 187463 - protein, 125 aa, Artificial Sequence
  derived and/or modified sequence
MWPLALVIASLTLALSGVNYPKTLQCANIQLRSDEECRQVYPGKITDNMLCAGTKEGGKDSCEGDSGGPLVCNRTLYGIVSWGDFPCGQPDRPGVYTRVSRYVLWIRETIRKYETQQQKWLKGPQ

SEQ ID NO: 187464 - protein, 93 aa, Artificial Sequence
  derived and/or modified sequence
MWPLALVIASLTLALSGGEDFKEPSQGPRDVMAASRPEAFPKGLTLEPRPEKGGICGCLAPGTILGLKVGWLFSSGDTPWIHARATPECHTLG

SEQ ID NO: 187465 - DNA, 834 bp, Artificial Sequence
  derived and/or modified sequence
atgtggcccctggcactagtgatcgcaagcctgactctcgctctaagtggcggggtgtcacaagagtcctcgaaggttctcaacacgaatggcaccagcggattccttcccggcggctatacctgtttcccacatagccagccttggcaagcagccctcctggtacaggggcgattactctgcggtggcgtgcttgtgcaccccaaatgggtacttacagctgcccactgcttgaaggagggccttaaagtttatttgggtaaacatgctctgggaagagtcgaggccggggaacaggttcgcgaggtagtgcacagtatcccccatcctgagtatagacggtccccgacacacttaaatcatgatcacgatataatgctgctcgaactacagtctcctgttcagctcacggggtacatacagactctgccgctctcccataataacagattgaccccaggaacgacatgcagggtttcagggtggggcacgactacatccccacaggtgaattatcccaaaacattacagtgcgccaacattcagcttcgaagcgacgaagagtgtagacaagtgtatccaggcaagattaccgataacatgctgtgcgctgggactaaagagggtggcaaggactcatgtgagggggactccggggggccactcgtatgtaatcggaccttgtacgggattgtgtcttggggtgattttccctgtggccagcccgatcgcccaggtgtttacactcgtgtaagtagatacgtgctttggatccgtgagactatccgaaaatacgagacacaacaacagaaatggctgaagggacctcagtag

SEQ ID NO: 187466 - DNA, 378 bp, Artificial Sequence
  derived and/or modified sequence
atgtggcccttagctctagtcatcgcctctttaacattagccctgtctggagtcaattacccgaaaacgctccagtgtgccaacatccagttgagaagtgacgaagaatgccgacaggtgtacccaggaaaaatcacagacaacatgctttgcgctggcactaaggagggcggcaaggacagctgtgagggagactctgggggcccattggtgtgcaatagaacattgtacggaatcgtctcctggggcgactttccatgcgggcagcctgatagacccggggtctacactcgggttagccgctatgtactttggatccgggaaaccattaggaagtacgagacacaacagcagaagtggttgaaaggacctcagtag

SEQ ID NO: 187467 - DNA, 282 bp, Artificial Sequence
  derived and/or modified sequence
atgtggcccctggccctggtcattgcaagcttgactctcgccctgtccggtggtgaagatttcaaggaaccatcccaaggtcctagggacgtgatggcggcatctcggcctgaggctttcccaaagggcctgacactagagccacgcccagaaaaagggggtatctgcggatgcctcgcacctgggaccatcctcggcctgaaagtaggatggcttttttcatccggcgatacaccctggattcatgccagagccacccctgaatgccacactctgggctag

SEQ ID NO: 187468 - DNA, 834 bp, Artificial Sequence
  derived and/or modified sequence
atgtggcccctcgccctagtcattgcaagcctcaccttagcattgtctggcggggtatcccaggaaagctctaaggtgcttaatactaacggcacctcagggtttctgcctggagggtatacttgcttccctcactctcaaccctggcaagccgcccttctggtccagggacgtttactgtgcggtggcgtgcttgttcaccccaagtgggtgctcactgcagcccactgcttgaaagaagggctcaaagtatacctgggcaaacacgctcttggtagagtcgaggcgggagagcaagtgagagaggtagtgcatagcatccctcaccctgagtacaggcgatcacccacccatctgaatcacgaccacgacatcatgctgctggagctgcagagtccagtgcagttgactgggtatatccagaccctgccgctctctcacaacaatcgactaacaccaggcacaacctgccgcgtttcaggctggggcaccacgacatctccccaagtcaattacccaaaaaccctacagtgcgcaaatatccagctcagaagcgacgaggagtgtcggcaggtctatccgggcaagattacagacaacatgctgtgcgcaggaacaaaagaaggaggcaaggattcatgcgaaggtgatagtggcggtccactcgtatgcaatcgtacactatatggtattgtttcatggggcgactttccttgcggccagcccgatcgcccaggggtgtatactcgtgtgtcccgttacgttctctggatcagagagaccatcaggaagtacgaaacccagcagcagaaatggctcaagggaccgcaatag

SEQ ID NO: 187469 - DNA, 1258 bp, Artificial Sequence
  derived and/or modified sequence
tcaggccccgcccgccctgccctcccctcccgatcccggagccatgtggcccctggccctagtgatcgcctccctgaccttggccttgtcaggaggtgtctcccaggagtcttccaaggttctcaacaccaatgggaccagtgggtttctcccaggtggctacacctgcttcccccactctcagccctggcaggctgccctactagtgcaagggcggctactctgtgggggagtcctggtccaccccaaatgggtcctcactgccgcacactgtctaaaggaggggctcaaagtttacctaggcaagcacgccctagggcgtgtggaagctggtgagcaggtgagggaagttgtccactctatcccccaccctgaataccggagaagccccacccacctgaaccacgaccatgacatcatgcttctggagctgcagtccccggtccagctcacaggctacatccaaaccctgcccctttcccacaacaaccgcctaacccctggcaccacctgtcgggtgtctggctggggcaccaccaccagcccccaggtgaattaccccaaaactctacaatgtgccaacatccaacttcgctcagatgaggagtgtcgtcaagtctacccaggaaagatcactgacaacatgttgtgtgccggcacaaaagagggtggcaaagactcctgtgagggtgactctgggggccccctggtctgtaacagaacactgtatggcatcgtctcctggggagacttcccatgtgggcaacctgaccggcctggtgtctacacccgtgtctcaagatacgtcctgtggatccgtgaaacaatccgaaaatatgaaacccagcagcaaaaatggttgaagggcccacaataaaagttgagaaatgtaccggcttccatcctgtcaccatgacttcctcacatggtctgcttagcccttctctgctccttattcccagtgttccatttgaaccagtgatccatgtcctgaaaaatgctcaatctcagctaacattccatgtttcagaagcattcaggcactgccaggcttgcagtctcccagatgttgcatccctgaaacatctcaacaacctgaatgtcccaacccagacaatggcccaggtctctcaacttcatcagtgtggcttctatgagcccagatcaccacctgaacgttctgtctgtggcacattcttaaatatttccatcagcccatctcaacaatatatgtcctataaatggaccatccttgaca

SEQ ID NO: 187470 - DNA, 378 bp, Artificial Sequence
  derived and/or modified sequence
atgtggcccctggccctagtgatcgcctccctgaccttggccttgtcaggagtgaattaccccaaaactctacaatgtgccaacatccaacttcgctcagatgaggagtgtcgtcaagtctacccaggaaagatcactgacaacatgttgtgtgccggcacaaaagagggtggcaaagactcctgtgagggtgactctgggggccccctggtctgtaacagaacactgtatggcatcgtctcctggggagacttcccatgtgggcaacctgaccggcctggtgtctacacccgtgtctcaagatacgtcctgtggatccgtgaaacaatccgaaaatatgaaacccagcagcaaaaatggttgaagggcccacaataa

SEQ ID NO: 187471 - DNA, 1239 bp, Artificial Sequence
  derived and/or modified sequence
cagctcagagctcttcctgcttgtccctgggtgacctggtttcccggctgaggttggccctccgaccccagacccttcacctcccaaaataccctcgcagcagcccctcccgcgttcaaggcttcctgtcctctctggaaagctgaaagacatgggttcgcgtcctgacgctgccgctttgagccagtagcctagcagctgctttgtgcctaaattgttttcatctggaaaatgggcttaatctataagtgcttaccagagaaggtcactgtgaatattgaaacgaggtgtctcccaggagtcttccaaggttctcaacaccaatgggaccagtgggtttctcccaggtggctacacctgcttcccccactctcagccctggcaggctgccctactagtgcaagggcggctactctgtgggggagtcctggtccaccccaaatgggtcctcactgccgcacactgtctaaaggaggggctcaaagtttacctaggcaagcacgccctagggcgtgtggaagctggtgagcagtgaattaccccaaaactctacaatgtgccaacatccaacttcgctcagatgaggagtgtcgtcaagtctacccaggaaagatcactgacaacatgttgtgtgccggcacaaaagagggtggcaaagactcctgtgagggtgactctgggggccccctggtctgtaacagaacactgtatggcatcgtctcctggggagacttcccatgtgggcaacctgaccggcctggtgtctacacccgtgtctcaagatacgtcctgtggatccgtgaaacaatccgaaaatatgaaacccagcagcaaaaatggttgaagggcccacaataaaagttgagaaatgtaccggcttccatcctgtcaccatgacttcctcacatggtctgcttagcccttctctgctccttattcccagtgttccatttgaaccagtgatccatgtcctgaaaaatgctcaatctcagctaacattccatgtttcagaagcattcaggcactgccaggcttgcagtctcccagatgttgcatccctgaaacatctcaacaacctgaatgtcccaacccagacaatggcccaggtctctcaacttcatcagtgtggcttctatgagcccagatcaccacctgaacgttctgtctgtggcacattcttaaatatttccatcagcccatctcaacaatatatgtcctataaatggaccatccttgaca

SEQ ID NO: 187472 - DNA, 1614 bp, Artificial Sequence
  derived and/or modified sequence
tcaggccccgcccgccctgccctcccctcccgatcccggagccatgtggcccctggccctagtgatcgcctccctgaccttggccttgtcaggaggtgaagacttcaaggagccaagccaggggcctagagatgtaatggcggcttcccgaccagaggccttcccaaagggcttgacccttgagccaagacctgaaaaaggagggatctgtgggtgcctggcacctggcaccatccttggcctgaaggtggggtggcttttctcctctggcgacactccctggattcatgcccgtgccactcctgagtgccacaccctaggctaggagacccacacgctacgccttgtggagtcctcaacaacctggcgaggtgtctcccaggagtcttccaaggttctcaacaccaatgggaccagtgggtttctcccaggtggctacacctgcttcccccactctcagccctggcaggctgccctactagtgcaagggcggctactctgtgggggagtcctggtccaccccaaatgggtcctcactgccgcacactgtctaaaggaggggctcaaagtttacctaggcaagcacgccctagggcgtgtggaagctggtgagcaggtgagggaagttgtccactctatcccccaccctgaataccggagaagccccacccacctgaaccacgaccatgacatcatgcttctggagctgcagtccccggtccagctcacaggctacatccaaaccctgcccctttcccacaacaaccgcctaacccctggcaccacctgtcgggtgtctggctggggcaccaccaccagcccccagggtatgcacccacacaggtggcctgaggccccataggagtggctggggaaacaggggcagagatgggagggaaggtctgagtgaattaccccaaaactctacaatgtgccaacatccaacttcgctcagatgaggagtgtcgtcaagtctacccaggaaagatcactgacaacatgttgtgtgccggcacaaaagagggtggcaaagactcctgtgagggtgactctgggggccccctggtctgtaacagaacactgtatggcatcgtctcctggggagacttcccatgtgggcaacctgaccggcctggtgtctacacccgtgtctcaagatacgtcctgtggatccgtgaaacaatccgaaaatatgaaacccagcagcaaaaatggttgaagggcccacaataaaagttgagaaatgtaccggcttccatcctgtcaccatgacttcctcacatggtctgcttagcccttctctgctccttattcccagtgttccatttgaaccagtgatccatgtcctgaaaaatgctcaatctcagctaacattccatgtttcagaagcattcaggcactgccaggcttgcagtctcccagatgttgcatccctgaaacatctcaacaacctgaatgtcccaacccagacaatggcccaggtctctcaacttcatcagtgtggcttctatgagcccagatcaccacctgaacgttctgtctgtggcacattcttaaatatttccatcagcccatctcaacaatatatgtcctataaatggaccatccttgaca

SEQ ID NO: 187473 - DNA, 927 bp, Artificial Sequence
  derived and/or modified sequence
tcaggccccgcccgccctgccctcccctcccgatcccggagccatgtggcccctggccctagtgatcgcctccctgaccttggccttgtcaggaggtgtctcccaggagtcttccaaggttctcaacaccaatgggaccagtgggtttctcccaggtggctacacctgcttcccccactctcagccctggcaggctgccctactagtgcaagggcggctactctgtgggggagtcctggtccaccccaaatgggtcctcactgccgcacactgtctaaaggaggggctcaaagtttacctaggcaagcacgccctagggcgtgtggaagctggtgagcaggtgagggaagttgtccactctatcccccaccctgaataccggagaagccccacccacctgaaccacgaccatgacatcatgcttctggagctgcagtccccggtccagctcacaggctacatccaaaccctgcccctttcccacaacaaccgcctaacccctggcaccacctgtcgggtgtctggctggggcaccaccaccagcccccaggtgaattaccccaaaactctacaatgtgccaacatccaacttcgctcagatgaggagtgtcgtcaagtctacccaggaaagatcactgacaacatgttgtgtgccggcacaaaagagggtggcaaagactcctgtgagggtgactctgggggccccctggtctgtaacagaacactgtatggcatcgtctcctggggagacttcccatgtgggcaacctgaccggcctggtgtctacacccgtgtctcaagatacgtcctgtggatccgtgaaacaatccgaaaatatgaaacccagcagcaaaaatggttgaagggcccacaataaaagttgagaaatgtaccggcttccatcctgtcaccatgacttcctcacat

SEQ ID NO: 187474 - DNA, 834 bp, Artificial Sequence
  derived and/or modified sequence
atgtggcccctggccctggtgattgccagcctgaccctggccctgagcggcggcgtgtcccaggagagcagcaaggtgctgaacaccaacggcaccagcggcttcctgcccggcggctacacctgcttcccccacagccagccctggcaggccgccctgctggtgcagggccgcctgctgtgtggcggcgtgctggtgcaccccaagtgggtgctgacagctgcccactgcctgaaggagggcctgaaggtgtacctgggcaagcacgccctgggccgggtggaggccggggagcaggtgcgggaggtggtgcacagcatcccccaccctgagtacagaagaagccccacccacctgaaccacgaccatgacatcatgctgctggagctgcagagccctgtgcagctgaccggctacatccagaccctgcccctgagccacaacaaccggctgaccccaggcaccacctgccgggtgtctggctggggcaccaccaccagcccccaggtgaactaccccaagaccctgcagtgtgccaacatccagctgcggagtgatgaggagtgccggcaggtgtacccaggcaagatcacagacaacatgctgtgtgccggcaccaaggagggcggcaaggacagctgtgagggggacagcggcggccccctggtgtgcaacagaaccctgtatggaattgtgtcctggggagacttcccctgtggccagcctgacaggcctggggtgtacaccagggtgagccgctacgtgctgtggatccgggagaccatcagaaaatatgagacccagcagcagaagtggctgaagggcccccagtag

SEQ ID NO: 187475 - DNA, 378 bp, Artificial Sequence
  derived and/or modified sequence
atgtggcccctggccctggtgattgccagcctgaccctggccctgagcggcgtgaactaccccaagaccctgcagtgtgccaacatccagctgcggagtgatgaggagtgccggcaggtgtacccaggcaagatcacagacaacatgctgtgtgccggcaccaaggagggcggcaaggacagctgtgagggggacagcggcggccccctggtgtgcaacagaaccctgtatggaattgtgtcctggggagacttcccctgtggccagcctgacaggcctggggtgtacaccagggtgagccgctacgtgctgtggatccgggagaccatcagaaaatatgagacccagcagcagaagtggctgaagggcccccagtag

SEQ ID NO: 187476 - DNA, 282 bp, Artificial Sequence
  derived and/or modified sequence
atgtggcccctggccctggtgattgccagcctgaccctggccctgtctggaggagaggacttcaaggagcccagccagggccccagagatgtgatggccgccagcaggcctgaggccttccccaagggcctgaccctggagcccaggcctgagaagggcggcatctgtggctgcctggcccctggcaccatcctgggcctgaaggtgggctggctgttcagcagcggggacaccccctggatccacgcccgggccaccccagagtgccacaccctgggctag

SEQ ID NO: 187477 - DNA, 834 bp, Artificial Sequence
  derived and/or modified sequence
atgtggcccctggccctggtgatcgccagcctgaccctggccctgtccggaggtgtgtctcaagagtccagcaaggtcctcaacaccaacggtaccagcggatttctgccaggcggctacacttgtttccctcattcacaaccatggcaggccgcccttctcgttcagggcagactgctctgtgggggagttctggtacacccaaaatgggtcctgaccgccgcacactgcctgaaggaggggctcaaggtataccttggtaaacacgcgctcggacgggtggaagcaggggaacaagttagggaggtggtgcattctatcccccatccagagtacagacggtctccaacgcatctcaatcatgaccacgatattatgctactcgagctgcaatctcccgtgcagctgacgggctacatacagacactgccactgtcacacaacaacaggctaacacctgggacaacatgcagggtatctgggtggggcaccacaacctcaccgcaggtaaattatcccaagacgcttcagtgcgccaacattcaactgcgaagcgacgaggaatgtcgacaggtttaccccgggaagattaccgacaatatgctctgtgccgggacgaaggagggcggcaaggatagttgtgaaggcgactccggcgggccgctggtttgcaatcgcaccctgtatggcatcgtctcttggggcgattttccctgcggtcaacctgaccggcccggggtttacactcgggtatctcgttacgttctttggattagagagaccatccgcaaatatgagactcagcagcaaaaatggctgaagggtcctcagtag

SEQ ID NO: 187478 - DNA, 378 bp, Artificial Sequence
  derived and/or modified sequence
atgtggcccctggccctggtgatcgccagcctgaccctggccctgtcgggcgtgaattatcccaaaacactgcaatgcgcgaatatccagctccgaagcgatgaggagtgccgacaggtgtatcctggcaagatcaccgacaatatgctgtgcgccgggaccaaggaggggggcaaggacagctgtgaaggggactccggtggacccctcgtctgcaaccgcacattgtacggaatagtatcctggggagacttcccttgcggacagccagaccgaccaggcgtttatacaagagtgagtcggtacgtgctttggatcagagaaacaatacgaaaatatgaaacgcaacagcagaaatggctcaaggggcctcagtag

SEQ ID NO: 187479 - DNA, 282 bp, Artificial Sequence
  derived and/or modified sequence
atgtggcccctggccctggtgatcgccagcctgaccctggccctgtcggggggggaggacttcaaagaaccttcacaaggccccagagacgtcatggctgcttcacggcctgaagcttttccgaaaggcctgaccctggagccaaggcccgagaagggaggcatttgtggatgccttgctcctggcacgatccttggcctgaaggtaggatggttgttctcttctggcgacaccccctggattcatgcgcgtgccacacccgagtgccataccctgggctag

SEQ ID NO: 187480 - DNA, 834 bp, Artificial Sequence
  derived and/or modified sequence
atgtggcccctggccctggtgatcgccagcctgaccctggccctgagtggaggcgtaagtcaggagagctccaaagtgttgaacactaacggcacatctgggtttctgcccggcgggtacacttgtttcccccactcccaaccatggcaggccgccctgctggtgcaggggcgtctactgtgtgggggagtcttagttcacccaaagtgggtgttgacagccgcccattgtttgaaagaaggattgaaggtttacctgggcaagcatgctctcgggcgcgttgaggccggcgaacaggtgagggaggtcgttcatagcatccctcacccggagtatcggcgtagccctacacatctgaaccacgatcatgacattatgctgctggaactccagagccccgtgcagcttacgggctatatacagaccctcccattatctcacaacaatcggctcactccaggcaccacttgtagggtgagcggatggggtacaaccacaagcccacaagtcaactacccaaagacgctccagtgcgcaaatatccagttaagatccgacgaggagtgcagacaggtatatcctggtaagatcaccgacaacatgctttgtgcgggtaccaaggaaggcggaaaagactcatgcgagggggactccggtggacctctggtatgtaaccgaaccctatatggcatagtgtcatggggcgacttcccttgcggccagccagatcgacccggcgtgtacacaagggtgagcagatatgtactgtggattcgcgagacgatccgtaagtatgagacccagcaacaaaaatggttaaaggggcctcagtag

SEQ ID NO: 187481 - DNA, 834 bp, Artificial Sequence
  derived and/or modified sequence
atgtggccattggccctggtgatcgcaagcctgaccctggcattgagcggtggcgtgagtcaggagtcgtccaaagtcctcaatacgaacggtacaagtgggtttctccccggaggctatacgtgcttcccacacagccagccctggcaagctgccctgcttgtgcagggccgactgctatgcgggggagtcctcgtgcaccctaagtgggtgctgacggcagcacattgcctgaaggaggggcttaaggtctacctcggaaaacatgcactgggcagagtagaagcaggcgaacaggtcagagaggttgtccacagcataccacatccagaatataggcggtcacccacacacctgaaccatgatcatgatatcatgctgctcgagttacagtcacctgttcaattgactggatatatccagacactgcccctcagtcacaacaatcgcctgaccccaggtacaacgtgcagagtatccggatggggaaccacgacttccccccaggtcaactatccgaaaacgctccagtgcgcaaatatccagttacgctctgatgaagagtgtcggcaggtatatcccggtaaaataacagacaacatgttgtgtgcaggaacgaaagagggcggaaaagacagctgcgagggagattcgggtggcccactggtttgcaacaggacactctacggcatcgtgtcttggggtgattttccctgcggtcagcctgaccgcccaggggtttatacaagggtgtctcggtatgtattatggatccgagagactatcagaaaatatgagacccaacaacagaagtggttgaagggcccacaatag

SEQ ID NO: 187482 - DNA, 378 bp, Artificial Sequence
  derived and/or modified sequence
atgtggccccttgcattggtcattgctagtctcacgctcgcgctgtctggcgttaactatccaaaaacgctgcagtgcgccaacatacagcttagatcagatgaggaatgccgtcaggtctacccaggaaaaattacagataacatgctctgcgccggaaccaaagaaggcggaaaggattcttgcgaaggcgattcagggggaccattagtgtgcaaccgcacattatacgggattgtcagctggggagacttcccttgcggacaacctgaccgaccaggggtgtatacccgagtgagtcggtatgtgctgtggatccgcgaaactatccgcaagtacgagacccagcaacagaagtggctaaagggccctcaatag

SEQ ID NO: 187483 - DNA, 297 bp, Artificial Sequence
  derived and/or modified sequence
atgggtttgatttacaagtgcctgcccgagaaggtcaccgttaacattgaaactaggtgcctgcccggtgtattccagggctcacagcaccagtgggaccaatgggttagtccaaggtggctacaccttcttccacctctgtctgcactggcaggctgccctacttccgcccgagcggcaacactttggggctcacctggtccaccccagatgggccctcattgccgcaccctaagcaaggggggagcccagtccctccctcggcaggcccgacctcgcgcttgtggttcttggtag

SEQ ID NO: 187484 - DNA, 282 bp, Artificial Sequence
  derived and/or modified sequence
atgtggcccctggcgctcgtaattgcctccttgaccctcgcattatccggcggtgaggactttaaggaaccatctcaaggccctcgggacgtgatggccgcttctcgaccagaggcgtttcctaagggtctaacactagagcctcggcctgaaaaagggggaatatgcggttgcctggccccaggtacaattctcggactgaaggttgggtggctgttttcctcaggtgatacaccatggatccacgccagagccacacccgagtgccacaccttaggctag

SEQ ID NO: 187485 - DNA, 834 bp, Artificial Sequence
  derived and/or modified sequence
atgtggcccctcgccctggttattgcctccctcaccctcgcattgtccggaggtgtgtcacaagaaagtagcaaagtattgaacactaatggaaccagtgggttcctcccaggtgggtacacgtgtttcccgcactctcagccttggcaggccgctctgctggtgcagggtcggctgctgtgtggtggtgtgctggtccaccctaagtgggtgctaaccgccgcacattgtctcaaggaaggacttaaggtgtacctgggcaagcacgctctggggcgagtcgaagcaggagagcaggtacgtgaggtggtccatagcatcccacaccccgaatacaggaggagccctacgcacctgaaccacgaccatgatatcatgctgctggagctgcagtcacctgtgcagcttacgggatatatacagacacttcccctgtctcacaataatcggttgactcctggcacaacttgtagggtatctggatggggcacaactacatcaccccaggtgaactaccctaagactttacaatgcgctaatatccaactccgatccgacgaggagtgtcgtcaggtgtaccctggcaaaatcacggacaacatgctttgcgccggaaccaaagaaggcggaaaagattcttgcgagggagactcaggcggacccttagtgtgtaaccggactttgtatgggattgttagttggggtgactttccctgtggtcagccagatcggcctggcgtgtatacaagagtctcaaggtacgtgttatggattagggaaaccatcagaaagtatgagacccagcagcaaaagtggctgaagggcccacagtag

SEQ ID NO: 187486 - DNA, 834 bp, Artificial Sequence
  derived and/or modified sequence
atgtggcctttggcattggtgatagctagccttaccttggccctgtccggcggcgtgtcacaggaatcttccaaagtactcaacaccaacggcacgtctgggtttctgcccggtggttatacctgctttccccattcccagccatggcaggccgccctactagtgcaaggccgccttctatgtgggggtgttctggtgcaccctaagtgggtgttgacagccgcacattgtttaaaggagggcctcaaagtttatctgggtaagcacgccttaggaagagtagaggccggcgaacaggttcgagaagtagtccacagtataccccaccccgagtatcgcagatctccgacccacctaaatcacgaccacgatataatgctcctggagcttcagtctccagtacagctcacaggctatattcagactctccctctgtctcataacaaccgcctgacacccggaacaacgtgtagggtcagcggctggggcaccacgactagtccacaggtaaactacccaaagacactgcaatgcgcaaacatccagctcaggtctgacgaagagtgtagacaggtttacccggggaaaatcaccgataacatgctctgtgctggcacgaaggagggcggaaaggacagttgcgaaggtgactccgggggccctttggtatgtaatcgcaccctctatggcatagtttcttggggtgactttccttgtggacagccggatcgtcctggagtctatactagagtttcccgctatgtgttgtggatacgcgagacaatccgaaagtatgaaacccagcaacaaaaatggcttaaaggtccccaatag

SEQ ID NO: 187487 - DNA, 834 bp, Artificial Sequence
  derived and/or modified sequence
atgtggcccttggcactggttattgcttcactgacgctggccctcagtggaggcgtgtcccaggaatcaagcaaagtcctgaatactaatggcacgagtggctttcttccaggcggctatacgtgttttccccattcccagccttggcaagccgccctgttggttcaaggccggctgctgtgcggtggcgttctggttcatcctaagtgggttttgactgctgcccattgtcttaaagagggattaaaggtatacttgggaaaacatgctttgggcagagttgaggctggcgagcaggtcagagaagttgtgcactccatcccacaccccgaataccgtaggagtccaacgcacctgaatcatgatcatgatatcatgctgctcgagcttcaatcaccagtacagttgaccggctacattcagactctccccctctcccacaataaccgcctgactcccggaaccacttgccgggtttccggttggggtacgacaacatcgccacaggtcaattatccaaaaaccctgcagtgcgccaatattcagctccgttccgacgaagaatgcagacaggtctaccccggtaaaatcacggataacatgttatgcgctggaactaaggaggggggcaaggactcttgcgagggagactctgggggcccactggtgtgtaatcggactctttacggtattgtttcttggggcgatttcccttgtggccaacctgaccggccaggtgtctatacaagagtttcccgatatgtgctttggattagagagactatcagaaaatacgagactcagcagcagaaatggctgaagggcccacagtag

SEQ ID NO: 187488 - DNA, 834 bp, Artificial Sequence
  derived and/or modified sequence
atgtggcccctggccctggtgatcgccagcctgaccctggccctgagcggcggcgtgagccaggagagcagcaaggtgctgaacaccaacggcaccagcggcttcctgcccggcggctacacctgcttcccccacagccagccctggcaggccgccctgctggtgcagggcagactgctgtgcggcggcgtgctggtgcaccccaagtgggtgctgaccgccgcccactgcctgaaggagggcctgaaggtgtacctgggcaagcacgccctgggcagagtggaggccggcgagcaggtgagagaggtggtgcacagcatcccccaccccgagtacagaagaagccccacccacctgaaccacgaccacgacatcatgctgctggagctgcagagccccgtgcagctgaccggctacatccagaccctgcccctgagccacaacaacagactgacccccggcaccacctgcagagtgagcggctggggcaccaccaccagcccccaggtgaactaccccaagaccctgcagtgcgccaacatccagctgagaagcgacgaggagtgcagacaggtgtaccccggcaagatcaccgacaacatgctgtgcgccggcaccaaggagggcggcaaggacagctgcgagggcgacagcggcggccccctggtgtgcaacagaaccctgtacggcatcgtgagctggggcgacttcccctgcggccagcccgacagacccggcgtgtacaccagagtgagcagatacgtgctgtggatcagagagaccatcagaaagtacgagacccagcagcagaagtggctgaagggcccccagtag

SEQ ID NO: 187489 - DNA, 378 bp, Artificial Sequence
  derived and/or modified sequence
atgtggcccctggccctggtgatcgccagcctgaccctggccctgagcggcgtgaactaccccaagaccctgcagtgcgccaacatccagctgagaagcgacgaggagtgcagacaggtgtaccccggcaagatcaccgacaacatgctgtgcgccggcaccaaggagggcggcaaggacagctgcgagggcgacagcggcggccccctggtgtgcaacagaaccctgtacggcatcgtgagctggggcgacttcccctgcggccagcccgacagacccggcgtgtacaccagagtgagcagatacgtgctgtggatcagagagaccatcagaaagtacgagacccagcagcagaagtggctgaagggcccccagtag

SEQ ID NO: 187490 - DNA, 282 bp, Artificial Sequence
  derived and/or modified sequence
atgtggcccctggccctggtgatcgccagcctgaccctggccctgagcggcggcgaggacttcaaggagcccagccagggccccagagacgtgatggccgccagcagacccgaggccttccccaagggcctgaccctggagcccagacccgagaagggcggcatctgcggctgcctggcccccggcaccatcctgggcctgaaggtgggctggctgttcagcagcggcgacaccccctggatccacgccagagccacccccgagtgccacaccctgggctag

SEQ ID NO: 187491 - protein, 457 aa, Artificial Sequence
  derived and/or modified sequence
MAGPAPPVADELPGPAARRLYSRMEASCLELALEGERLCKAGDFKTGVAFFEAAVQVGTEDLKTLSAIYSQLGNAYFYLKEHGRALEYHKHDLLLARTIGDRMGEAKASGNLGNTLKVLGRFDEAAVCCQRHLSIAQEQGDKVGEARALYNIGNVYHAKGKQLSWNAANATQDPGHLPPDVRETLCKASEFYERNLSLVKELGDRAAQGRAYGNLGNTHYLLGNFTEATTFHKERLAIAKEFGDKAAERRAYSNLGNAHVFLGRFDVAAEYYKKTLQLSRQLRDQAVEAQACYSLGNTYTLLQDYERAAEYHLRHLLIAQELADRVGEGRACWSLGNAYVSMGRPAQALTFAKKHLQISQEIGDRHGELTARMNVAQLQLVLGRLTSPAASEKPDLAGYEAQGEFQGCGGVLLPTGTDRIRSCGGVGSRPGQHGGGGSRQKMAPTSQFFLASGTAQA

SEQ ID NO: 187492 - DNA, 1374 bp, Artificial Sequence
  derived and/or modified sequence
atggccggccccgccccccccgtggccgacgagctgcccggccccgccgccagaagactgtacagcagaatggaggccagctgcctggagctggccctggagggcgagagactgtgcaaggccggcgacttcaagaccggcgtggccttcttcgaggccgccgtgcaggtgggcaccgaggacctgaagaccctgagcgccatctacagccagctgggcaacgcctacttctacctgaaggagcacggcagagccctggagtaccacaagcacgacctgctgctggccagaaccatcggcgacagaatgggcgaggccaaggccagcggcaacctgggcaacaccctgaaggtgctgggcagattcgacgaggccgccgtgtgctgccagagacacctgagcatcgcccaggagcagggcgacaaggtgggcgaggccagagccctgtacaacatcggcaacgtgtaccacgccaagggcaagcagctgagctggaacgccgccaacgccacccaggaccccggccacctgccccccgacgtgagagagaccctgtgcaaggccagcgagttctacgagagaaacctgagcctggtgaaggagctgggcgacagagccgcccagggcagagcctacggcaacctgggcaacacccactacctgctgggcaacttcaccgaggccaccaccttccacaaggagagactggccatcgccaaggagttcggcgacaaggccgccgagagaagagcctacagcaacctgggcaacgcccacgtgttcctgggcagattcgacgtggccgccgagtactacaagaagaccctgcagctgagcagacagctgagagaccaggccgtggaggcccaggcctgctacagcctgggcaacacctacaccctgctgcaggactacgagagagccgccgagtaccacctgagacacctgctgatcgcccaggagctggccgacagagtgggcgagggcagagcctgctggagcctgggcaacgcctacgtgagcatgggcagacccgcccaggccctgaccttcgccaagaagcacctgcagatcagccaggagatcggcgacagacacggcgagctgaccgccagaatgaacgtggcccagctgcagctggtgctgggcagactgaccagccccgccgccagcgagaagcccgacctggccggctacgaggcccagggcgagttccagggctgcggcggcgtgctgctgcccaccggcaccgacagaatcagaagctgcggcggcgtgggcagcagacccggccagcacggcggcggcggcagcagacagaagatggcccccaccagccagttcttcctggccagcggcaccgcccaggcctag

SEQ ID NO: 187493 - DNA, 1374 bp, Artificial Sequence
  derived and/or modified sequence
atggccggcccggccccccctgtggccgatgagctgcctggccctgcagcccgccggttatattcaagaatggaagcaagctgtcttgagctggccttggaaggcgagagactgtgcaaagcaggcgactttaagactggagtggcattcttcgaagcggcagtgcaggtgggcaccgaagatctgaaaactctgagtgcaatttactcccagctcggcaatgcctacttttatttgaaggaacacggccgtgcattagagtatcataaacacgatctgttactggctaggacaattggagatcgaatgggagaggccaaggcttccggtaacctgggcaacaccttgaaagtgctcggccggttcgatgaagcagcggtgtgctgtcagagacacctgtcaatcgcacaggaacaaggagataaagtgggagaggctagggccctctataacattggtaatgtttatcacgctaagggcaagcagctctcttggaatgctgctaacgctacacaggaccctggacatctccctccagacgtgcgggagacactttgcaaggccagcgagttttacgagcgaaacctctctctcgtgaaggaattgggcgaccgggctgctcagggaagggcgtatggtaatcttggcaatacacattatttgctggggaacttcactgaagccacaaccttccacaaagagaggctggctatagccaaagagttcggtgacaaggcagcagaacgtagagcgtactcaaacctgggaaatgcgcacgtgtttttaggtaggttcgacgtcgccgctgagtactataaaaaaacgttgcagctgagcaggcagcttcgtgatcaggctgtggaagcccaagcctgttattccctggggaatacttacaccttgctccaggactacgagcgagccgccgagtatcacttgaggcacctactgattgcccaggagctggcagaccgtgtgggggagggtcgcgcatgctggtctttagggaacgcctatgtttccatgggacggccggcgcaagctcttacatttgccaaaaaacatctgcagattagccaggaaattggtgaccgccatggggagctgactgctcgcatgaacgtggcccagctccagctggtcctgggccggttaacaagtcccgcagcatctgagaagcctgatctggctggatacgaggcacagggagagttccaaggttgcggaggtgtgctgctgccaacgggaactgacagaatccggagctgcggcggcgtgggctcaaggcctggacaacacgggggcggcgggagcaggcagaaaatggctcctaccagtcagttcttccttgcttctggtaccgctcaggcttag

SEQ ID NO: 187494 - DNA, 2265 bp, Artificial Sequence
  derived and/or modified sequence
gcgcgggcggcggtgacatcacggccacggcggcgggaggggcggcggcgccccgcgcacatcacttcctcggcgcctccccgggggaggacgggcgaacgaggcgcggacggacaggcggacagcagggcggacagcagggaggacagcagggcgggcagggggcggacggccacggcgcggggggcgctcccggctcccgctcccgcgtccccgacccatggcgggcccggccccgcccgtggccgacgagctcccgggcccggccgccaggcgcctctactccaggatggaggcgtcctgcctagagctggcgctggagggcgagcgtctgtgcaaggcgggcgacttcaagacaggcgtggccttctttgaggctgctgtgcaggtgggcaccgaggacctgaagacactgagtgccatctacagccagctgggcaacgcctacttctacctgaaggagcacggccgggcgctggaataccacaagcatgacctcctgctggcgcggaccatcggtgaccgcatgggggaggccaaggccagtggaaacctgggaaacacactcaaggtcctggggcgcttcgacgaggctgccgtctgctgccagcggcatctgagcatcgcccaagagcagggagacaaggttggggaggcgagggccctctacaacatcgggaacgtgtaccacgccaaaggcaagcaactgtcctggaacgccgcaaacgccacgcaggaccccgggcacctgccgcccgatgtccgagagaccctgtgcaaggcctccgagttctacgagaggaacctgtccctggtgaaggagctgggcgaccgtgcggcgcagggcagggcctacggcaacctgggcaacacccactatttgttggggaacttcacagaggccacgaccttccacaaggagcgcctggccattgctaaggagtttggagacaaggcagccgagaggagggcctacagcaacctggggaacgcccacgtcttcctggggcgctttgacgtggccgccgagtactacaagaagacgctgcaactgtctcggcagctcagggaccaggcagtggaggcgcaggcctgctacagtctgggcaacacctacacgctgctgcaggactacgagcgcgcggccgagtaccacctgcggcacctgctcattgcccaggagctggccgacagagtgggcgagggccgggcgtgctggagcctgggaaatgcctacgtgtccatggggcgcccagcgcaggccctgaccttcgccaagaagcacctgcagatctcccaggagatcggggaccgccatggggagctcacggcccgcatgaacgtggcgcagctgcagctggtgctcggccgcctgaccagcccggcagcctcagagaagcctgacctggccggctatgaggcccagggtgagttccagggttgtgggggggtcttgctccccacaggcacggaccgcatcaggagctgcggaggggtgggatcgaggccaggccagcatggcggaggtggcagccgccagaaaatggcgcctacaagccagttcttcttggcctcagggacagcacaggcctgaggttcaccctgagcccttcccacccgcatcctgagtggcgctgcagggctgctggatgaaggacaggaggtggtcgcctgttgccccactggctgctccagggcctccacccccacctccccctggagccctcggtgcagggagggcttctgtcctcagacccaagtaggagagggctgctgggaggcgagagggcatcagccagagggctgggctgggctgggctgggctgtgggagccctatgtgcctggggcagtaatcaggcaaggcccaaggccatgcgaggccaccgtggtgacctcattcatggaccgctggtcgtcccatgccggtcagcagtgctgcagacacaggacagaacgtcccctgcaaagcgaaaagactaataggtgccaggggggtggtgccaggttgggccgacttcctgaggtggctggcaggtgggtgaggggcaggcttggggggagcagctgccccacccatgtgtcccccactcccaaaggtcttgagtttgccagcccccgagaagggatgcctgcctcccagaacgtacctggtgccccccaggcctgctaaggaccaggctgggaacaccaggcttggatgtggtgctgggctgccggagtttctttttcttatcttatttttaataattaaatgtttttataga

SEQ ID NO: 187495 - DNA, 1374 bp, Artificial Sequence
  derived and/or modified sequence
atggccggccctgcccctcctgtggctgatgagctgcccggccctgctgcccggcggctgtacagcaggatggaggccagctgcctggagctggccctggagggggagcggctgtgcaaggccggggacttcaagacaggagtggccttctttgaagctgctgtgcaggtgggcacagaggacctgaagaccctgagcgccatctacagccagctgggcaatgcctacttctacctgaaggagcacggccgggccctggagtaccacaagcatgacctgctgctggcccggaccatcggggacaggatgggagaggccaaggccagcggcaacctgggcaacaccctgaaggtgctgggccgctttgatgaagctgctgtgtgctgccagaggcacctgagcatcgcccaggagcagggcgacaaggtgggggaggcccgggccctgtacaacattggaaatgtgtaccacgccaagggcaagcagctgtcctggaatgctgccaatgccacccaggaccccggccacctgcccccagatgtgcgggagaccctgtgcaaggccagcgagttctatgaaagaaacctgagcctggtgaaggagctgggggaccgggccgcccagggccgggcctacggcaacctgggcaacacccactacctgctgggcaacttcacagaggccaccaccttccacaaggagcggctggccatcgccaaggagtttggagacaaggctgctgagcggcgggcctacagcaacctgggcaatgcccacgtgttcctgggccgctttgatgtggccgctgagtactacaagaagaccctgcagctgagccggcagctgcgggaccaggccgtggaggcccaggcctgctacagcctgggcaacacctacaccctgctgcaggactatgaaagagctgctgagtaccacctgcggcacctgctgattgcccaggagctggccgacagagtgggggagggccgggcctgctggagcctgggcaatgcctacgtgtccatgggccgcccagcccaggccctgacctttgccaagaagcacctgcagatcagccaggagatcggggacagacatggagagctgacagccaggatgaatgtggcccagctgcagctggtgctgggccgcctgaccagccctgctgccagcgagaagccagacctggccggctatgaggcccagggcgagttccagggctgcggcggcgtgctgctgcccactggaacagaccgcatccgcagctgtggcggcgtgggcagccggcccggccagcacggcggcggcggcagccggcagaagatggcccccaccagccagttcttcctggccagcggcacagcccaggcctag

SEQ ID NO: 187496 - DNA, 1374 bp, Artificial Sequence
  derived and/or modified sequence
atggccggccccgccccccccgtggccgacgagctgcccggccccgccgctcgaaggctatactcacgcatggaggcttcgtgtctcgagctggcccttgagggcgagcgtttatgcaaagccggcgactttaagactggagtcgccttcttcgaagctgcggtacaggtgggcaccgaggatctcaaaaccctatccgctatttattcccagctggggaacgcatatttctatctgaaggagcatggccgggcccttgagtatcacaaacacgacctgctgctggcccgaacaatcggggatcggatgggagaggctaaagcatccggcaacctgggaaacaccttgaaagttctcggccggttcgacgaggcggcagtgtgttgccagcgccatcttagcatcgcccaggaacaaggtgacaaagtaggagaggcgcgggccttatataacatcggcaatgtgtatcatgccaagggtaaacagctttcttggaacgcagcaaatgcaacacaggaccctggacatctgccacctgacgtcagggaaaccctgtgcaaggcttccgaattttacgaaagaaatctgagcctggttaaagagctgggagatagggctgctcagggccgcgcgtatgggaatttgggcaatactcattatctgctcggaaactttaccgaagcaactacctttcacaaggagcgcctggcgattgctaaggaatttggagataaggccgctgagcgtcgagcctatagcaatctcggcaacgcacacgtctttttagggcgattcgacgtggcggcagagtactacaagaaaacactacagctgtccaggcaacttcgcgatcaagccgtcgaggcacaggcatgctattctctgggtaacacgtatactttgctgcaagactacgagagggcagctgaataccatttaagacacctgctgattgcccaggaactggccgacagggtgggggagggtcgggcgtgttggtccctggggaatgcctatgtctcaatgggccggccggctcaggctctgaccttcgctaagaaacacctccagatcagccaggagattggtgatagacatggggaacttactgctcgaatgaacgtggcacagcttcagcttgtgctaggccgcctgacctctcccgccgcctctgagaagcctgatctagcaggctacgaagcgcaaggagagttccaaggctgcggcggtgtgctcctaccaaccggaacagataggatccgctcctgcggaggtgtgggctcgcgacctggccagcatgggggtggggggtcacgtcagaagatggcacctacctcacaattctttctggcctcaggaacagcacaggcttag

SEQ ID NO: 187497 - DNA, 1374 bp, Artificial Sequence
  derived and/or modified sequence
atggctggtcccgctccacccgtggctgatgaactcccgggaccagctgcacggcgtctgtactcacgaatggaagcttcatgcctggaacttgctctagaaggcgaaagactatgtaaggcaggagatttcaagaccggggttgccttttttgaagccgctgtccaagtcggcactgaagatcttaagaccttaagcgctatatattcccagctcggaaatgcttacttttacctgaaggagcacggacgcgctttagaatatcacaagcatgaccttttgctcgctagaacaattggggatcgaatgggagaggcgaaagcctccgggaacctggggaacactctgaaagtcctcggtagattcgacgaggcggcagtgtgctgtcaacggcatctctcaatcgcacaggagcagggtgataaagtgggggaggcacgtgccctgtacaatatagggaacgtgtaccacgcaaagggaaaacagttgagctggaatgccgcaaatgccacacaggatcctggacaccttcctcccgacgtccgggagacgctctgcaaggcttcagagttctatgagcgcaatctgtcactggttaaggaactcggagacagagcagcacaaggcagggcgtacgggaatttgggaaacacacactatctgctaggtaactttacggaagccactacattccataaagaacgcctagccatcgctaaggagtttggagacaaggcggcagaacgcagagcctactccaacctgggcaacgcacacgtgtttctggggcgatttgatgtcgccgctgaatattacaagaagacactacagctctccagacagctgagagaccaggccgttgaagctcaggcttgttatagcctagggaatacttatacactcctccaagactacgaacgagcagctgagtatcacttgcggcacttattaattgctcaggaattagccgacagggtcggcgaggggcgagcatgctggtccctgggaaatgcgtacgtgtctatgggcaggcccgctcaagcgttaacattcgctaaaaagcatctccagatttctcaagaaattggggacaggcatggagaactaactgctcggatgaacgttgctcagctgcagctcgtgctgggtcgattgacaagtccagccgcttctgagaagccagacctggctggctacgaggcccagggggaattccagggctgcggaggcgtcctccttcctaccggcaccgacagaatccggtcgtgcgggggagtggggtccagacctggacagcacggtggtgggggaagcaggcagaagatggcccctacaagccagttcttcctggccagcgggaccgcacaggcctag

SEQ ID NO: 187498 - protein, 542 aa, Artificial Sequence
  derived and/or modified sequence
MDLGAITKYSALHAKPNGLILQYGTAGFRTKAEHLDHVMFRMGLLAVLRSKQTKSTIGVMVTASHNPEEDNGVKLVDPLGEMLAPSWEEHATCLANAEEQDMQRVLIDISEKEAVNLQQDAFVVIGRDTRPSSEKLSQSVIDGVTVLGGQFHDYGLLTTPQLHYMVYCRNTGGRYGKATIEGYYQKLSKAFVELTKQASCSGDEYRSLKVDCANGIGALKLREMEHYFSQGLSVQLFNDGSKGKLNHLCGADFVKSHQKPPQGMEIKSNERCCSFDGDADRIVYYYHDADGHFHLIDGDKIATLISSFLKELLVEIGESLNIGVVQTAYANGSSTRYLEEVMKVPVYCTKTGVKHLHHKAQEFDIGVYFEANGHGTALFSTAVEMKIKQSAEQLEDKKRKAAKMLENIIDLFNQAAGDAISDMLVIEAILALKGLTVQQWDALYTDLPNRQLKVQVADRRVISTTDAERQAVTPPGLQEAINDLVKKYKLSRAFVRPSGTEDVVRVYAEADSQESADHLAHEVSLAVFQLAGGIGERPQPGF

SEQ ID NO: 187499 - DNA, 444 bp, Artificial Sequence
  derived and/or modified sequence
atggatctgggcgccatcaccaagtactcagcactccacgcaaagcctaatggcctcattctccaatatggcaccgcgggctttcggacaaaggccgaacatctcgaccacgtgatgtttaggatggggttgcttgccgtgcttcggagtaaacagacaaagagtaccatcggcgtcatggtcactgcatcgcataaccctgaggaggataatggagtaaagctggtggatcctctaggggaaatgctggctccctcttgggaggaacacgccacatgtttagccaacgctgaggagcaggatatgcaacgggtcctgatagatatctcagaaaaagaggctgtcaacctgcagcaggacgcttttgtggtcatcggacgggacacccggccctcatccgagaaattaagtcagtctgtcatcgacggtgtgaccgtgctgtag

SEQ ID NO: 187500 - DNA, 444 bp, Artificial Sequence
  derived and/or modified sequence
atggacctgggcgccatcaccaagtacagcgccctgcacgccaagcccaacggcctcatcctgcagtatggaacagctggcttccgcaccaaggccgagcacctggaccacgtgatgttcaggatgggcctgctggccgtgctgcggagcaagcagaccaagagcaccatcggcgtgatggtgacagccagccacaacccagaagaagataatggagtgaagctggtggaccccctgggggagatgctggcccccagctgggaggagcacgccacctgcctggccaatgctgaggagcaggacatgcagagggtgctgattgacatcagcgagaaggaggccgtgaacctgcagcaggatgcctttgtggtgattggccgggacacccggcccagcagcgagaagctgagccagagcgtgattgatggagtgacagtgctgtag

SEQ ID NO: 187501 - DNA, 444 bp, Artificial Sequence
  derived and/or modified sequence
atggacctgggcgccatcaccaagtacagcgccctgcacgccaagcccaacggtctgattttgcagtacggcaccgctggatttcgaactaaagcagagcacctggatcatgtgatgtttagaatgggcctattggccgttttgcgctccaagcagaccaaatctaccattggcgtaatggttactgctagtcataatccagaagaggacaacggcgtgaaacttgtcgatcccctaggcgaaatgttggctcctagctgggaagagcacgctacctgtctggctaatgcagaggagcaggacatgcagagggtattgatcgatatcagcgaaaaggaagccgtgaatctccagcaagacgcattcgtggtaatcggtcgcgatacacgtccaagctcagaaaagttgtcacagtcagtcattgacggagtcacagtactgtag

SEQ ID NO: 187502 - DNA, 444 bp, Artificial Sequence
  derived and/or modified sequence
atggacctgggcgctataactaagtacagcgccctgcacgccaaacctaatggcttaatcctgcagtacggaaccgctggatttcgcaccaaagccgagcatcttgaccacgtaatgtttaggatgggccttttggccgtgttgagaagtaaacagacgaagtcaaccatcggggtcatggtcaccgctagccataatccagaggaagataatggtgtcaagctcgtggacccactaggagagatgctcgcaccttcctgggaggaacacgctacatgtttggccaatgcggaagagcaggacatgcagagggtgcttattgacatttctgagaaggaagctgtgaatttacagcaggatgcttttgtcgtgattgggagagatacaaggccaagttctgagaagttgtctcagtccgtcatcgacggtgtgaccgtgctgtag

SEQ ID NO: 187503 - DNA, 444 bp, Artificial Sequence
  derived and/or modified sequence
atggacctgggcgccatcaccaagtacagcgccctgcacgccaagcccaacggcctgatcctgcagtacggcaccgccggcttcagaaccaaggccgagcacctggaccacgtgatgttcagaatgggcctgctggccgtgctgagaagcaagcagaccaagagcaccatcggcgtgatggtgaccgccagccacaaccccgaggaggacaacggcgtgaagctggtggaccccctgggcgagatgctggcccccagctgggaggagcacgccacctgcctggccaacgccgaggagcaggacatgcagagagtgctgatcgacatcagcgagaaggaggccgtgaacctgcagcaggacgccttcgtggtgatcggcagagacaccagacccagcagcgagaagctgagccagagcgtgatcgacggcgtgaccgtgctgtag

SEQ ID NO: 187504 - protein, 404 aa, Artificial Sequence
  derived and/or modified sequence
MRKRTEPVALEHERCAAAGSSSSGSAAAALDADCRLKQNLRLTGPAAAEPRCAADAGMKRALGRRKGVWLRLRKILFCVLGLYIAIPFLIKLCPGIQAKLIFLNFVRVPYFIDLKKPQDQGLNHTCNYYLQPEEDVTIGVWHTVPAVWWKNAQGKDQMWYEDALASSHPIILYLHGNAGTRGGDHRVELYKVLSSLGYHVVTFDYRGWGDSVGTPSERGMTYDALHVFDWIKARSGDNPVYIWGHSLGTGVATNLVRRLCERETPPDALILESPFTNIREEAKSHPFSVIYRYFPGFDWFFLDPITSSGIKFANDENVKHISCPLLILHAEDDPVVPFQLGRKLYSIAAPARSFRDFKVQFVPFHSDLGYRHKYIYKSPELPRILRPQQGPGSSPDPSMWSELV

SEQ ID NO: 187505 - DNA, 1215 bp, Artificial Sequence
  derived and/or modified sequence
atgcgcaagaggaccgaacccgtggccctggaacatgaacggtgcgcagctgctggatcctcaagtagcggaagcgcagccgccgcattggatgccgattgtcgcctgaaacagaacctcagactgacaggccctgccgcagctgaacctcgctgcgcagccgacgccggtatgaagcgggcactgggacgaaggaaaggcgtttggctcagactgcggaaaattctattttgcgtgctgggcctgtatatagcgatcccctttcttataaagctctgtcctggaattcaggcaaagctgatctttttaaactttgtccgcgtgccttatttcatagatctgaaaaagccacaggatcagggactgaatcacacttgcaattactacctgcaacccgaggaggatgtgaccattggagtctggcatacagtgccagcagtatggtggaagaacgcacaggggaaagatcagatgtggtacgaagatgctctcgcgtcctcccacccgattatcctctacctgcacggtaatgctggcactaggggtggcgatcaccgtgtcgaactgtacaaggtcctctcctccctgggttaccacgtggtcacattcgattacagaggttggggcgatagcgtcggaacgcctagcgagcgagggatgacatacgacgctctccatgtgtttgattggattaaggccagatccggggataacccagtgtatatatggggccactccttgggcactggtgtggccactaatctagtgcggcgattatgtgagagagaaacacctcctgatgccttgatattagaaagcccattcaccaatattcgggaagaggcgaaatcacaccccttctcagtgatctaccgctatttcccagggtttgactggttttttctggacccaattacttcatccggaatcaagtttgccaatgatgagaatgtgaagcacatctcttgtccactcctcatcctgcacgcagaggatgatcccgtcgtgccttttcaactgggtcgaaaactatacagcattgctgcaccagccaggtcatttcgggattttaaagttcagttcgtgccattccactccgaccttggctaccgccataaatacatttacaagtccccggagttgccccgaatcctccgcccccaacagggtccgggtagctcaccagatccgtcaatgtggtccgaattagtgtag

SEQ ID NO: 187506 - DNA, 1215 bp, Artificial Sequence
  derived and/or modified sequence
atgaggaagaggacagagcctgtggccctggagcacgagcgctgtgccgccgccggcagcagcagcagcggcagcgctgctgctgccctggatgctgactgccgcctgaagcagaacctgcggctgactggacctgctgctgctgagccccgctgtgccgcagatgctggcatgaagagggccctgggccgcaggaagggcgtgtggctgcggctgaggaagatcctcttctgtgtgctgggcctgtacatcgccatccccttcctgatcaagctgtgccccggcatccaggccaagctgatcttcctgaactttgtgcgggtgccctacttcatcgacctgaagaagccccaggaccagggcctgaaccacacctgcaactactacctgcagcctgaggaggatgtgaccatcggcgtgtggcacacagtgcctgctgtgtggtggaagaatgcccagggcaaggaccagatgtggtatgaagatgccctggccagcagccaccccatcatcctgtacctgcatggaaatgccggcacccggggcggggaccaccgggtggagctgtacaaggtgctgagcagcctgggctaccacgtggtgacctttgactaccggggctggggagacagcgtgggcacccccagcgagcggggcatgacctatgatgccctgcacgtgtttgactggatcaaggcccggagcggggacaaccctgtgtacatctggggccacagcctgggcactggagtggccaccaacctggtgcggcggctgtgtgagcgggagaccccaccagatgccctgatcctggagagccccttcaccaacatccgggaggaggccaagagccaccccttcagcgtcatctaccgctacttccctggctttgactggttcttcctggaccccatcaccagcagcggcatcaagtttgccaatgatgaaaatgtgaagcacatcagctgccccctgctgatcctgcacgcagaagatgatcctgtggtgcccttccagctgggcaggaagctgtacagcattgctgccccagcccgctccttccgggacttcaaggtgcagtttgtgcccttccacagcgacctgggctaccgccacaagtacatctacaagagccctgagctgccccgcatcctgcggccccagcagggccctggcagcagcccagaccccagcatgtggagcgagctggtgtag

SEQ ID NO: 187507 - DNA, 1215 bp, Artificial Sequence
  derived and/or modified sequence
atgcggaagcggaccgagcccgtggccctggagcacgagcggtgcgcggcagctggatccagttcctctggctcagctgccgctgccctcgatgcggactgcaggctgaagcagaatctacgcctgactggtcccgccgcggccgagccccgctgtgctgctgacgcgggcatgaagcgtgcccttggccgacggaagggcgtctggctaagattgcgcaaaatcctcttctgcgtgctgggtttatacatcgcaatacccttcctgattaagctatgtcccgggatccaggcaaagctgatattcctgaattttgtacgcgttccatacttcatagatttgaaaaagccacaggaccagggattgaatcatacatgtaattactacctgcaacccgaggaggatgtgactatcggagtgtggcacaccgtgccggccgtgtggtggaagaacgcccaaggcaaagatcaaatgtggtacgaagacgccctagcttcaagtcaccccatcatcttatatctccacgggaacgccggaactcgtggcggggatcacagagtagagttatataaggttctctcctctctcggctatcatgtcgtcacgttcgattaccgcggatggggcgacagcgtgggaaccccttctgaaaggggcatgacatatgacgcgctccacgtcttcgattggatcaaggcacggtcaggcgataatcctgtgtacatttggggccacagcttggggaccggcgtggcgacaaatctagtccgtcgactttgcgaacgagaaacacctccagacgccctcatcctggagagcccctttaccaatattagggaggaggcaaagtcccatccttttagtgtgatatatcgctattttcccggattcgattggttctttctggacccaattactagttccggcatcaaatttgccaatgatgaaaatgtgaagcacatttcctgccccctgctgatcctgcacgctgaggatgaccccgtagtgccattccagctggggaggaagctctacagcatagccgcaccggcaaggtcctttcgggacttcaaagttcaatttgtcccttttcattcggacctgggatatcgacataaatacatatacaaaagtcccgagttgccccgaattctccgcccacagcagggacccggcagtagcccagacccatccatgtggagtgaattggtctag

SEQ ID NO: 187508 - DNA, 1215 bp, Artificial Sequence
  derived and/or modified sequence
atgaggaagaggacagaaccggtggctctggaacacgaacgctgtgctgccgctggaagttcttcctctgggagtgcagccgcagccctggatgctgattgtagactgaaacagaacctcaggctcacaggccctgccgctgccgagccaaggtgtgccgctgatgccggtatgaaacgcgctctcgggagacgcaaaggagtttggctgaggctgagaaagatccttttctgtgtcttgggtctttacattgccattccatttctgattaaactgtgccccggtatccaggctaagcttattttcctgaatttcgtccgcgtgccatattttatcgaccttaaaaagccccaggatcagggcctgaatcatacttgtaactactacctccagccagaagaagatgtgactatcggcgtttggcacacagttccagctgtgtggtggaagaatgctcaggggaaagatcaaatgtggtatgaggacgcactggcaagcagtcatcctattattctgtacctgcacggcaatgctgggacccgaggaggggatcaccgcgtagaactttacaaggttctgagttcgctcgggtaccatgtagttacttttgattaccgtggatggggcgactctgtgggtacgccctccgagcggggaatgacctacgacgccctgcatgtcttcgattggataaaggccaggtcaggggacaacccagtctatatctggggtcacagcctggggactggcgtcgccacaaatctcgtgaggcggctgtgcgagcgtgagacccctccggacgccctaatcctcgaaagccccttcaccaatattagggaagaagcaaagtctcatcctttcagcgtgatctatcggtattttcccggttttgactggttttttcttgacccaatcacaagcagtggaatcaagtttgcaaatgatgagaatgtgaaacatatctcctgccccctcctgatactgcatgctgaggatgaccccgtcgtgccattccagcttgggcgtaaactatacagcatcgcagcgccagcccgttcattccgagacttcaaagtgcagttcgtccccttccatagcgatcttgggtatcggcacaaatatatctataaaagtccagaacttcccagaatcttgcgccctcagcagggaccaggatcatcacctgacccaagtatgtggtctgagttggtgtag

SEQ ID NO: 187509 - DNA, 1725 bp, Artificial Sequence
  derived and/or modified sequence
gccagggatgctgggcgcgcgctccttggaactagagaggaggtggccggggcggggccgggggaggggggtagggcagagccggcgggagcccggcgctgattggccggcctggctggcgggcccccgccgctggttcgtagccggcgcagcggcctgggctgggatgtgaggagcggcgggttccgggctccgggctctgggtggcggcggctgtgagcggcggcactgcggcgcaggccagcgggcgccgtcggcggctggccctgtcggccgcgggatgaggaagcggaccgagcccgtcgccttggagcatgagcgctgcgccgccgcgggctcgtcctcctccggctcggccgccgcggcgctggacgccgactgccgcctgaagcagaacctacgcctgacgggcccggcggcggctgagccgcgctgcgcagccgacgcgggaatgaagcgggcgctgggcaggcgaaagggcgtgtggttgcgcctgaggaagatacttttctgtgttttggggttgtacattgccattccatttctcatcaaactatgtcctggaatacaggccaaactgattttcttgaatttcgtaagagttccctatttcattgatttgaaaaaaccacaggatcaaggtttgaatcacacgtgtaactactacctgcagccagaggaagacgtgaccattggagtctggcacaccgtccctgcagtctggtggaagaacgcccaaggcaaagaccagatgtggtatgaggatgccttggcttccagccaccctatcattctgtacctgcatgggaacgcaggtaccagaggaggcgaccaccgcgtggagctttacaaggtgctgagttcccttggttaccatgtggtcacctttgactacagaggttggggtgactcagtgggaacgccatctgagcggggcatgacctatgacgcactccacgtttttgactggatcaaagcaagaagtggtgacaaccccgtgtacatctggggccactctctgggcactggcgtggcgacaaatctggtgcggcgcctctgtgagcgagagacgcctccagatgcccttatattggaatctccattcactaatatccgcgaagaagctaagagccatccattttcagtgatatatcgatacttccctgggtttgactggttcttccttgatcctattacaagtagtggaattaaatttgcaaatgatgaaaacgtgaagcacatctcctgtcccctgctcatcctgcacgctgaggacgacccggtggtgcccttccagcttggcagaaagctctatagcatcgccgcaccagctcgaagcttccgagatttcaaagttcagtttgtgccctttcattcagaccttggctacaggcacaaatacatttacaagagccctgagctgccacggatactgagacctcagcagggcccaggttccagcccagatcccagcatgtggtcagagctggtgtgactgaagccaacaggtgacacggtcatcgaagagcagcagacaaaactaaaactaacccaaaggcagctgaaagtggagggcaggtgaattcccagccctcgccggattcaacttttgccaacggtgaagaactgccctgagctgcaaaccttacaaagtctgtaactctagataaaccataccatgtgctaactgcactgaaataaaacactaactacattataatgtca

SEQ ID NO: 187510 - DNA, 1215 bp, Artificial Sequence
  derived and/or modified sequence
atgagaaagagaaccgagcccgtggccctggagcacgagagatgcgccgccgccggcagcagcagcagcggcagcgccgccgccgccctggacgccgactgcagactgaagcagaacctgagactgaccggccccgccgccgccgagcccagatgcgccgccgacgccggcatgaagagagccctgggcagaagaaagggcgtgtggctgagactgagaaagatcctgttctgcgtgctgggcctgtacatcgccatccccttcctgatcaagctgtgccccggcatccaggccaagctgatcttcctgaacttcgtgagagtgccctacttcatcgacctgaagaagccccaggaccagggcctgaaccacacctgcaactactacctgcagcccgaggaggacgtgaccatcggcgtgtggcacaccgtgcccgccgtgtggtggaagaacgcccagggcaaggaccagatgtggtacgaggacgccctggccagcagccaccccatcatcctgtacctgcacggcaacgccggcaccagaggcggcgaccacagagtggagctgtacaaggtgctgagcagcctgggctaccacgtggtgaccttcgactacagaggctggggcgacagcgtgggcacccccagcgagagaggcatgacctacgacgccctgcacgtgttcgactggatcaaggccagaagcggcgacaaccccgtgtacatctggggccacagcctgggcaccggcgtggccaccaacctggtgagaagactgtgcgagagagagaccccccccgacgccctgatcctggagagccccttcaccaacatcagagaggaggccaagagccaccccttcagcgtgatctacagatacttccccggcttcgactggttcttcctggaccccatcaccagcagcggcatcaagttcgccaacgacgagaacgtgaagcacatcagctgccccctgctgatcctgcacgccgaggacgaccccgtggtgcccttccagctgggcagaaagctgtacagcatcgccgcccccgccagaagcttcagagacttcaaggtgcagttcgtgcccttccacagcgacctgggctacagacacaagtacatctacaagagccccgagctgcccagaatcctgagaccccagcagggccccggcagcagccccgaccccagcatgtggagcgagctggtgtag

SEQ ID NO: 187511 - protein, 583 aa, Artificial Sequence
  derived and/or modified sequence
MAGDGRRAEAVREGWGVYVTPRAPIREGRGRLAPQNGGSSDAPAYRTPPSRQGRREVRFSDEPPEVYGDFEPLVAKERSPVGKRTRLEEFRSDSAKEEVRESAYYLRSRQRRQPRPQETEEMKTRRTTRLQQQHSEQPPLQPSPVMTRRGLRDSHSSEEDEASSQTDLSQTISKKTVRSIQEAPVSEDLVIRLRRPPLRYPRYEATSVQQKVNFSEEGETEEDDQDSSHSSVTTVKARSRDSDESGDKTTRSSSQYIESFWQSSQSQNFTAHDKQPSVLSSGYQKTPQEWAPQTARIRTRMQNDSILKSELGNQSPSTSSRQVTGQPQNASFVKRNRWWLLPLIAALASGSFWFFSTPEVETTAVQEFQNQMNQLKNKYQGQDEKLWKRSQTFLEKHLNSSHPRSQPAILLLTAARDAEEALRCLSEQIADAYSSFRSVRAIRIDGTDKATQDSDTVKLEVDQELSNGFKNGQNAAVVHRFESFPAGSTLIFYKYCDHENAAFKDVALVLTVLLEEETLGTSLGLKEVEEKVRDFLKVKFTNSNTPNSYNHMDPDKLNGLWSRISHLVLPVQPENALKRGICL

SEQ ID NO: 187512 - DNA, 1137 bp, Artificial Sequence
  derived and/or modified sequence
atggccggcgacggcagaagagccgaggccgtgagagagggctggggcgtgtacgtgacccccagagcccccatcagagagggcagaggcagactggccccccagaacggcggcagcagcgacgcccccgcctacagaaccccccccagcagacagggcagaagagaggtgagattcagcgacgagccccccgaggtgtacggcgacttcgagcccctggtggccaaggagagaagccccgtgggcaagagaaccagactggaggagttcagaagcgacagcgccaaggaggaggtgagagagagcgcctactacctgagaagcagacagagaagacagcccagaccccaggagaccgaggagatgaagaccagaagaaccaccagactgcagcagcagcacagcgagcagccccccctgcagcccagccccgtgatgaccagaagaggcctgagagacagccacagcagcgaggaggacgaggccagcagccagaccgacctgagccagaccatcagcaagaagaccgtgagaagcatccaggaggcccccgtgagcgaggacctggtgatcagactgagaagaccccccctgagataccccagatacgaggccaccagcgtgcagcagaaggtgaacttcagcgaggagggcgagaccgaggaggacgaccaggacagcagccacagcagcgtgaccaccgtgaaggccagaagcagagacagcgacgagagcggcgacaagaccaccagaagcagcagccagtacatcgagagcttctggcagagcagccagagccagaacttcaccgcccacgacaagcagcccagcgtgctgagcaagggcagcaccctgatcttctacaagtactgcgaccacgagaacgccgccttcaaggacgtggccctggtgctgaccgtgctgctggaggaggagaccctgggcaccagcctgggcctgaaggaggtggaggagaaggtgagagacttcctgaaggtgaagttcaccaacagcaacacccccaacagctacaaccacatggaccccgacaagctgaacggcctgtggagcagaatcagccacctggtgctgcccgtgcagcccgagaacgccctgaagagaggcatctgcctgtag

SEQ ID NO: 187513 - DNA, 1752 bp, Artificial Sequence
  derived and/or modified sequence
atggccggcgacggcagaagagccgaggccgtgagagagggctggggcgtgtacgtgacccccagagcccccatcagagagggcagaggcagactggccccccagaacggcggcagcagcgacgcccccgcctacagaaccccccccagcagacagggcagaagagaggtgagattcagcgacgagccccccgaggtgtacggcgacttcgagcccctggtggccaaggagagaagccccgtgggcaagagaaccagactggaggagttcagaagcgacagcgccaaggaggaggtgagagagagcgcctactacctgagaagcagacagagaagacagcccagaccccaggagaccgaggagatgaagaccagaagaaccaccagactgcagcagcagcacagcgagcagccccccctgcagcccagccccgtgatgaccagaagaggcctgagagacagccacagcagcgaggaggacgaggccagcagccagaccgacctgagccagaccatcagcaagaagaccgtgagaagcatccaggaggcccccgtgagcgaggacctggtgatcagactgagaagaccccccctgagataccccagatacgaggccaccagcgtgcagcagaaggtgaacttcagcgaggagggcgagaccgaggaggacgaccaggacagcagccacagcagcgtgaccaccgtgaaggccagaagcagagacagcgacgagagcggcgacaagaccaccagaagcagcagccagtacatcgagagcttctggcagagcagccagagccagaacttcaccgcccacgacaagcagcccagcgtgctgagcagcggctaccagaagaccccccaggagtgggccccccagaccgccagaatcagaaccagaatgcagaacgacagcatcctgaagagcgagctgggcaaccagagccccagcaccagcagcagacaggtgaccggccagccccagaacgccagcttcgtgaagagaaacagatggtggctgctgcccctgatcgccgccctggccagcggcagcttctggttcttcagcacccccgaggtggagaccaccgccgtgcaggagttccagaaccagatgaaccagctgaagaacaagtaccagggccaggacgagaagctgtggaagagaagccagaccttcctggagaagcacctgaacagcagccaccccagaagccagcccgccatcctgctgctgaccgccgccagagacgccgaggaggccctgagatgcctgagcgagcagatcgccgacgcctacagcagcttcagaagcgtgagagccatcagaatcgacggcaccgacaaggccacccaggacagcgacaccgtgaagctggaggtggaccaggagctgagcaacggcttcaagaacggccagaacgccgccgtggtgcacagattcgagagcttccccgccggcagcaccctgatcttctacaagtactgcgaccacgagaacgccgccttcaaggacgtggccctggtgctgaccgtgctgctggaggaggagaccctgggcaccagcctgggcctgaaggaggtggaggagaaggtgagagacttcctgaaggtgaagttcaccaacagcaacacccccaacagctacaaccacatggaccccgacaagctgaacggcctgtggagcagaatcagccacctggtgctgcccgtgcagcccgagaacgccctgaagagaggcatctgcctgtag

SEQ ID NO: 187514 - DNA, 1137 bp, Artificial Sequence
  derived and/or modified sequence
atggctggggacggaagacgggcagaggcagtgcgtgaaggatggggcgtgtacgtcactccgcgggcacctatccgggaagggaggggacgcctggccccgcagaacgggggcagttccgacgctcctgcatacagaacccctccttcccgtcaaggccgtagggaggtgaggttttctgacgagccacccgaagtgtatggtgactttgagccccttgtcgccaaggagagaagtcctgtggggaaaagaacgcgtttggaggagttcagatccgacagtgccaaagaagaagttagggaaagcgcttattacctgagaagcaggcagcggcgacagcccaggcctcaggaaacagaggagatgaagacaagacggaccactcggctccagcagcaacactcagagcaacccccattgcagcctagtcctgtgatgactcgaagaggcctgcgcgactcacattcaagcgaggaggacgaggccagttcccagactgacctgtcacagaccatcagcaagaaaaccgtcaggtcgatccaggaggcacctgtcagcgaggatctagtgattcggctcagacggccgccactcaggtacccgcggtatgaggccaccagcgtccagcagaaagtgaactttagtgaagagggtgagactgaggaggatgatcaagacagcagccacagctcagttacaacagtgaaagcaagatcccgggacagtgatgagagcggcgataaaacgactcggagtagctctcagtatattgagtctttttggcagtcatctcagagccagaatttcacagcgcatgacaagcagccaagcgtgctgtccaaagggagtacattgatcttttataagtattgtgaccacgagaatgccgctttcaaggacgtcgcacttgtcctcaccgttctattggaagaggagacccttggtactagcttagggctgaaggaagtggaggaaaaagtccgggacttcctgaaggtcaagtttactaacagtaacacaccaaattcttacaaccatatggaccccgataagttaaatgggctgtggtcccggatctcacacttagtacttcctgtgcagcctgagaatgcccttaaacggggcatctgtctctag

SEQ ID NO: 187515 - DNA, 1752 bp, Artificial Sequence
  derived and/or modified sequence
atggctggtgacggacggcgggctgaagccgtgcgagagggctggggtgtgtacgtgacaccacgagcgccaattcgcgaaggccgtggccgccttgcccctcagaacggaggttcttctgatgcccccgcatacaggactcccccgtcgcggcagggaaggcgcgaggtgcgattcagtgacgagcctccagaggtctacggggacttcgagccattggtagcaaaggaaagatctccagtgggaaaaaggacgcggctggaggagttcagaagtgatagtgcaaaagaggaggtcagagaatcagcctattatctgagatcacggcaacggaggcaaccaagaccacaagaaactgaagagatgaaaaccaggcgtacgacacgcctgcagcaacaacatagcgaacaaccacctcttcaaccctcaccagtcatgacccgccgggggcttagggacagtcatagttctgaagaggatgaggcttcgtctcagacagaccttagccagactatttccaaaaagaccgtccgttcaatccaggaggctccagtttccgaagatctagttatcaggttgagaaggcccccattgagataccccaggtacgaggcgacttccgtgcagcagaaggtgaattttagtgaggaaggtgagactgaagaagatgaccaggactcatcgcactcatctgtgaccacagtcaaagctagatctagagatagcgatgagtctggagacaaaaccacacgcagctcctcccagtacatagagtctttctggcagagctcccagagccagaactttacagcccacgacaaacagcctagcgtgcttagtagcggataccagaagacccctcaagaatgggccccgcaaacagccagaatccgaacccgtatgcagaatgacagcatattgaaaagcgaactggggaatcaatctccttctacttcgtctcgacaagtgaccggacaaccacagaatgcttctttcgtgaaaaggaaccgttggtggctcctgccactcatcgccgccctggcgtccggatctttttggttcttcagcacccccgaagtggagaccactgccgtgcaggagtttcagaaccaaatgaatcagttaaaaaacaagtatcagggtcaagatgagaaactgtggaaacggtcccagacttttctggaaaaacacctaaactcttcacatccaaggtcacaaccagcgattcttctgcttaccgctgcccgtgatgctgaagaggctctgcgatgcttgtccgagcagatagcagacgcatatagctcttttaggtctgtgagggccatccgcatcgacgggaccgacaaagccacgcaggattcagataccgttaagctggaagttgaccaagagttaagcaacggattcaagaacgggcagaacgctgcggtagtacacagatttgaaagctttcccgctggcagcacgttgatattttataagtattgcgatcatgaaaatgcagcgttcaaggacgtcgccttagtactgaccgttctccttgaggaggaaactctggggacatctctgggactgaaagaggttgaggaaaaagtgagagactttcttaaggtcaaattcactaatagtaatacgcccaattcttacaatcatatggacccagacaagcttaacggactgtggtcccgcatatcacacctggttctgcccgtccagcctgagaacgcgctcaaacgcggaatctgcctatag

SEQ ID NO: 187516 - DNA, 1137 bp, Artificial Sequence
  derived and/or modified sequence
atggctggagatggccggcgggcagaggccgtgcgggagggctggggcgtgtatgtgaccccccgggcccccatccgggagggccggggccgcctggccccccagaatggaggcagcagtgatgccccagcctaccgcaccccacccagccggcagggccggcgggaggtgcgcttcagtgatgagcccccagaggtgtatggagactttgagcccctggtggccaaggagaggagccctgtgggcaagaggacccggctggaggagttcagaagtgacagcgccaaggaggaggtgcgggagagcgcctactacctgcggagccggcagaggcggcagccccggccccaggagacagaggagatgaagaccaggaggaccacccggctgcagcagcagcacagcgagcagccccccctgcagcccagccctgtgatgacccggcggggcctgcgggacagccacagcagtgaagaagatgaggccagcagccagacagacctgagccagaccatcagcaagaagacagtgcgcagcatccaggaggcccctgtgtctgaggacctggtgatccggctgcggcggccccccctgcgctaccccaggtatgaggccacctctgtgcagcagaaggtgaacttcagcgaggagggggagacagaggaggatgaccaggacagcagccacagctctgtgaccaccgtgaaggcccggagccgggacagtgatgaaagtggggacaagaccaccaggagcagcagccagtacatcgagagcttctggcagagcagccagagccagaacttcaccgcccatgacaagcagcccagcgtgctgagcaagggcagcaccctcatcttctacaagtactgtgaccatgaaaatgctgccttcaaggatgtggccctggtgctgactgtgctgctggaggaggagaccctgggcaccagcctgggcctgaaggaggtggaggagaaggtgcgggacttcctgaaggtgaagttcaccaacagcaacacccccaacagctacaaccacatggaccctgacaagctgaatggcctgtggagccgcatcagccacctggtgctgcctgtgcagccagaaaatgccctgaagaggggcatctgcctgtag

SEQ ID NO: 187517 - DNA, 1752 bp, Artificial Sequence
  derived and/or modified sequence
atggctggagatggccggcgggcagaggccgtgcgggagggctggggcgtgtatgtgaccccccgggcccccatccgggagggccggggccgcctggccccccagaatggaggcagcagtgatgccccagcctaccgcaccccacccagccggcagggccggcgggaggtgcgcttcagtgatgagcccccagaggtgtatggagactttgagcccctggtggccaaggagaggagccctgtgggcaagaggacccggctggaggagttcagaagtgacagcgccaaggaggaggtgcgggagagcgcctactacctgcggagccggcagaggcggcagccccggccccaggagacagaggagatgaagaccaggaggaccacccggctgcagcagcagcacagcgagcagccccccctgcagcccagccctgtgatgacccggcggggcctgcgggacagccacagcagtgaagaagatgaggccagcagccagacagacctgagccagaccatcagcaagaagacagtgcgcagcatccaggaggcccctgtgtctgaggacctggtgatccggctgcggcggccccccctgcgctaccccaggtatgaggccacctctgtgcagcagaaggtgaacttcagcgaggagggggagacagaggaggatgaccaggacagcagccacagctctgtgaccaccgtgaaggcccggagccgggacagtgatgaaagtggggacaagaccaccaggagcagcagccagtacatcgagagcttctggcagagcagccagagccagaacttcaccgcccatgacaagcagcccagcgtgctgagcagcggctaccagaagaccccccaggagtgggccccccagacagcccgcatccgcaccaggatgcagaatgacagcatcctgaagtctgagctgggcaaccagagccccagcaccagcagccggcaggtgacaggccagccccagaatgccagctttgtgaagaggaaccgctggtggctgctgcccctgattgctgccctggccagcggcagcttctggttcttcagcaccccagaggtggagaccacagctgtgcaggagttccagaaccagatgaaccagctgaagaacaagtaccagggccaggatgagaagctgtggaagaggagccagaccttcctggagaagcacctgaacagcagccaccccaggagccagcctgccatcctgctgctgacagctgccagagatgctgaggaggccctgcgctgcctgtctgagcagattgctgatgcctacagcagcttccgctctgtgcgggccatcagaattgatggaacagacaaggccacccaggacagcgacacagtgaagctggaggtggaccaggagctgagcaatggcttcaagaatggccagaatgctgctgtggtgcacagatttgagagcttccctgctggcagcaccctcatcttctacaagtactgtgaccatgaaaatgctgccttcaaggatgtggccctggtgctgactgtgctgctggaggaggagaccctgggcaccagcctgggcctgaaggaggtggaggagaaggtgcgggacttcctgaaggtgaagttcaccaacagcaacacccccaacagctacaaccacatggaccctgacaagctgaatggcctgtggagccgcatcagccacctggtgctgcctgtgcagccagaaaatgccctgaagaggggcatctgcctgtag

SEQ ID NO: 187518 - DNA, 1137 bp, Artificial Sequence
  derived and/or modified sequence
atggccggcgacggccggcgggccgaggccgtgcgggagggctggggggtctacgtgacgccccgcgcccccattagagaaggccgcgggcggctcgccccacaaaacggaggaagctccgacgccccagcataccgcacacccccgagtcggcaagggcgcagagaggtgagatttagtgacgagccaccagaggtatacggggacttcgaacctcttgtggcaaaagagaggtcccccgtgggcaaaagaactcgactggaggagtttagatcagacagcgctaaggaggaagttcgggagtcagcttactatctgcgatccaggcagcgtcggcaaccccgccctcaggagaccgaggaaatgaagacacgtaggaccacaaggctccagcagcagcatagtgaacagccccctctgcaaccgtcgcccgtgatgacacgtcgtggacttagagactcccacagctcagaggaggacgaggcttcatcccaaaccgacctctcacagactatctcgaaaaaaaccgtgaggagcatccaggaagctcctgtttctgaagaccttgttattcgtttgagacgcccccctctcaggtacccaagatatgaggcaacctcagtgcagcaaaaggttaacttcagtgaagagggcgagaccgaggaagatgatcaggactccagtcactcttctgtcaccaccgtgaaggcacgctcccgggactccgatgagagcggggacaaaacaacgcgatccagttcacagtatattgagtctttctggcagtcttcgcagtctcagaacttcactgcccacgacaagcagcccagcgttttgtccaagggatccactcttattttctacaaatattgtgatcacgagaacgcggcttttaaggacgtcgctttggtgttaacagtgcttctagaagaggaaacactgggtaccagtctgggacttaaagaagtggaagagaaggtgagagattttcttaaagtgaagttcacaaattctaacactcccaattcgtacaaccacatggatcctgataagcttaatggtctctggagcaggatttcacacttggtgctacccgtgcagccagaaaacgctctcaaaagaggcatctgtctgtag

SEQ ID NO: 187519 - DNA, 1752 bp, Artificial Sequence
  derived and/or modified sequence
atggccggcgacggccggcgggccgaggccgtgcgggagggctggggagtctatgtcacacctcgggctccaatcagagaaggtcgaggtcgcttggcaccccagaatggcgggagttctgatgcgcctgcgtaccggacccctccctcccggcagggccggagggaagtgagattttctgacgagcctccagaagtgtatggggatttcgagccactcgtggcaaaggagaggtcaccagtaggcaaaagaactcgcctggaagaattccggtcagactctgctaaggaagaggtgcgcgagtcagcttattatcttaggagccgccagagaagacagcctaggccacaggaaacagaggagatgaagacccgcaggacaactcgtttacagcaacagcattcggagcagccacccctgcagccttcccctgtcatgacgcgacggggcctgagggatagtcacagctcagaagaggacgaggccagtagtcaaaccgatctgtcacagacaattagcaagaagactgtcagatccatccaggaggctcctgttagcgaggacctggtgatacggctccgccggccaccgctgcgctatccaagatacgaagcgaccagtgtgcagcaaaaagtaaatttcagcgaagaaggtgagaccgaagaagacgaccaggactcctcacactctagcgttaccaccgtgaaggcccgctcgagagattccgacgaatcaggtgataagaccactcgctcttcttctcagtacatcgagtccttttggcagagctcacagagccagaactttacggcccacgacaaacaacctagcgttctctcaagcggctatcaaaaaacccctcaggagtgggccccgcagactgccagaatacgaacacgtatgcagaatgactctatcctgaaatcggaattgggcaaccagtctccttcaacatcttccagacaggtgaccggacaacctcagaatgctagcttcgtgaaaagaaataggtggtggcttctgccactcatagctgctttggcttcaggatccttctggtttttttcaacacccgaagtcgagactactgccgtgcaggagttccagaatcaaatgaaccaattgaagaataaataccagggacaggacgaaaagctctggaagcggtcacaaaccttcctggagaagcatcttaactccagccatccacgctcgcagcccgctattctgctccttacagcagctcgcgacgctgaagaagctctgcgctgcctctcagagcaaatcgcagacgcgtatagctcattcagaagcgtgcgcgcgatccgcatcgatggtactgataaagccactcaggacagcgatacggtgaagctggaggtggaccaggaactgtctaatggattcaagaatgggcagaacgccgccgtggtccacaggttcgaaagcttcccggccggatctaccctgatcttctataaatactgtgatcatgaaaatgccgcgtttaaggacgtggccctggttctcaccgtgctactggaagaggaaaccctgggtacctcactgggcctgaaagaggtcgaggaaaaagtgagggacttcctaaaagtgaagttcacaaactccaatactccaaactcatacaaccatatggaccccgataagctgaacggactttggtcccggatcagccaccttgtgcttccagtgcaacctgaaaacgctttaaaacgcggtatttgcctatag

SEQ ID NO: 187520 - DNA, 1137 bp, Artificial Sequence
  derived and/or modified sequence
atggccggtgatggaagaagggcagaggccgtgagggaaggttggggcgtctatgtcacacccagagcccctatccgggagggcagaggacggctggcaccccaaaatggcggtagctcagatgcgcctgcgtacaggactccgccaagtagacagggacgcagggaggttcgtttcagtgatgaacctccagaagtttatggggatttcgagcccctagtcgccaaggagcggagcccggtgggaaagcggacacgacttgaggaattcagaagcgactctgcgaaggaagaggtgcgtgaaagcgcttattacctccgttccagacagagacgacagcccaggccgcaggagaccgaagaaatgaagactaggcgaacaacaaggctccagcagcaacactccgaacagccgcctttgcagcccagtccagtgatgaccagaagaggcttgcgcgacagccattcttctgaggaggatgaggccagtagtcagacagacctgtctcaaactattagcaaaaagacagttcgtagtattcaggaagccccagtgtcagaggacctggttattagactccggaggcctccactcaggtacccacgttacgaagctacttctgtgcaacagaaggttaatttttccgaggaaggggagaccgaagaagacgatcaggactcatcccattcttccgtgacaacggtcaaagcgagatcccgcgactccgacgagtccggcgataagaccaccagatctagcagccagtacattgaatcattttggcagagctcacaatctcagaactttacagctcatgacaagcagccttctgttttaagcaaaggctcaacacttatcttctacaaatactgcgaccacgagaatgccgcttttaaagatgtcgccctggtcctgactgtgctgctggaggaggagacgctggggacctccctgggactcaaagaagttgaggagaaagttcgcgactttttaaaggtcaaattcacaaactctaatacacctaacagttacaaccatatggacccagataaattgaatggtttgtggtctcggatcagtcacctggtgctgcctgtgcagccggagaatgcgctgaaaagaggaatctgcctgtag

SEQ ID NO: 187521 - DNA, 1752 bp, Artificial Sequence
  derived and/or modified sequence
atggctggcgatggcaggcgagcagaggctgtaagggaagggtggggcgtgtacgttaccccaagggcgcctatccgcgagggcagggggcgactggctcctcagaatgggggaagctctgacgctccagcttaccgcaccccaccaagcagacagggcagaagagaagtcaggttcagcgatgagccccctgaggtatacggagacttcgagccccttgtggcaaaagaacgttccccagtggggaaacgcaccaggttggaggaattcagaagcgactccgcaaaagaggaggttcgggagtcagcctactatcttcgcagcaggcaacgccgtcaacctcggccacaagagacggaagagatgaagacacgcaggactacgagattgcagcaacagcacagcgaacagcctcctttgcagccttcacccgtcatgacaagaaggggtttgagggactcgcacagctctgaagaagatgaggcaagcagtcagacagacctgtcacagactattagcaaaaagaccgtgcggtctatccaggaggccccagtgtctgaggatctcgtaattcgccttcgccgaccgcctctgcgctacccacggtacgaagccacatcggtccagcaaaaagtgaatttctccgaagagggagagaccgaagaggacgaccaggatagtagccacagctcagtgactacagtgaaagcacgcagcagggattcagacgagtcaggggataaaactacacgatcatcaagtcagtacatagaaagcttttggcaatcgtctcaaagtcagaactttactgctcacgacaaacaaccctcagttcttagttcgggttaccagaaaacccctcaggagtgggctccacaaacagcacggatcaggactcggatgcagaatgactctattctgaagtccgagctcgggaaccagtccccatctacgagttcccgacaggtgacggggcagccccagaacgctagctttgttaaacgcaacaggtggtggttgctgcctctcatagcagccttagcgtctggctcattctggttctttagcacccctgaggtggagacgaccgctgtgcaggagtttcagaaccagatgaaccagctgaagaataagtatcagggccaggatgaaaaactgtggaaaaggagccagacctttctggagaaacatctgaatagcagccacccaaggtcccagcccgcaattctgcttcttaccgccgcacgggacgctgaggaggcactgcgttgcctgtccgagcagattgccgatgcttacagtagttttagatccgtgcgagcaattcgaatcgatgggaccgataaagctactcaggatagcgatactgtcaagttggaggtggaccaggaactctcaaatgggttcaaaaatgggcagaacgccgctgtcgtacacagattcgaatcatttccggctggctctactttaattttctataaatattgcgatcacgaaaacgctgcattcaaggatgtggcacttgtgttgacggtgcttctggaagaagagacattaggtacctccctcggccttaaggaggttgaggagaaggtgagggatttcctgaaggtcaagtttacgaacagtaatacacccaactcttataaccacatggatcctgataagctgaacggcctgtggagcaggatcagccacctggtactgcccgtccagcccgagaacgcccttaagagaggcatttgtctatag

SEQ ID NO: 187522 - DNA, 1355 bp, Artificial Sequence
  derived and/or modified sequence
actgcctctctcacagccctcaagacacaccatgggcccagaggcaggtttgctacacagcagcgacgacgcaggcggcggccccagcgactcgcaactgcctccctgaccacagcggccaccgcccaacacccccgagaagccatcgccaccaccggcaggagaacctagggtccataaagccatcttcgcgatcgactaaagctacgtcaacaactatggcgggcgacgggcggcgggcagaggcggtgcgggaaggatggggtgtgtacgtcacccccagggcccccatccgagagggaaggggccggctcgcccctcaaaatggcggcagcagcgatgcgcctgcgtacagaactcctccgtcgcgccagggccggcgggaagtgaggttctcggacgagccgccagaagtgtacggcgacttcgagcccctggtggccaaagaaaggtccccggtgggaaaacgaacccggctagaagagttccggtccgattctgcgaaagaggaagtgagagaaagcgcgtactaccttcggtctaggcagcggaggcagccgcgaccccaggaaaccgaggaaatgaagacgcgaaggactacccgccttcagcagcagcactcagagcagcctccgctacagccgtctcctgttatgaccaggagagggctgcgggactctcattcctctgaagaggatgaagcatcttcccaaactgatttaagccaaacgatctcaaagaaaactgtcaggagcatacaagaggctccagtgagtgaagatcttgtaatcaggttacgtcgaccccctctaagatacccaagatatgaagccaccagtgtccaacagaaggtcaatttctctgaagaaggagaaactgaagaagatgatcaagacagctctcacagcagtgtcactactgttaaggccagatccagggattctgatgaatctggagataaaaccaccagatcatctagtcaatatatagaatcattttggcagtcatcacaaagtcaaaacttcacagctcatgataagcaaccttcagtgctaagtaaaggctctactttgatcttctacaaatattgtgaccatgaaaacgcggccttcaaagatgtagccttagtcctgactgtcttattggaggaagagacacttggaacaagtctaggcctaaaggaagttgaagaaaaagtaagagattttcttaaagtcaagttcaccaattctaacacacccaactcctacaatcatatggacccagacaaactgaatggcctctggagccgtatttctcacttagttctgcctgtgcaacctgaaaatgccctgaaaaggggcatctgcttataa

SEQ ID NO: 187523 - DNA, 2102 bp, Artificial Sequence
  derived and/or modified sequence
caccatgggcccagaggcaggtttgctacacagcagcgacgacgcaggcggcggccccagcgactcgcaactgcctccctgaccacagcggccaccgcccaacacccccgagaagccatcgccaccaccggcaggagaacctagggtccataaagccatcttcgcgatcgactaaagctacgtcaacaactatggcgggcgacgggcggcgggcagaggcggtgcgggaaggatggggtgtgtacgtcacccccagggcccccatccgagagggaaggggccggctcgcccctcaaaatggcggcagcagcgatgcgcctgcgtacagaactcctccgtcgcgccagggccggcgggaagtgaggttctcggacgagccgccagaagtgtacggcgacttcgagcccctggtggccaaagaaaggtccccggtgggaaaacgaacccggctagaagagttccggtccgattctgcgaaagaggaagtgagagaaagcgcgtactaccttcggtctaggcagcggaggcagccgcgaccccaggaaaccgaggaaatgaagacgcgaaggactacccgccttcagcagcagcactcagagcagcctccgctacagccgtctcctgttatgaccaggagagggctgcgggactctcattcctctgaagaggatgaagcatcttcccaaactgatttaagccaaacgatctcaaagaaaactgtcaggagcatacaagaggctccagtgagtgaagatcttgtaatcaggttacgtcgaccccctctaagatacccaagatatgaagccaccagtgtccaacagaaggtcaatttctctgaagaaggagaaactgaagaagatgatcaagacagctctcacagcagtgtcactactgttaaggccagatccagggattctgatgaatctggagataaaaccaccagatcatctagtcaatatatagaatcattttggcagtcatcacaaagtcaaaacttcacagctcatgataagcaaccttcagtgctaagctcaggatatcaaaaaactccccaggaatgggccccacaaactgcaagaataaggaccaggatgcaaaatgacagcattctgaaatcagagcttggaaaccagtcaccatcaacctccagccgacaagtgactggacaaccccaaaatgcatcttttgtcaagaggaaccggtggtggctacttcctctgatagctgctcttgcctctgggagtttttggttctttagtactcctgaggtagaaaccactgctgttcaagagttccagaaccagatgaatcaacttaagaataagtaccaaggtcaagatgagaagctgtggaaaaggagccaaacattcctggaaaaacatcttaatagctcccatcctcggtctcagcctgctatcttactgctcactgctgcccgagatgctgaagaagcacttaggtgtctgagtgaacaaattgctgatgcctattcttcttttcgtagtgtccgtgccatccggattgatgggacagataaagctactcaagacagtgatactgtcaaactagaggtagaccaagaactgagcaatggatttaagaatggccagaatgcagctgtggtacaccgctttgagtcatttcccgcaggctctactttgatcttctacaaatattgtgaccatgaaaacgcggccttcaaagatgtagccttagtcctgactgtcttattggaggaagagacacttggaacaagtctaggcctaaaggaagttgaagaaaaagtaagagattttcttaaagtcaagttcaccaattctaacacacccaactcctacaatcatatggacccagacaaactgaatggcctctggagccgtatttctcacttagttctgcctgtgcaacctgaaaatgccctgaaaaggggcatctgcttataagaagtgagagagaagaaaaatcatgtcccaagttctgagaattgttcacactttctaaccagagacagaattcagagctctttttgaaagaactagtttctttttaaagaagttaagtgcttacataaacatggaacatataaatcattcattcaacct

SEQ ID NO: 187524 - protein, 495 aa, Artificial Sequence
  derived and/or modified sequence
MNKSRWQSRRRHGRRSHQQNPWFRLRDSEDRSDSRAAQPAHDSGHGDDESPSTSSGTAGTSSVPELPGFYFDPEKKRYFRLLPGHNNCNPLTKESIRQKEMESKRLRLLQEEDRRKKIARMGFNASSMLRKSQLGFLNVTNYCHLAHELRLSCMERKKVQIRSMDPSALASDRFNLILADTNSDRLFTVNDVKVGGSKYGIINLQSLKTPTLKVFMHENLYFTNRKVNSVCWASLNHLDSHILLCLMGLAETPGCATLLPASLFVNSHPGIDRPGMLCSFRIPGAWSCAWSLNIQANNCFSTGLSRRVLLTNVVTGHRQSFGTNSDVLAQQFALMAPLLFNGCRSGEIFAIDLRCGNQGKGWKATRLFHDSAVTSVRILQDEQYLMASDMAGKIKLWDLRTTKCVRQYEGHVNEYAYLPLHVHEEEGILVAVGQDCYTRIWSLHDARLLRTIPSPYPASKADIPSVAFSSRLGGSRGAPGLLMAVGQDLYCYSYS

SEQ ID NO: 187525 - DNA, 1488 bp, Artificial Sequence
  derived and/or modified sequence
atgaacaagagcagatggcagagcagaagaagacacggcagaagaagccaccagcagaacccctggttcagactgagagacagcgaggacagaagcgacagcagagccgcccagcccgcccacgacagcggccacggcgacgacgagagccccagcaccagcagcggcaccgccggcaccagcagcgtgcccgagctgcccggcttctacttcgaccccgagaagaagagatacttcagactgctgcccggccacaacaactgcaaccccctgaccaaggagagcatcagacagaaggagatggagagcaagagactgagactgctgcaggaggaggacagaagaaagaagatcgccagaatgggcttcaacgccagcagcatgctgagaaagagccagctgggcttcctgaacgtgaccaactactgccacctggcccacgagctgagactgagctgcatggagagaaagaaggtgcagatcagaagcatggaccccagcgccctggccagcgacagattcaacctgatcctggccgacaccaacagcgacagactgttcaccgtgaacgacgtgaaggtgggcggcagcaagtacggcatcatcaacctgcagagcctgaagacccccaccctgaaggtgttcatgcacgagaacctgtacttcaccaacagaaaggtgaacagcgtgtgctgggccagcctgaaccacctggacagccacatcctgctgtgcctgatgggcctggccgagacccccggctgcgccaccctgctgcccgccagcctgttcgtgaacagccaccccggcatcgacagacccggcatgctgtgcagcttcagaatccccggcgcctggagctgcgcctggagcctgaacatccaggccaacaactgcttcagcaccggcctgagcagaagagtgctgctgaccaacgtggtgaccggccacagacagagcttcggcaccaacagcgacgtgctggcccagcagttcgccctgatggcccccctgctgttcaacggctgcagaagcggcgagatcttcgccatcgacctgagatgcggcaaccagggcaagggctggaaggccaccagactgttccacgacagcgccgtgaccagcgtgagaatcctgcaggacgagcagtacctgatggccagcgacatggccggcaagatcaagctgtgggacctgagaaccaccaagtgcgtgagacagtacgagggccacgtgaacgagtacgcctacctgcccctgcacgtgcacgaggaggagggcatcctggtggccgtgggccaggactgctacaccagaatctggagcctgcacgacgccagactgctgagaaccatccccagcccctaccccgccagcaaggccgacatccccagcgtggccttcagcagcagactgggcggcagcagaggcgcccccggcctgctgatggccgtgggccaggacctgtactgctacagctacagctag

SEQ ID NO: 187526 - DNA, 2360 bp, Artificial Sequence
  derived and/or modified sequence
gcacgcttcgctccaactcctgcagagctgagccggaggggaatccggaagggacacgctgaacaggtctgactcccgggcagcacagcccgctcacgattccggccacggtgatgacgagtctccgtcaacctcgtctggcacagctgggacctcctctgtgccagagctacctgggttttactttgaccctgaaaagaaacgctacttccgcttgctccctggacataacaactgcaaccccctgacgaaagagagcatccggcagaaggagatggagagcaagagactgcggctgctccaggaagaagacagacggaaaaagattgccaggatgggatttaatgcatcttccatgctacgaaaaagccagctgggttttctcaacgtcaccaattactgccatttagcccacgagctgcgtctcagctgcatggagaggaaaaaggtccagattcgaagcatggatccctccgccttggcaagcgaccgatttaacctcatactggcagataccaacagtgaccggctcttcacagtgaacgatgttaaagttggaggctccaagtatggtatcatcaacctgcaaagtctgaagacccctacgctcaaggtgttcatgcacgaaaacctctacttcaccaaccggaaggtgaattcggtgtgctgggcctcgctgaatcacttggattcccacattctgctatgcctcatgggactcgcagagactccaggctgtgccaccctgctcccagcatcactgttcgtcaatagtcacccaggaatagaccggcctggcatgctctgcagtttccggatccctggtgcctggtcctgtgcctggtccctgaatatccaagcaaataactgcttcagtacaggcttgtctcggcgggtcctgttgaccaacgtggtgacgggacaccggcagtcctttgggaccaacagtgatgtcttggcccagcagtttgctctcatggctcctctgctgtttaatggctgccgctctggggaaatctttgccattgatctgcgttgtggaaatcaaggcaagggatggaaggccacccgcctgtttcatgattcagcagtgacctctgtgcggatcctccaagatgagcaatacctgatggcttcagacatggctggaaagatcaagctgtgggacctgaggaccacgaagtgcgtaaggcagtacgaaggccacgtgaatgagtacgcctacctgcccctgcatgtgcacgaggaagaaggaatcctggtggcagtgggccaggactgctacacgagaatctggagcctccacgatgcccgcctactgagaaccataccctccccgtaccctgcctccaaggccgacattcccagtgtggccttctcgtcgcggctggggggctcccggggcgcgccggggctgctcatggctgtcgggcaggacctttactgttactcctacagctaattctgcagggcacagcccagagccatgtggatttgacttacgggagtaaagcgtaactttttactgcatctaatgagggtgttttaagtgacactcagtgtacacagatcccatcctctggctgctaggagagaagtgctgaatgttccgtgtggagatgctcaggaaagttatttgagttaaattgctggctgagagagcttggaagtccttttcataaaaggtacctctttccttttcttattgaattcttagaacttagttaaccctccctgccttttcttaacaaaaaggacttttctaaggactgaagattggcaaaaacgaaaagcttcttcctccaagagcccattgaagaagcccagtgatgagacggtgagatggtttgagtcctcggtgcctgggtagcaggaagaaagacctgcatcctgcatctgtacttggggaagccagcggagaggacggggaggttacttctctaagtttctgcagaaatattgaaggctggagtttggaatccttaaacttggccttctcaaactcagcagcagatctccgggattctgctgttattatccaaaggcgttggaaggaaagatggatcttcttacatgctagaagttttaaacggtccttaacatgcctttgttcaagcaccttccagaatgtaaggttcagcagctctggtttctattacggtgacttgaatgtcagattcaagggcccggcgtcaaaggaaattggttttgactttttgtaatctaggagcgacagttcgtgagatgtttattcagtgttaaagagcctgtttttctaccaaacaataaaaccaagagaagaatcatggtgtgacatgcacttctgtgaatgacttaggagatcatgagcttgggctgct

SEQ ID NO: 187527 - DNA, 1488 bp, Artificial Sequence
  derived and/or modified sequence
atgaataagtcgagatggcagagcaggcggagacacggacgccggtctcaccaacagaatccatggtttcgcctacgtgatagcgaggaccgaagcgattccagagccgcacagcctgctcacgactcaggacatggtgacgacgaatctccctcaacatccagcggtaccgccggaacctcatcagttcccgagcttccgggtttttacttcgacccggaaaagaaaaggtacttccgcctactgccaggacacaataactgcaacccgctaacgaaagagtcaattcgacagaaagaaatggaatcgaagagattaaggctcctgcaggaggaggataggaggaaaaaaatcgccagaatggggtttaacgccagtagcatgttacgcaagtcccagctgggtttcctgaatgttaccaactattgtcatctggcacatgaactcaggctgtcctgtatggagcgcaagaaggtccagattaggagcatggacccctccgccctggctagcgatcgcttcaaccttattctcgccgataccaactctgaccgactcttcaccgtgaatgatgttaaggttggcggctccaaatacggaattattaatctgcagtccctgaagacccctacccttaaggtgtttatgcatgaaaatctttattttacaaatcgaaaggtgaactccgtgtgttgggccagcctgaaccatcttgatagccacatacttctctgcctcatgggtctggccgagactccaggatgtgctaccctcctgcccgcatctttatttgtcaactcccacccaggcatcgaccggccagggatgctctgcagttttcgtattccgggtgcctggtcatgtgcatggtctctcaacattcaggccaacaattgcttctcgaccggcctcagtcgacgtgtcctgttaactaatgtcgttaccggccaccgtcagtcatttgggacaaattccgatgtgctcgcccagcaatttgcccttatggcacctctgctttttaatggatgtcgctcaggagagattttcgccatagatttaagatgtgggaaccaggggaagggctggaaggccacacggctctttcatgattccgccgttacatcagttcgtattttgcaagatgaacagtacctgatggcatctgacatggctggaaaaatcaaactgtgggacctgagaacaaccaaatgcgtgcgacagtacgagggacatgtgaacgaatatgcttacctgccccttcacgttcacgaggaggagggaatacttgtcgccgtgggacaagactgttatacccgaatctggagtcttcacgacgctcggctcctcaggactattccctccccttacccagccagcaaagctgatatcccctcagtggccttcagtagtcggcttggaggcagtaggggcgcacctgggctgttaatggcggtcgggcaggacctctactgttattcgtatagctag

SEQ ID NO: 187528 - DNA, 1488 bp, Artificial Sequence
  derived and/or modified sequence
atgaacaagagccgctggcagagcagaagaagacatggccgccgcagccaccagcagaacccctggttccggctgcgggacagtgaagatagaagtgacagccgggccgcccagcctgcccatgattctggccatggagatgatgagagccccagcaccagcagcggcacagctggcaccagctctgtgcctgagctgcccggcttctactttgatcctgagaagaagcgctacttccggctgctgcccggccacaacaactgcaaccccctgaccaaggagagcatccggcagaaggagatggagagcaagaggctgcggctgctgcaggaggaggacaggaggaagaagatcgccaggatgggcttcaatgccagctccatgctgaggaagagccagctgggcttcctgaatgtgaccaactactgccacctggcccacgagctgcggctgagctgcatggagaggaagaaggtgcagatccgctccatggaccccagcgccctggccagtgaccgcttcaacctgatcctggccgacaccaacagcgacaggctcttcaccgtgaatgatgtgaaggtgggcggcagcaaatatggcatcatcaacctgcagagcctgaagacccccaccctgaaggtgttcatgcatgagaacctgtacttcaccaacaggaaggtgaacagcgtgtgctgggccagcctgaaccacctggacagccacatcctgctgtgcctgatgggcctggccgagaccccaggctgtgccaccctgctgcctgccagcctgtttgtgaacagccaccctggcatcgaccggcccggcatgctgtgcagcttccgcatccctggggcctggagctgtgcctggagcctgaacatccaggccaacaactgcttcagcacaggcctgagccggcgggtgctgctgaccaacgtggtgacaggccaccggcagagctttggcaccaacagtgatgtgctggcccagcagtttgccctgatggcccccctgctcttcaacggctgccgctctggagagatctttgccatcgacctgcgctgtggcaaccagggcaagggctggaaggccaccaggctcttccatgattctgctgtgacctctgtgcgcatcctgcaggatgagcagtacctgatggccagtgacatggccggcaagatcaagctgtgggacctgcggaccaccaagtgtgtgcggcagtatgagggccacgtgaatgaatatgcctacctgcccctgcacgtgcatgaggaggagggcatcctggtggccgtgggccaggactgctacacccgcatctggagcctgcatgatgcccggctgctgcggaccatccccagcccctacccagccagcaaggctgacatccccagcgtggccttcagcagccggctgggcggcagcagaggagcccctggcctgctgatggctgtgggccaggacctgtactgctacagctacagctag

SEQ ID NO: 187529 - DNA, 1488 bp, Artificial Sequence
  derived and/or modified sequence
atgaacaagagccggtggcagagccggcggcggcacggccggcggtctcatcagcagaacccgtggttccgcttaagggactctgaggatcgctctgacagtcgggccgctcagcctgctcacgattcagggcacggggatgatgaatcaccaagcacatcaagcggtaccgcaggtacaagctcggtcccggaactgccaggcttctactttgatccagagaagaaacgctactttcgtctcctgccagggcacaacaactgcaacccactaaccaaggagtccatcaggcaaaaagagatggaaagcaaacggctgaggctgctacaggaggaggataggcggaaaaagatcgcccgaatggggtttaacgcgagcagcatgctgcggaagagccagttagggttcctgaacgtcacaaattactgtcatctggctcatgagctgagactgtcctgtatggagaggaaaaaggtgcagattaggagcatggacccctcagcactggccagcgatcgctttaacctcatcctggccgatacaaattccgataggctttttacagtaaacgacgttaaggtgggaggctcaaaatatgggatcatcaacctgcagagcctgaagacaccaaccctgaaagtgttcatgcatgagaacttgtactttactaaccgaaaggtgaattctgtctgctgggccagcctgaaccacctggacagccacatcttgctgtgcttgatgggcctggcagaaacccccggatgtgctacattactgcctgctagtctctttgttaactcacatccaggcatagaccgtcctggcatgctatgctctttcagaattcccggagcctggtcatgtgcctggagtttaaatattcaggcgaacaattgcttctccacgggactcagcaggagggtactgctgactaatgttgtgacagggcaccgccaatcgtttggtactaatagtgatgtgctggcacagcagtttgctctgatggcccccctcctcttcaatgggtgtaggagcggcgaaatctttgcaatcgacctcaggtgtggcaaccagggaaaaggatggaaggctacccggcttttccatgacagcgccgtgacgtcggtgagaattttgcaagacgaacagtatttaatggcatcagatatggccgggaagatcaagctgtgggatttacgcacaactaagtgtgtccggcaatacgaaggacatgtcaacgaatacgcttacctgcccctgcacgtgcacgaagaagagggtatcctggtcgcggtggggcaggactgttatactcggatttggagtctacatgacgcacgactcctccggacaattccaagtccatacccagctagcaaagccgacatccccagcgtagcattttcatccagacttggtggatcgcgcggtgccccaggattgctcatggccgtcggccaggacctctattgttacagctattcttag

SEQ ID NO: 187530 - DNA, 1488 bp, Artificial Sequence
  derived and/or modified sequence
atgaataagtcccgatggcaatcaaggaggcggcatggaaggcgctcccaccagcagaatccatggttcaggctgcgggactcggaggatagaagtgacagtcgcgcagcccagcccgctcatgattcagggcacggtgacgacgaatccccttccacgagttcaggaactgcgggtacatctagcgtccccgaactccctggcttttattttgaccctgagaagaaacgttactttcgattactgccaggccataacaattgtaaccccctcacaaaggagtctatccgtcaaaaggagatggaatcgaagcggctgcgtctgctgcaggaagaagatcgcagaaagaaaatcgcccgaatgggcttcaacgctagcagcatgctcagaaagtcacagctgggatttttaaatgtgaccaattattgtcacttggcacatgagctcaggctctcttgcatggagcggaagaaggttcagatcaggtctatggacccgtccgcactggcatccgatagatttaacctgatcctcgcggacactaatagcgataggcttttcacagtgaacgacgtcaaggttggcggtagcaagtacggcatcattaacctgcaatcactgaagacccccactctcaaagtgttcatgcacgagaacctgtatttcacaaacaggaaggttaattctgtgtgctgggcaagcctgaatcacttggattctcatatcctactgtgtctcatgggtctggctgaaactcctggctgcgctactctcctccccgcttcactctttgttaacagccaccccggtattgatcggcctgggatgctgtgtagtttccgaatacccggagcctggtcttgcgcttggtccctgaacattcaggcaaataattgcttctcaaccggactaagtcgacgagttctgttaacaaatgttgtcactgggcacaggcagtctttcggcactaattcggacgttttggcacagcagtttgccctcatggcaccactcctgtttaacgggtgtagatcaggagaaatcttcgccatagatctgcgatgcggcaaccagggtaaaggctggaaggccacacggctatttcatgattccgcggtgacaagcgtcagaatattacaagacgaacagtacctgatggctagcgatatggccggaaagatcaaattatgggacttgaggactaccaaatgcgttcgccagtacgaaggtcatgtgaacgagtatgcttatctgcctcttcacgtgcacgaggaagagggaatccttgtcgctgttggccaggactgctatactcggatatggagtctccacgacgctcgactgctacggacaatccccagcccctatcccgcttccaaggcagatattcctagtgtggcattcagctctcgcctgggcggatcccggggtgcaccaggcttactcatggccgttggccaggatctgtattgctactcatactcttag

SEQ ID NO: 187531 - protein, 223 aa, Artificial Sequence
  derived and/or modified sequence
MLKNKQPTPVNIRASMQQQQQLASARNRRLAQQMENRPSVQAALKLKQSLKQRLGKSNIQARLGRPIGALARGAIGGRGLPIIQRGLPRGGLRGGRATRTLLRGGMSLRGQNLLRGGRAVAPRMGLRRGGVRGRGGPGRGGLGRGAMGRGGIGGRGRGMIGRGRGGFGGRGRGRGRGRGALARPVLTKEQLDNQLDAYMSKTKGHLDAELDAYMAQTDPETND

SEQ ID NO: 187532 - protein, 248 aa, Artificial Sequence
  derived and/or modified sequence
MAAQSAPKVVLKSTTKMSLNERFTNMLKNKQPTPVNIRASMQQQQQLASARNRRLAQQMENRPSVQAALKLKQSLKQRLGKSNIQARLGRPIGALARGAIGGRGLPIIQRGLPRGGLRGGRATRTLLRGGMSLRGQNLLRGGRAVAPRMGLRRGGVRGRGGPGRGGLGRGAMGRGGIGGRGRGMIGRGRGGFGGRGRGRGRGRGALARPVLTKEQLDNQLDAYMSKTKGHLDAELDAYMAQTDPETND

SEQ ID NO: 187533 - DNA, 672 bp, Artificial Sequence
  derived and/or modified sequence
atgcttaaaaataagcagcccacgcccgtgaatattagggccagcatgcagcagcagcagcagctggcctcggcacgaaacagaaggctcgctcaacagatggagaacagaccctcagtccaggctgccttgaagctcaagcagagcctgaaacagcgcttggggaaatccaatatccaggctcgactaggtcgccctatcggagcccttgctaggggcgccataggaggtcgaggactgcctattattcagaggggactgcccaggggcggcctgcggggggggagggccacccgaactctcctgcgaggtggcatgtctctgagaggacagaatctcctaaggggcggccgagcagtggccccaaggatggggctacggagaggcggcgtgcgtggacgcggtgggccgggcagaggcggcctgggcagaggcgccatggggcgtgggggaatcggtggccgcggacgaggcatgattggcaggggtaggggcggctttgggggcaggggcagggggagaggcagaggccgtggggcccttgccaggcctgttttgacaaaggagcagctggataaccagttggacgcatatatgtccaaaacaaagggccacttggacgccgagctggatgcatatatggctcagactgaccccgagacaaatgattag

SEQ ID NO: 187534 - DNA, 747 bp, Artificial Sequence
  derived and/or modified sequence
atggctgctcagtcagcacctaaggttgtgctgaagagcaccaccaagatgagcctgaacgaacgctttaccaatatgttaaagaacaaacagcctactcctgtgaatatccgggctagcatgcagcagcagcagcagctcgcgtctgcaagaaaccggcggttggcccaacagatggaaaataggccgtccgtccaagccgcattaaagctgaaacagtcacttaaacagcgcttaggtaagtctaacattcaggcaagacttgggaggccaatcggtgccctcgcaagaggggccattgggggtcgcggcctgccaatcatccagcgtggactgcctcgaggcggcctcaggggggggagagcaactcggaccctgctccgaggtggaatgtccctcagaggccaaaatctgctgcgtggtggccgtgccgtggcccctcgaatgggcctgagaaggggcggagtaaggggcaggggcggccccggccggggtgggctagggaggggggccatgggccgagggggtattggagggagagggaggggcatgatcggccggggcagaggtggcttcggcggccgcggtcgcggccgggggagggggagaggggccctcgccaggcctgtcctgactaaagagcagctggataaccagttggacgcttacatgagcaagacaaaggggcatctggacgcagaacttgacgcctatatggcccagacggaccccgagaccaatgactag

SEQ ID NO: 187535 - DNA, 672 bp, Artificial Sequence
  derived and/or modified sequence
atgctgaagaacaagcagcccacccctgtgaacatccgggcctccatgcagcagcagcagcagctggccagcgccaggaacagaaggctggcccagcagatggagaaccggcccagcgtgcaggccgccctgaagctgaagcagagcctgaagcagaggctgggcaagagcaacatccaggcccggctgggccggcccatcggggccctggcccggggggccatcggcggccggggcctgcccatcatccagaggggcctgccccggggcggcctgcggggcggccgggccaccaggaccctgctgcggggcggcatgagcctgcggggccagaacctgctgcggggcggccgggctgtggcccccaggatgggcctgcggcggggcggcgtgcggggccggggcggccctggccggggcggcctgggccgcggggccatgggccggggcggcatcggcggccggggccggggcatgattggccggggccggggcggctttggaggccggggccggggccggggccggggccgcggggccctggcccggcctgtgctgaccaaggagcagctggacaaccagctggatgcctacatgagcaagaccaagggccacctggatgctgagctggatgcctacatggcccagacagatcctgagaccaatgactag

SEQ ID NO: 187536 - DNA, 747 bp, Artificial Sequence
  derived and/or modified sequence
atggccgcccagagcgcccccaaggtggtgctgaagagcaccaccaagatgagcctgaatgaacgcttcaccaacatgctgaagaacaagcagcccacccctgtgaacatccgggcctccatgcagcagcagcagcagctggccagcgccaggaacagaaggctggcccagcagatggagaaccggcccagcgtgcaggccgccctgaagctgaagcagagcctgaagcagaggctgggcaagagcaacatccaggcccggctgggccggcccatcggggccctggcccggggggccatcggcggccggggcctgcccatcatccagaggggcctgccccggggcggcctgcggggcggccgggccaccaggaccctgctgcggggcggcatgagcctgcggggccagaacctgctgcggggcggccgggctgtggcccccaggatgggcctgcggcggggcggcgtgcggggccggggcggccctggccggggcggcctgggccgcggggccatgggccggggcggcattggaggccggggccggggcatgattggccggggccggggcggctttggaggccggggccggggccggggccggggccgcggggccctggcccggcctgtgctgaccaaggagcagctggacaaccagctggatgcctacatgagcaagaccaagggccacctggatgctgagctggatgcctacatggcccagacagatcctgagaccaatgactag

SEQ ID NO: 187537 - DNA, 672 bp, Artificial Sequence
  derived and/or modified sequence
atgctgaagaacaagcagcccacccccgtgaacatccgggccagcatgcaacagcagcaacaactggccagtgctcgcaaccgccgcctagcccagcagatggagaaccgtcccagcgtgcaggcagctctcaaactgaaacaatccctgaagcagcgacttggcaaaagtaatatccaggctcgactcggacgccctataggagccttggcacgcggcgctatcggaggccgggggttgccaatcattcagcggggactccctcgcggcggtttaagagggggccgcgccacaagaaccttattacggggcgggatgagcctgcgggggcagaatctcttaagaggagggagagccgtagctccccgaatgggacttcgtagggggggtgtgcgcgggcgtggaggccccggaagaggtgggttgggccgcggtgccatgggaaggggaggcatcggggggcgcggcagagggatgatcggacggggcaggggcgggtttggcggccgtggccgagggagaggaagaggtaggggcgccctcgcacgcccagtcctcacaaaagagcagttagataaccaattggacgcatacatgtcaaaaacaaagggacaccttgacgcagagttagacgcttatatggcccagacagacccagagaccaacgactag

SEQ ID NO: 187538 - DNA, 747 bp, Artificial Sequence
  derived and/or modified sequence
atggccgcccagagcgcccccaaggtggtgctgaagagcaccaccaaaatgtctctgaacgaaagattcaccaatatgctgaaaaacaagcagcctacaccagtgaacatccgcgcctctatgcagcagcagcagcagctagccagtgccaggaacaggcgactggcgcagcagatggaaaatcggccaagcgtgcaggccgccctcaagttaaagcaatccctaaagcagcggcttggtaagtccaatatccaagctagactggggagaccgatcggagcactggcccgaggtgccattgggggaaggggcctgcccataatccagcgtggtctgccacgcggaggattgcggggaggccgggctactagaacgctccttagaggagggatgtcgttgagaggacaaaacttactaaggggcggtcgtgcagtggccccacgaatgggtttacgtcgaggcggagtccgagggcggggcggaccaggtaggggaggtctcggacgaggggccatgggacgggggggaattggagggaggggcaggggaatgatagggcggggccggggaggctttggcgggcggggacgaggacgtgggagaggccggggggccctcgcacggcccgtgttaacgaaagagcagctggacaaccagcttgacgcctacatgtccaagaccaaaggacatctggatgccgaactggatgcttatatggcacagacagatcctgagacgaatgattag

SEQ ID NO: 187539 - DNA, 672 bp, Artificial Sequence
  derived and/or modified sequence
atgctcaagaacaagcagcctacaccagtgaatataagagcttcaatgcaacagcaacaacagctggcttctgcgaggaacaggcggctagcccagcagatggagaaccggcctagcgtgcaagcggcattgaaactgaagcagagtttaaagcagaggctcggcaaaagtaacatacaagcaaggttaggcaggcctattggcgctctggctcgaggggcaatcgggggaagagggctcccaataattcaacgcggattaccccgaggtgggttaagaggcggtcgtgcgacacggacccttctgcgtggagggatgtctcttcgagggcagaacctgctacgcggaggacgcgcagtggctccaagaatggggcttcgccgtggtggggttcgaggcagaggagggcctggaagggggggactgggacgtggggctatggggagggggggaatcggcggaagaggcagggggatgatcgggagaggcagaggcggattcggcggaagaggcaggggtcggggtcggggtagaggtgccttagcccgtcccgtgttgaccaaggaacagctcgataatcagctcgatgcctatatgagcaagaccaagggccacctcgatgcagagttagacgcatatatggcacagacagaccctgaaacaaacgactag

SEQ ID NO: 187540 - DNA, 747 bp, Artificial Sequence
  derived and/or modified sequence
atggccgcacagtcagcacctaaggtggtgctgaagtctacaaccaaaatgagcctgaatgagcgcttcacgaatatgttaaagaacaagcagcctacgcctgtcaacataagagcaagtatgcagcagcagcagcagttggcctccgcacgtaaccggagactggctcagcaaatggaaaaccgacccagtgtgcaggcggcacttaagctgaagcaatccctgaagcagaggctgggaaaatcgaacattcaggcacggctcggaaggccaatcggagctctcgccagaggggcaatcgggggtaggggtctccctatcatccagcggggtctgccaagaggtggactccggggtgggagggctactaggactttgcttagaggcggtatgtcactgaggggacaaaatttgctgcggggaggtagagctgtcgctccacggatgggattgagacggggaggagtgcggggtagggggggaccaggaagaggcggattgggcagaggggctatggggaggggcggaattggaggaaggggccgtggcatgatcggtcgaggcagaggaggatttggcggtcgagggcgtggtaggggtcggggaagaggagccctagctcggcctgtgctaacgaaagaacaactagacaatcagctggacgcgtacatgtccaagacgaaggggcatctggatgctgagttggatgcgtacatggctcaaacagaccccgaaacgaatgactag

SEQ ID NO: 187541 - DNA, 1094 bp, Artificial Sequence
  derived and/or modified sequence
gtgctgcacttagctgcatttctaagtttctgattcttgcaagtttgtggaaacagaggagtctttaacccacatcagccttgatctaagtgtaccactttacttaaaagttcgtgggatctggagctcctggtctagcaagccatgaaaatgccaataaatgtttgtaataaagcttttatttaaacatccattttgttcgaccttgaagctttactaatatgctgaagaacaaacagccgacgccagtgaatattcgggcttcgatgcagcaacaacagcagctagccagtgccagaaacagaagactggcccagcagatggagaatagaccctctgtccaggcagcattaaaacttaagcagagcttaaagcagcgcctgggtaagagtaacatccaggcacggttaggccgacccataggggccctggccaggggagcaatcggaggacgaggcctacccataatccagagaggcttgcccagaggaggactacgtgggggacgtgccaccagaaccctacttaggggcgggatgtcactccgaggtcaaaacctgctccgaggtggacgagccgtagctccccgaatgggcttaagaagaggtggtgttcgaggtcgtggaggtcctgggagagggggcctagggcgtggagctatgggtcgtggcggaatcggtggtagaggtcggggtatgataggtcggggaagagggggctttggaggccgaggccgaggccgtggacgagggagaggtgcccttgctcgccctgtattgaccaaggagcagctggacaaccaattggatgcatatatgtcgaaaacaaaaggacacctggatgctgagttggatgcctacatggcgcagacagatcccgaaaccaatgattgaagcctgcccatcctcccatgagagactcttgttagtcaacacatctgtaaataaccttgagataacagatgagaagaaatctgattgatgctggatggacctatcacaataggctgtggacttacttgccaccagcttgtgcatttagtgtgttccttttactttttgatactgtgttgtatgaaacccttttgtcctttg

SEQ ID NO: 187542 - DNA, 2096 bp, Artificial Sequence
  derived and/or modified sequence
tcagacaagcactggacgtggcggccattttgttttggacaccgagcaggagctggcggccgctgcagacgaaaggcaggaaagggcaggccgggtgagcagacggatcggccgactagacagccaaccagcaacaacgaactgagctcgcatactaccgcttacgcatctaaccaaccgcccatctagctaacccgagcccctccaccgtcaactcaggttcggccggtccccggcccgcctgccggagccgtggtggcagccccgggaggagcactggcgtctgtttccttcgattctcgggattcgaagatggctgcacagtcagcgccgaaagttgtgctaaaaagcaccaccaagatgtctctaaatgagcgctttactaatatgctgaagaacaaacagccgacgccagtgaatattcgggcttcgatgcagcaacaacagcagctagccagtgccagaaacagaagactggcccagcagatggagaatagaccctctgtccaggcagcattaaaacttaagcagagcttaaagcagcgcctgggtaagagtaacatccaggcacggttaggccgacccataggggccctggccaggggagcaatcggaggacgaggcctacccataatccagagaggcttgcccagaggaggactacgtgggggacgtgccaccagaaccctacttaggggcgggatgtcactccgaggtcaaaacctgctccgaggtggacgagccgtagctccccgaatgggcttaagaagaggtggtgttcgaggtcgtggaggtcctgggagagggggcctagggcgtggagctatgggtcgtggcggaatcggtggtagaggtcggggtatgataggtcggggaagagggggctttggaggccgaggccgaggccgtggacgagggagaggtgcccttgctcgccctgtattgaccaaggagcagctggacaaccaattggatgcatatatgtcgaaaacaaaaggacacctggatgctgagttggatgcctacatggcgcagacagatcccgaaaccaatgattgaagcctgcccatcctcccatgagagactcttgttagtcaacacatctgtaaataaccttgagataacagatgagaagaaatctgattgatgctggatggacctatcacaataggctgtggacttacttgccaccagcttgtgcatttagtgtgttccttttactttttgatactgtgttgtatgaaacccttttgtcctttgatttggttttttgtttttgtttttttaggggggagggggggtttcccctcctttgcccagacttctctttgaacacaaatgcattagccttgtggctagaacaccctcttcctacctctgtctcccctcacttgtcatatgctctgacatgctaacatttcttttgttcatccctgttgcccccacagaaacatcccagaaaaaccggtcagtgttccttcctccctgatccttaggtttctgaaatagggttctgttacatcctcttcgatagcctgtttaaaatgtttagaaggtctggagctcaaaaatgcgttcttccacattgataatttagtaaactgagaacattgacatcactacagggcagcataagaggttgcttacatgtggtagcagctctggtttgattcaagttgctaccatgtacattgacagcacatataccataaccagcgtgttgggttgaattgcactttctacctttgtatgagatttacagactttccttctgggtttgtatcatgaccagaggggtactatagggttggtttatactgcaatatagaggatcagaagccatttgatttggtaggtgtgtcagaagggagaatgatggcagacgaactgctggaagaggtcagaagatagccatgctaaaatgcaattatatcctcatgtttatcccaaactaatcttggacttttccactcattagctttgttttgcccttgtttcccttgaaggtttaagttcaaccatattctgtcaactgttcagtttcagtggaatcttgtatttctggttcattataacaaactgttcgcttaaatcca

SEQ ID NO: 187543 - DNA, 672 bp, Artificial Sequence
  derived and/or modified sequence
atgctgaagaacaagcagcccacccccgtgaacatcagagccagcatgcagcagcagcagcagctggccagcgccagaaacagaagactggcccagcagatggagaacagacccagcgtgcaggccgccctgaagctgaagcagagcctgaagcagagactgggcaagagcaacatccaggccagactgggcagacccatcggcgccctggccagaggcgccatcggcggcagaggcctgcccatcatccagagaggcctgcccagaggcggcctgagaggcggcagagccaccagaaccctgctgagaggcggcatgagcctgagaggccagaacctgctgagaggcggcagagccgtggcccccagaatgggcctgagaagaggcggcgtgagaggcagaggcggccccggcagaggcggcctgggcagaggcgccatgggcagaggcggcatcggcggcagaggcagaggcatgatcggcagaggcagaggcggcttcggcggcagaggcagaggcagaggcagaggcagaggcgccctggccagacccgtgctgaccaaggagcagctggacaaccagctggacgcctacatgagcaagaccaagggccacctggacgccgagctggacgcctacatggcccagaccgaccccgagaccaacgactag

SEQ ID NO: 187544 - DNA, 747 bp, Artificial Sequence
  derived and/or modified sequence
atggccgcccagagcgcccccaaggtggtgctgaagagcaccaccaagatgagcctgaacgagagattcaccaacatgctgaagaacaagcagcccacccccgtgaacatcagagccagcatgcagcagcagcagcagctggccagcgccagaaacagaagactggcccagcagatggagaacagacccagcgtgcaggccgccctgaagctgaagcagagcctgaagcagagactgggcaagagcaacatccaggccagactgggcagacccatcggcgccctggccagaggcgccatcggcggcagaggcctgcccatcatccagagaggcctgcccagaggcggcctgagaggcggcagagccaccagaaccctgctgagaggcggcatgagcctgagaggccagaacctgctgagaggcggcagagccgtggcccccagaatgggcctgagaagaggcggcgtgagaggcagaggcggccccggcagaggcggcctgggcagaggcgccatgggcagaggcggcatcggcggcagaggcagaggcatgatcggcagaggcagaggcggcttcggcggcagaggcagaggcagaggcagaggcagaggcgccctggccagacccgtgctgaccaaggagcagctggacaaccagctggacgcctacatgagcaagaccaagggccacctggacgccgagctggacgcctacatggcccagaccgaccccgagaccaacgactag

SEQ ID NO: 187545 - protein, 454 aa, Artificial Sequence
  derived and/or modified sequence
MNLASQSGEAGAGQLLFANFNQDNTEVKGASRAAGLGRRAVVWSLAVGSKSGYKFFSLSSVDKLEQIYECTDTEDVCIVERLFSSSLVAIVSLKAPRKLKVCHFKKGTEICNYSYSNTILAVKLNRQRLIVCLEESLYIHNIRDMKVLHTIRETPPNPAGLCALSINNDNCYLAYPGSATIGEVQVFDTINLRAANMIPAHDSPLAALAFDASGTKLATASEKGTVIRVFSIPEGQKLFEFRRGVKRCVSICSLAFSMDGMFLSASSNTETVHIFKLETVKEKPPEEPTTWTGYFGKVLMASTSYLPSQVTEMFNQGRAFATVRLPFCGHKNICSLATIQKIPRLLVGAADGYLYMYNLDPQEGGECALMKQHRLDGSLETTNEILDSASHDCPLVTQTYGAAAGKGTYVPSSPTRLAYTDDLGAVGGACLEDEASALRLDEDSEHPPMILRTD

SEQ ID NO: 187546 - DNA, 1365 bp, Artificial Sequence
  derived and/or modified sequence
atgaacctggccagccagagcggcgaggccggcgccggccagctgctgttcgccaacttcaaccaggacaacaccgaggtgaagggcgccagcagagccgccggcctgggcagaagagccgtggtgtggagcctggccgtgggcagcaagagcggctacaagttcttcagcctgagcagcgtggacaagctggagcagatctacgagtgcaccgacaccgaggacgtgtgcatcgtggagagactgttcagcagcagcctggtggccatcgtgagcctgaaggcccccagaaagctgaaggtgtgccacttcaagaagggcaccgagatctgcaactacagctacagcaacaccatcctggccgtgaagctgaacagacagagactgatcgtgtgcctggaggagagcctgtacatccacaacatcagagacatgaaggtgctgcacaccatcagagagaccccccccaaccccgccggcctgtgcgccctgagcatcaacaacgacaactgctacctggcctaccccggcagcgccaccatcggcgaggtgcaggtgttcgacaccatcaacctgagagccgccaacatgatccccgcccacgacagccccctggccgccctggccttcgacgccagcggcaccaagctggccaccgccagcgagaagggcaccgtgatcagagtgttcagcatccccgagggccagaagctgttcgagttcagaagaggcgtgaagagatgcgtgagcatctgcagcctggccttcagcatggacggcatgttcctgagcgccagcagcaacaccgagaccgtgcacatcttcaagctggagaccgtgaaggagaagccccccgaggagcccaccacctggaccggctacttcggcaaggtgctgatggccagcaccagctacctgcccagccaggtgaccgagatgttcaaccagggcagagccttcgccaccgtgagactgcccttctgcggccacaagaacatctgcagcctggccaccatccagaagatccccagactgctggtgggcgccgccgacggctacctgtacatgtacaacctggacccccaggagggcggcgagtgcgccctgatgaagcagcacagactggacggcagcctggagaccaccaacgagatcctggacagcgccagccacgactgccccctggtgacccagacctacggcgccgccgccggcaagggcacctacgtgcccagcagccccaccagactggcctacaccgacgacctgggcgccgtgggcggcgcctgcctggaggacgaggccagcgccctgagactggacgaggacagcgagcacccccccatgatcctgagaaccgactag

SEQ ID NO: 187547 - DNA, 1365 bp, Artificial Sequence
  derived and/or modified sequence
atgaacctcgcctctcagtctggtgaggcaggagccggtcaactcctctttgctaatttcaaccaggacaacacggaagtcaaaggcgccagtcgcgcggctggtcttggcagacgagctgtggtgtggagcttagcagttggctccaaatcaggctataaatttttcagcctgagttctgtggacaaactcgagcagatttatgaatgcacagacaccgaggacgtctgcatagtggaaagactgttctccagctccctggtagcaattgtctctttgaaggctccaagaaaattaaaggtgtgccacttcaaaaaaggtacagaaatttgtaattacagctacagtaacacaatccttgccgttaagctaaatcggcagcggctgatcgtctgcttggaggagtcactctatattcacaatataagggacatgaaggtgctgcatacgatccgggaaacccctcctaatcccgccgggctgtgtgccctgtccatcaacaacgacaattgttatctggcctatcccggctcagccacgataggagaagtacaggtctttgatactatcaatctacgcgcagcaaatatgatacccgcgcatgatagtcctctggccgctctggccttcgacgcatccggaacgaagttagctaccgcgagcgagaagggaaccgtgattagagtgttttccatcccagaaggacagaagctgtttgaattcagaagaggtgtcaaaagatgcgtatccatttgtagtctggcttttagcatggatggaatgttcctgtccgctagttcaaatacagaaacagtgcacatttttaaactagaaacagtgaaggagaaacctcctgaagagcccacaacgtggaccggctacttcggaaaggttctgatggctagtacctcctacctgccgtcacaagtcactgaaatgttcaatcagggccgtgcctttgctacagtacgcttgccattctgtggacacaagaatatctgttctctggctaccattcagaaaattcctaggctgttagtgggtgccgcggacggttatctctatatgtataatctcgatcctcaggaaggcggggagtgtgcgctgatgaaacagcacaggcttgatggctcactagagactacaaatgaaattctggattccgcttcccacgattgccctttggtgacccagacctatggagccgccgccggtaaaggtacgtacgtaccttcttcacccaccagattagcatacaccgatgatttgggcgctgtcggaggggcctgcctggaggacgaagccagcgcccttaggctggatgaagatagtgagcatcctcccatgattttgcgaaccgactag

SEQ ID NO: 187548 - DNA, 1365 bp, Artificial Sequence
  derived and/or modified sequence
atgaacctggccagccagagcggggaggccggggccggccagctgctgtttgccaacttcaaccaggacaacacagaggtgaagggggccagcagagctgctggcctgggccggcgggctgtggtgtggagcctggccgtgggcagcaagagcggctacaagttcttcagcctgagctctgtggacaagctggagcagatctatgaatgtacagacacagaagatgtgtgcatcgtggagcggctcttcagcagcagcctggtggccatcgtgtccctgaaggcccccaggaagctgaaggtgtgccacttcaagaagggcacagagatctgcaactacagctacagcaacaccatcctggccgtgaagctgaaccggcagaggctcatcgtgtgcctggaggagagcctgtacatccacaacatccgggacatgaaggtgctgcacaccatccgggagaccccacccaacccagctggcctgtgtgccctgagcatcaacaatgacaactgctacctggcctacccaggcagcgccaccatcggggaggtgcaggtgtttgacaccatcaacctgcgggccgccaacatgatcccagcccatgacagccccctggccgccctggcctttgatgccagcggcaccaagctggccacagccagcgagaagggcaccgtcatccgggtcttcagcatccctgagggccagaagctgtttgagttccggcggggcgtgaagagatgtgtgtccatctgcagcctggccttctccatggatggcatgttcctgagcgccagcagcaacacagaaacagtgcacatcttcaagctggagaccgtgaaggagaagcccccagaggagcccaccacctggacaggctactttgggaaggtgctgatggccagcaccagctacctgcccagccaggtgacagagatgttcaaccagggccgggcctttgccaccgtgcggctgcccttctgtggccacaagaacatctgcagcctggccaccatccagaagatcccccggctgctggtgggcgctgctgatggctacctgtacatgtacaacctggacccccaggagggcggggagtgtgccctgatgaagcagcaccggctggatggcagcctggagaccaccaatgagatcctggacagcgccagccatgactgccccctggtgacccagacctacggggctgctgctgggaagggcacctacgtgcccagcagccccacccggctggcctacacagatgacctgggcgctgtgggcggggcctgcctggaggatgaggccagcgccctgcggctggatgaggacagcgagcacccccccatgatcctgaggacagactag

SEQ ID NO: 187549 - DNA, 1365 bp, Artificial Sequence
  derived and/or modified sequence
atgaacctggccagccagagcggcgaggccggcgccggccagctgcttttcgccaatttcaatcaggacaacactgaggtcaaaggggctagcagggcggccggcctcggaagaagggcagttgtctggtccctggcggtaggctccaagtccggatataaatttttctcattgtcctccgttgacaaactcgaacagatatacgagtgtaccgacactgaggatgtatgcatcgtggaacgactcttctcatcgtccctggtcgccatcgtgtctctcaaagcgccaaggaaactgaaagtgtgtcactttaaaaagggaacagaaatttgcaattatagctacagcaacacgatcttggctgttaaattgaaccgacagcgattgattgtgtgcctcgaagaatctctctacattcataacatccgtgatatgaaagtactccacacaattcgggagacaccccctaaccccgccgggctgtgcgcactaagcatcaacaacgacaactgttaccttgcctatccgggttccgccaccattggcgaggtccaggtttttgatacaattaatctgagggccgctaacatgatccctgcccacgactcccctctggctgctcttgcctttgacgcttccgggacaaagctcgctacagctagcgaaaagggtaccgtcattagagtgttctcaatcccagaaggccagaaattgtttgagttccggagaggcgtgaagcggtgcgtgagcatctgttctctggcctttagtatggacggtatgttcttgagtgcttcctccaataccgagacggtgcatatcttcaagctggagactgttaaggagaagccccccgaggagcccacgacctggactggttattttgggaaggttctgatggcttctacgtcctacctgcccagccaggtgaccgagatgttcaatcaggggcgggcattcgctaccgtccgcttgcccttttgcggtcataaaaatatttgctccctggcgactattcagaaaatacccagactgttggtcggagctgctgatgggtacctgtacatgtacaacctggatcctcaagaaggcggcgaatgcgcgctgatgaagcaacatcgacttgacggctccttagaaacaacaaatgagatcctggattcagcctcccacgattgccccctggttacccaaacctatggcgcggccgcgggcaaaggcacctacgtccctagctctccaacccgactggcctataccgatgatttgggggctgtagggggagcctgcttggaagacgaggccagcgcacttcgtctggacgaagattccgaacatcctccaatgattctgcgcaccgattag

SEQ ID NO: 187550 - DNA, 1365 bp, Artificial Sequence
  derived and/or modified sequence
atgaatctcgcaagccagtccggcgaggccggtgccggtcagctgctctttgccaactttaaccaggacaacactgaggtgaagggtgcttctcgtgcggcaggcctagggcgaagggcggtcgtttggtcactggcggtggggagcaagagcgggtataagtttttctccctgtcttctgtggataaacttgagcagatctatgagtgtacagacactgaagatgtgtgtatagtggagcgcctgttctcctcaagccttgtcgcgattgtctccctcaaagcacctcgcaagctgaaggtttgccacttcaaaaaaggtactgagatctgcaattactcgtattctaatactatcttagcggtcaaactgaaccgacagagattgatcgtatgcttagaggaatcactctacatccacaacatacgagatatgaaggtgctccacacaatcagagagactccgccaaatcctgctggcctgtgcgcgctgagtatcaacaacgataattgttacttggcatatcccggttcagccaccatcggcgaagtgcaagtgtttgatacaatcaacttacgagccgctaacatgatacctgctcacgatagtcccctggctgcgctggcttttgacgcatctggtacaaagttggccacggcttcggagaaggggaccgtgatccgggtcttttctattcccgaagggcagaagctcttcgagtttcgaaggggcgtcaaacgctgcgtgagcatctgctcactcgctttcagtatggacgggatgtttctcagcgcctcttccaacacagaaactgtgcacatcttcaaacttgaaaccgtgaaagagaaaccccctgaggagccaactacgtggacagggtattttgggaaggtcctgatggcatccacttcttacctgccatcacaagttacggagatgttcaaccaggggagagcatttgcaaccgttcgcctcccattttgtgggcataagaacatctgctctctagctactatccagaagatccccagattgctcgtgggagctgccgacggatacctgtatatgtacaatcttgacccacaggagggtggggaatgtgctctgatgaagcagcatcggctggatgggagtctcgagacgactaacgaaatactcgatagtgcatcccacgactgccccttagtcacacagacttacggcgctgccgcagggaagggcacctatgtgccatcttctcctaccagactcgcatacacagacgacctgggcgctgtgggaggcgcatgcctcgaagacgaagcctccgcgctgcgactggacgaagattccgagcatccacccatgatcctgcggaccgattag

SEQ ID NO: 187551 - DNA, 4476 bp, Artificial Sequence
  derived and/or modified sequence
tgcgccgctcgaggccgtgcgtcgcgggggcggggccgcgcaggcgtaccgggtgccccggctctggagcataaacaagagcggggacgggatgaggcggcggttgatcccagggtggcgagtggcggcgaccgaggcggcgagcggggcccggcgccgaccctgagtgcagcctgacccgccctcgcgcgcgcgccctccccggccgggcccactcgccgcgcgcccagccatgaacctggcgagccagagcggggaggccggcgccggccagctgctcttcgccaacttcaaccaggacaacacagaagtgaaaggggcatcaagagcagctggtcttggccgtcgcgctgttgtctggtccctagctgttggtagtaagtccggttataaatttttctccctttcttctgtggataagctggaacagatctatgaatgcaccgatacggaagatgtgtgcattgtagagagattgttctccagcagcctagtggccatcgtcagccttaaagcaccaaggaagctaaaggtttgccactttaagaagggaactgagatctgcaactacagctactccaacacgattctggctgtgaagctcaacaggcagaggctgatagtatgcctggaggagtccctgtacatccacaacattcgggacatgaaggtgctgcatacgatcagggagacgcctccaaaccctgcaggcctgtgtgcgctgtcaatcaacaacgacaactgctacttggcgtacccagggagcgcgaccatcggagaggtgcaggtcttcgataccattaatttgagagctgcaaacatgattccggctcacgacagtcctttagcggcactggcctttgacgcaagtggaactaaacttgccacggcttcggagaaggggaccgtgattagggtattttccattccagaaggacaaaaactctttgagtttcggagaggagtaaagaggtgcgtgagcatctgctccctggccttcagcatggacggcatgttcctctccgcctccagcaacactgagaccgtgcacatcttcaaactcgagactgtgaaagaaaaacccccagaggagcccaccacctggaccgggtacttcgggaaagtgctcatggcctccaccagctacctgccttcccaagtgacagaaatgttcaaccagggcagagccttcgccacggtccgcctgccattctgcggccacaaaaacatctgctcgctagccacaattcagaagatcccgcggttgttggtgggtgccgccgacgggtacctgtacatgtacaacctggacccccaggagggcggcgagtgtgccctgatgaagcagcaccggctggacggcagtctggaaacgaccaatgagatcttggactctgcctctcacgactgccccttagtcactcagacatacggcgcagctgcaggaaaaggtacttacgtgccttcatccccaacgagacttgcctacacagacgacctgggtgctgtgggtggcgcctgcctggaggacgaggccagcgccctgcgcctggatgaggacagcgagcacccgcccatgattcttcggactgactgaacttgacctgtgacctctgacccggggagcagagaacactggcttcacagaggactttgtgcattgctgctatgaactttgacctgagtcgggggagaggatggcagagactttattaaaaaaaaaaaaagattgtagtggtagtctaactccataacgctgaggaaatacatcattttcacttcagtggcttttaaatcctgcttatgaattttagctttttgtttgtttgttttctctttttgccaaaattaactgtttggtgaagcccgcaaaacctcctcgctttgcatgcatgaacgtgccaagccagcataggggagctagaagccactttccagccacctgccgttgggttttttcatatctgtacataatgccgagtgcgtaaggaaaccgtggcgtcgcgcacagtgggtctgcttgtcaaggccagttctgcagtgacaggcccaggggctgcccaccaggtgtgctgggcagacttcagctgggacagaagtccgatctccctagggccccacctggaccattttccctccgttttattttgttaattaaattctttccaaattggatcgctctgggatttcttccatggtggacttttgtttctgatcttgttttccctgtggatattggaggacagcgaggttctttctgatactaaaaacctttctttcaggcagcaaatgaacttgaaaggttgcctggactcgctggagcaaaggaaagcgattttgtttgtataattaaatgatctgttcttctacttcactcttcctgttgaaaaactgtgtgatttttttttttttttaagtaaagtttgtagctcctcccatgcccaggaaagcacagaactcaagtgtggtggccgtctgagctgtcctttcgctggccccgctgtccgcaggggcttcctacctgtgtgagaggtcgtagcgggagacagcaacagagagtaggcggctgggccacgtccttcacagggcgtcatgtgcctttctattttcatcttagaaaatttcctcagcaaaccgatgagagattgtggttgcaagcttcagtatttgcctcgcttcccttcccttttcatatttacagaattaaaacaacctcaagtacctcagactctgcattccaaaccaaggcacccagcagccaaagtgtcgagggcatttaagtggcattaatggcaggagagatggttttagaatctatggagtggtggaagttacggatagaagggaaaaggcaaaaactatttaccctgcctttgcaggctggggtttttgaaccgaggaaggctgggacgcctgtttccagatggttgtcatggtcacgctgggcgaagagctggaggggagttgtcccctcagctgagcggctgcggtgaaatgccccagtgttcctgggttggctttacggcaaactaaatgcaggggacgctggagtccgactcacctacaccggcttcctcccagccgctggtgtgcggcacacacaacatctgcattaggcagaggtgcaagtgggctgattgaacttttccttcaaaacctgcttgtctgtcctggacctttgatgaaatgggatcccggtcacgcaggctgagacagtggggaccgccgaggccagagtgggctatgcttgagcagggatgagaagggccgcggcagcacgcagccttgacccacgcctgcgtcttgtggtgcaaggccagagggctctctctagaacctgaccgtgcactccatctcctgggagccacttttggcaagagtgagtgtggggggaaaaagtgtgcacaagagatacggaaccctgagctagggtttcctgtcaccaaagagtgagctgcatttccagttctgcgttaaagtatcgtttgttctggtgcctgcctgtggtggtgatttggagactcaaatttcctttgccaggtctcttttgtctttctttgggattggtagtatagaagatgctgggaattgtcttcctcgctcagcctcggcttcccgcactgtaagatgaggcagttgcagaggaggcctcggacgtcctgtgaccctcggcccacactcccccttgggtggccctggcagggctggctaggtgcgttccctgcagaccacgggaagccctgtgcttgcctgggtcagggctaagctgtgcgccctagaggagggaggaggactgcagattcttggtcgagaagaatgaagaggatttctgtgtttgctgagcagccattgtggagggttacccgcctccactttcccgttgcccatttcactgccaccagctcctcttcctctgctcgaacctatgagtcccagcctcactggcggcctcagacatgctcaggagtgacggggacagagggaggccgctgagttgcccgttagaactcttactgctgcgccagtgacccaggtggagagggaccctgaaccaaacagaacgtgtgctaattttccgaactccaaactgtacactcatattcatttttaaattgtatttttccaaacttcaaaaaggacgatgagcgtgggggataggaaacaaaacctgtaaacgttgtgaatgggctcagtggactctgggaccaaaccttctgtaatctctaaaacaatgggaccaagagctggatggaacctggagtcaaaaagaactgcttcagtccccgctgtaccgcctgcctagctgtgggagcaggcagggcgcctgggagcctgcgttttctggaccgttccatgggactcatccctacctcacagggctgttgtgaggtgttgtgtgactgcgtgtcctgcaaacgcccagctcggtgcccagccagcggtgggcacccaataaacgctacaacataaatgtgt

SEQ ID NO: 187552 - protein, 623 aa, Artificial Sequence
  derived and/or modified sequence
MRVALGMLWLLALAWPPQARGFCPSQCSCSLHIMGDGSKARTVVCNDPDMTLPPASIPPDTSRLRLERTAIRRVPGEAFRPLGRLEQLWLPYNALSELNALMLRGLRRLRELRLPGNRLAAFPWAALRDAPKLRLLDLQANRLSAVPAEAARFLENLTFLDLSSNQLMRLPQELIVSWAHLETGIFPPGHHPRRVLGLQDNPWACDCRLYDLVHLLDGWAPNLAFIETELRCASPRSLAGVAFSQLELRKCQGPELHPGVASIRSLLGGTALLRCGATGVPGPEMSWRRANGRPLNGTVHQEVSSDGTSWTLLGLPAVSHLDSGDYICQAKNFLGASETVISLIVTEPPTSTEHSGSPGALWARTGGGGEAAAYNNKLVARHVPQIPKPAVLATGPSVPSTKEELTLEHFQMDALGELSDGRAGPSEARMVRSVKVVGDTYHSVSLVWKAPQAKNTTAFSVLYAVFGQHSMRRVIVQPGKTRVTITGLLPKTKYVACVCVQGLVPRKEQCVIFSTNEVVDAENTQQLINVVVISVAIVIALPLTLLVCCSALQKRCRKCFNKDSTEATVTYVNLERLGYSEDGLEELSRHSVSEADRLLSARSSVDFQAFGVKGGRRINEYFC

SEQ ID NO: 187553 - DNA, 1872 bp, Artificial Sequence
  derived and/or modified sequence
atgagagtggccctgggcatgctgtggctgctggccctggcctggcccccccaggccagaggcttctgccccagccagtgcagctgcagcctgcacatcatgggcgacggcagcaaggccagaaccgtggtgtgcaacgaccccgacatgaccctgccccccgccagcatcccccccgacaccagcagactgagactggagagaaccgccatcagaagagtgcccggcgaggccttcagacccctgggcagactggagcagctgtggctgccctacaacgccctgagcgagctgaacgccctgatgctgagaggcctgagaagactgagagagctgagactgcccggcaacagactggccgccttcccctgggccgccctgagagacgcccccaagctgagactgctggacctgcaggccaacagactgagcgccgtgcccgccgaggccgccagattcctggagaacctgaccttcctggacctgagcagcaaccagctgatgagactgccccaggagctgatcgtgagctgggcccacctggagaccggcatcttcccccccggccaccaccccagaagagtgctgggcctgcaggacaacccctgggcctgcgactgcagactgtacgacctggtgcacctgctggacggctgggcccccaacctggccttcatcgagaccgagctgagatgcgccagccccagaagcctggccggcgtggccttcagccagctggagctgagaaagtgccagggccccgagctgcaccccggcgtggccagcatcagaagcctgctgggcggcaccgccctgctgagatgcggcgccaccggcgtgcccggccccgagatgagctggagaagagccaacggcagacccctgaacggcaccgtgcaccaggaggtgagcagcgacggcaccagctggaccctgctgggcctgcccgccgtgagccacctggacagcggcgactacatctgccaggccaagaacttcctgggcgccagcgagaccgtgatcagcctgatcgtgaccgagccccccaccagcaccgagcacagcggcagccccggcgccctgtgggccagaaccggcggcggcggcgaggccgccgcctacaacaacaagctggtggccagacacgtgccccagatccccaagcccgccgtgctggccaccggccccagcgtgcccagcaccaaggaggagctgaccctggagcacttccagatggacgccctgggcgagctgagcgacggcagagccggccccagcgaggccagaatggtgagaagcgtgaaggtggtgggcgacacctaccacagcgtgagcctggtgtggaaggccccccaggccaagaacaccaccgccttcagcgtgctgtacgccgtgttcggccagcacagcatgagaagagtgatcgtgcagcccggcaagaccagagtgaccatcaccggcctgctgcccaagaccaagtacgtggcctgcgtgtgcgtgcagggcctggtgcccagaaaggagcagtgcgtgatcttcagcaccaacgaggtggtggacgccgagaacacccagcagctgatcaacgtggtggtgatcagcgtggccatcgtgatcgccctgcccctgaccctgctggtgtgctgcagcgccctgcagaagagatgcagaaagtgcttcaacaaggacagcaccgaggccaccgtgacctacgtgaacctggagagactgggctacagcgaggacggcctggaggagctgagcagacacagcgtgagcgaggccgacagactgctgagcgccagaagcagcgtggacttccaggccttcggcgtgaagggcggcagaagaatcaacgagtacttctgctag

SEQ ID NO: 187554 - DNA, 1872 bp, Artificial Sequence
  derived and/or modified sequence
atgcgggtcgctctgggcatgctttggcttctggcactggcgtggcccccccaagcccggggcttctgtcccagccagtgctcctgttctctccacataatgggcgacggatctaaggcacgaacagtcgtttgtaacgatcctgacatgacactgccccccgcttctataccccctgacacttcccgtctaaggctcgagcgcaccgctatccgccgggttcccggagaggcgtttagacctctggggcgcttggagcagctgtggttgccttacaatgctctttctgagctgaacgccttaatgctgcgcggactgaggcgactgcgcgagttgcggcttccaggcaaccgcctcgccgctttcccatgggcagccttgcgagacgctcctaagctgcgcctgttggacctgcaggcaaatcggctgtctgcagtgccagctgaagcagctaggttcctggagaatctgaccttcctggacctcagctccaaccagctaatgagactaccacaagaactgattgtttcctgggctcacctggagactgggatctttccgcctggtcaccatcccagaagagtgctcggtcttcaggataacccatgggcttgcgactgccgactttatgatttggtgcacttactggacggctgggcccccaacttagccttcattgagacagaactacgatgcgcctccccacggtcattggcgggagtcgcctttagccaactggagctccgaaaatgtcagggcccagagctgcaccctggggtcgctagtataagatcgctcttgggaggaactgcactgttaagatgcggcgcaacaggagtcccaggccccgagatgagttggaggcgggccaacggacgacccctgaacggcactgtgcaccaggaggtgtccagtgatggcacatcctggacattgctagggctgcccgctgtctctcatctggacagcggcgactacatctgccaggccaagaatttcctgggagcgtccgaaactgtcatatctttaattgtaaccgagcctccaacttctacagaacactcaggctcacccggggcactgtgggctcggaccggtggaggtggtgaagccgccgcatacaacaacaagttggttgctagacacgttccacagatcccaaagcccgccgtcctcgccactgggccctctgtgcccagtacgaaggaggagctgacattagaacatttccagatggatgcccttggagaactgagtgatggccgggccggccccagtgaagctcgtatggttagaagcgtcaaagtggtaggagatacctatcactccgtctccctggtttggaaagctccccaggccaaaaacaccacggctttctcagtcctctatgcagtttttggccaacattctatgcgtagggtaattgtgcagcctgggaagaccagggtgaccattactggcctcctgcctaagaccaagtatgttgcttgtgtgtgtgtccagggcctcgtacctagaaaggaacagtgtgtgattttcagcacaaacgaggtggtggatgcggagaatacgcagcagcttattaatgtggtggtgatctcagttgctatcgtcatagctctgccactgacattgctggtatgctgctcagccctccagaagagatgcaggaagtgcttcaacaaggattcaacggaagccaccgtgacctatgtcaacctggagagactgggctacagcgaagatggcctggaggagctgtcgcggcatagcgtgtccgaggctgatagactactctcagcacgcagttctgtggatttccaggcattcggcgtcaagggggggcgcaggatcaatgaatacttctgttag

SEQ ID NO: 187555 - DNA, 2228 bp, Artificial Sequence
  derived and/or modified sequence
ggccagagaggagccaggagccatgagggtggcattaggcatgctctggctcttggcccttgcgtggcccccccaggcccggggcttctgcccctctcaatgcagctgcagcctccatatcatgggtgatggcagcaaggccaggacagtagtgtgcaacgaccccgacatgaccctgcccccggcgtccatccccccggacacctccagactgcgcctggagcggacggccatacgcagggttcctggcgaggccttcaggcccctgggccgcctggagcagctgtggctgccttacaacgccctcagcgagctcaacgccctcatgctgcggggcctgcgacgcctgcgggagctgcggctgcccgggaaccgcctggccgccttcccctgggcggcgctcagggacgcccccaagctgcggctgctggacctgcaggccaaccgcctctcggctgtgcccgctgaggccgcgcgcttcctggagaacctcaccttcctcgacctctccagcaaccagctgatgaggctcccgcaggagctcatcgtctcctgggctcacctggagaccggtatctttcctcccggccaccaccccaggcgggtcctagggctacaggacaacccctgggcatgtgactgccgactctatgacctggttcatcttttggatggctgggccccaaacttggccttcattgagactgaactgagatgtgccagcccacgtagcctggccggagtggccttcagccagcttgaactgaggaagtgccagggcccagagctccatccaggagtggccagcatcaggtcccttttgggtggcacagcactgctacgctgtggagctactggagtccctgggcccgagatgagctggaggagggccaatggcaggccccttaatggtacagtgcaccaggaagtctccagtgacggcacgagctggactctgctgggcctgcctgcagtgtcccaccttgactccggagactacatctgccaagccaagaacttcctgggagcctctgaaactgttatctccttgattgtcactgagccaccgacttccacagaacacagtgggagcccaggagcactatgggcaaggacaggtggcggaggggaagctgctgcttacaacaacaagctggtggccaggcatgtcccccagattcccaaacccgctgtcctggccactggaccctctgtgcccagcacaaaggaggagctgacccttgagcacttccagatggatgccctgggagagctctctgatgggcgggcaggaccctcagaggcacgaatggtgaggtctgtgaaggtggtgggggacacttaccacagcgtgtccttggtgtggaaggcaccccaggctaagaacacaactgccttcagtgtcctctacgcggtctttgggcagcacagcatgcggcgggtgattgtgcagcctgggaagaccagagtgaccatcactgggctgttgcccaagaccaagtatgtggcgtgtgtctgtgtgcagggcctggtgccccggaaggagcagtgtgttattttctccaccaatgaagtggtggatgctgagaacactcagcagcttatcaatgtggtggtgatcagtgtggccatcgtcattgccctgcctctcacgctgcttgtctgctgcagtgctcttcagaagcgctgccgaaagtgcttcaacaaggactccactgaggccacagttacctacgtcaacctagagagactgggctacagcgaggacggcttggaggagctgtcccggcacagtgtcagcgaggctgacaggcttctctcagctcgttccagtgtggactttcaggcctttggagtcaaagggggcaggagaatcaatgagtacttctgctgagggatatgcctccgcaactcacacacctgcctgcccacgctccttctttagctctgacacctgagtacacgatcacccactcttacctgctcgggtacctgcttactcagatacttacacacaacaacagcagcagcagctgctactgcaacaaccgctaacacttgttaagcacttactacagactagaaagtgttctaagtgctaaattcttgtaacaatcatttgcagcaggcatcactattctctccatttccctggggtggggggttaagaaacttgcctgtatcagtcagcttttgctgtataacaaatgaaagcaaaatcttggtga

SEQ ID NO: 187556 - DNA, 1872 bp, Artificial Sequence
  derived and/or modified sequence
atgagggtggccctgggcatgctgtggctgctggccctggcctggccaccccaggcccggggcttctgccccagccagtgcagctgcagcctgcacatcatgggagatggcagcaaggccaggacagtggtgtgcaatgaccctgacatgaccctgcccccagccagcatccccccagacaccagccggctgcggctggagaggacagccatccggcgggtgcctggagaggccttccggcccctgggccgcctggagcagctgtggctgccctacaatgccctgtctgagctgaatgccctgatgctgcggggcctgcggcggctgcgggagctgcggctgcccggcaaccggctggccgccttcccctgggccgccctgagagatgcccccaagctgcggctgctggacctgcaggccaaccggctgtctgctgtgcctgctgaggccgcccgcttcctggagaacctgaccttcctggacctgagcagcaaccagctgatgaggctgccccaggagctgattgtgtcctgggcccacctggagaccggcatcttccccccaggccaccaccccaggagagtgctgggcctgcaggacaacccctgggcctgtgactgccgcctgtatgacctggtgcacctgctggatggctgggcccccaacctggccttcatcgagacagagctgcgctgtgccagccccaggagcctggccggcgtggccttcagccagctggagctgaggaagtgccagggccctgagctgcaccctggggtggccagcatccgcagcctgctgggcggcacagccctgctgcgctgtggggccaccggggtgcccggccctgagatgtcctggaggcgggccaacggccggcccctgaatggcaccgtgcaccaggaggtgtccagtgatggcacctcctggaccctgctgggcctgcctgctgtgagccacctggacagcggggactacatctgccaggccaagaacttcctgggcgccagcgagaccgtcatcagcctcatcgtgacagagccccccaccagcacagagcacagcggcagccctggggccctgtgggccaggactggaggcggcggggaggccgccgcctacaacaacaagctggtggcccggcacgtgccccagatccccaagccagctgtgctggccaccggccccagcgtgcccagcaccaaggaggagctgaccctggagcacttccagatggatgccctgggggagctgagtgatggccgggccggccccagcgaggccaggatggtgcgctctgtgaaggtggtgggggacacctaccacagcgtgtccctggtgtggaaggccccccaggccaagaacaccacagccttctctgtgctgtatgctgtgtttggccagcacagcatgagaagagtgattgtgcagcccgggaagaccagggtgaccatcaccggcctgctgcccaagaccaagtatgtggcctgtgtgtgtgtgcagggcctggtgcccaggaaggagcagtgtgtgatcttcagcaccaatgaggtggtggatgctgagaacacccagcagctgatcaacgtggtggtgatctctgtggccatcgtgattgccctgcccctgaccctgctggtgtgctgcagcgccctgcagaagcgctgcaggaagtgcttcaacaaggacagcacagaggccaccgtgacctacgtgaacctggagcggctgggctacagtgaagatggcctggaggagctgagccgccacagcgtgtctgaggccgaccggctgctgagcgcccggagctctgtggacttccaggccttcggcgtgaagggcggccgccgcatcaatgagtacttctgctag

SEQ ID NO: 187557 - DNA, 1872 bp, Artificial Sequence
  derived and/or modified sequence
atgcgggtggccctgggcatgctgtggctgctggccctggcctggccaccgcaggcccgaggtttttgtcccagtcagtgttcctgctctctgcacatcatgggcgacgggtctaaggcgcgcacagtcgtgtgcaacgaccccgatatgacactgcctccagcttcaatcccccccgacacatccaggctccgcctcgagcgaactgcaattcggcgtgttcctggcgaagcttttcgccccctgggcaggcttgagcaactttggctaccctataatgctttgagtgagctgaacgccctgatgctgcgagggcttaggcgcctgagagagctcaggttacctggcaaccgcctggcagcctttccctgggccgccctacgggacgctcccaaactgcggctgctcgacctccaggccaaccggctgtctgcagtacctgccgaggctgcaagattcctggaaaatctcacgttcctcgatctctcctctaatcagctcatgcgccttccacaagagctgatcgttagctgggcccatctcgagaccggtatttttcccccaggccatcacccccgccgagtgttagggctccaggacaatccctgggcttgtgactgccgactttacgatctggtgcatctgctggacggatgggctccaaacctcgccttcatcgagacagaactgagatgtgcaagccccagatcattagccggagttgccttctctcagctcgagttacgcaagtgccagggacctgagctccatcctggcgtggctagcataagatcactactaggcggcaccgccctactgcgatgtggggcaacaggggtacctggcccggagatgtcgtggagaagggcaaatggtcgacctttgaacggtacggtccaccaggaggtgtccagtgacgggactagttggacgctattaggattgcctgccgtttcacatctagattcaggtgactatatttgccaagccaagaattttttgggggcgtctgagacggtcatcagtctgatcgtgaccgaaccaccaacaagcacggagcacagcggatcccccggcgccctttgggcacgaacagggggcggaggggaggccgccgcgtacaataacaagctggtggctcggcacgtgccccagattcctaaacctgcagtgttggctaccggccctagcgttccgtctactaaggaggagctaacactggagcactttcagatggatgccctcggcgagctgagtgacggcagagccggccccagtgaagcgagaatggtgcgctccgtgaaggtggtcggagatacttaccacagtgtctctttggtgtggaaggcaccacaggctaagaatacaaccgcgttctctgtgttgtatgccgtatttggccagcatagcatgagacgagtcatcgtgcagcctggtaagaccagagttactattacaggcttgctccccaaaactaagtatgtggcgtgtgtctgcgttcagggattggttcccaggaaagaacagtgcgtaatttttagtacaaacgaagtggtggacgccgagaatacccagcagttaatcaacgttgttgtgatcagtgtcgccatcgtgatcgcactccctctcaccctccttgtctgttgctcagccctgcagaaaagatgtaggaagtgtttcaacaaggattccacagaagcgaccgtgacatatgttaacctggaaagattgggatatagcgaggacggactggaagagctgtcaagacatagtgtctccgaagccgaccgcctgctgagcgcccggagtagcgtggactttcaggcttttggtgtgaaaggtgggaggagaattaatgaatacttctgttag

SEQ ID NO: 187558 - DNA, 1872 bp, Artificial Sequence
  derived and/or modified sequence
atgagagtcgccttgggaatgttatggctgctagcgttagcttggccacctcaggcaagagggttctgccctagccaatgttcttgcagtctgcatatcatgggcgatggatctaaagctaggacggttgtgtgtaatgatcctgacatgactctgcctccggcatctattccacctgacacaagccggttgcgattggagcgcacagccatccggagagtgcctggggaggcttttcgcccactgggcagactcgaacagctatggctgccttacaatgctctttccgaactaaatgccctcatgcttcggggactgcgacgtctgcgggagctgcgcctgcctggtaaccgtttagcggcattcccgtgggcagccttaagggatgcacccaagctacggctccttgacctccaggctaaccggctgagcgccgttcctgcagaggctgccaggtttctcgagaatcttacttttctcgacctttcatctaaccaactaatgaggctgccacaggagcttatcgtttcctgggctcatctcgaaacagggatatttcccccaggccaccacccccgacgcgtcctgggattgcaggacaatccctgggcctgcgattgccgactgtatgacttggtgcacctgttggacggctgggctccaaaccttgcattcattgagactgagctccgatgcgcctccccgagatccctggctggagtggccttttcacagctcgagctccgtaaatgccagggtcccgaattgcaccctggggtcgcttctattcgtagcttactgggtggaaccgctctgctccggtgtggtgccactggcgtgcctgggccagagatgagctggagacgcgctaacggccgtcccctgaacggcaccgtgcatcaagaggtgtcaagcgacggcacgtcatggaccctcctggggctccccgcagtttctcacttagattctggcgactacatctgccaggcaaaaaatttccttggcgcaagcgagacggtgatttccctgatagtgactgagccgcctacctccaccgagcactccggctcacccggagccctctgggccagaactggaggaggcggagaggcagcagcatacaacaacaagctcgtggctcggcatgttccccagatccccaagccagcagttctcgccaccggccctagcgtacccagcaccaaagaggaattgaccttagagcacttccagatggatgcgttgggggaactgtccgatggcagggccggaccatccgaggctaggatggtcagaagcgtgaaagtggtgggggatacttatcatagcgtgagtttggtctggaaagctcctcaggccaaaaacaccaccgctttcagcgtgctctatgcagtgttcggacagcacagcatgcgcagggttattgttcagccgggaaaaactcgggttacaatcactggcttgctgcccaagacaaagtacgtcgcctgcgtctgtgtacaggggctggttccgagaaaagagcaatgcgtcatatttagcaccaacgaagtcgttgatgccgagaacacgcagcaactgatcaatgtggtggtgataagtgtggccatcgttatcgcccttccactcacactgctcgtctgttgttctgcactgcagaagcgttgcagaaaatgttttaacaaagacagtactgaggctaccgtgacgtatgttaatctggagagactgggatatagcgaggatggcttagaggaacttagcagacacagtgtgtccgaggccgaccgactgctcagtgcacgctcctctgtcgatttccaagccttcggcgtgaaaggcggtcggagaatcaacgagtacttttgctag

SEQ ID NO: 187559 - protein, 419 aa, Artificial Sequence
  derived and/or modified sequence
MPAENSPAPAYKVSSHGGDSGLDGLGGPGVQLGSPDKKKRKANTQGPSFPPLSEYAPPPNPNSDHLVAANPFDDNYNTISYKPLPSSNPYLGPGYPGFGGYSTFRMPPHVPPRMSSPYCGPYSLRNQPHPFPQNPLGMGFNRPHAFNFGPHDNSSFGNPSYNNALSQNVNMPNQHFRQNPAENFSQIPPQNASQVSNPDLASNFVPGNNSNFTSPLESNHSFIPPPNTFGQAKAPPPKQDFTQGATKNTNQNSSAHPPHLNMDDTVNQSNIELKNVNRNNAVNQENSRSSSTEATNNNPANGTQNKPRQPRGAADACTTEKSNKSSLHPNRHGHSSSDPVYPCGICTNEVNDDQDAILCEASCQKWFHRICTGMTETAYGLLTAEASAVWGCDTCMADKDVQLMRTRETFGPSAVGSDA

SEQ ID NO: 187560 - DNA, 1260 bp, Artificial Sequence
  derived and/or modified sequence
atgccagccgagaatagtcccgccccggcttataaggtcagttcccatgggggagatagcggacttgacggactggggggtcctggagtacagctgggaagccctgacaagaagaagcgcaaggccaatacgcagggaccaagctttcccccactctccgagtatgctcccccacccaaccccaattccgaccacctcgtcgcagctaatccttttgatgataactacaacactatttcatataaacccctgccctcgagtaacccttatctgggcccaggttatcctggattcgggggctattctactttccgaatgccgccccacgtaccccccagaatgtcgagcccttactgcggcccatactcgttacggaaccagccccaccccttccctcagaacccactgggtatgggttttaacaggccgcacgcttttaatttcgggccacatgataactcttcttttggaaacccatcctataataacgccctgtctcagaatgtgaatatgccgaaccagcatttccggcagaacccagccgaaaacttctctcaaattccacctcagaacgcctcacaggtaagcaatcccgatctggcctcaaactttgtgccagggaataactcaaactttacctctccgctggagtccaaccactcttttattccacctccgaatacctttgggcaggcaaaagcacctcctccgaagcaagatttcacacagggggcaactaagaatactaaccagaacagcagcgcacatcccccccacttgaatatggacgacaccgtgaatcaatcaaacattgagctcaaaaatgtcaaccgaaacaacgctgtgaaccaggaaaacagcagaagctcaagtactgaggcaaccaacaacaatccagccaacggcacccagaataagccccgccaaccacgtggcgcagccgacgcttgtaccaccgagaaatctaataagtcaagtcttcaccctaaccgacacggccattcaagcagtgacccggtgtatccgtgcggcatttgtactaatgaggtgaacgacgaccaggacgccattctttgcgaagccagctgtcagaagtggttccacaggatctgtacaggcatgaccgagactgcctacgggctccttaccgctgaggcctctgcagtatggggttgcgacacttgcatggccgacaaggatgtgcagttgatgcgcacccgggaaactttcggcccaagcgcagtcggaagcgacgcctag

SEQ ID NO: 187561 - DNA, 1260 bp, Artificial Sequence
  derived and/or modified sequence
atgcctgctgagaacagccctgccccagcctacaaggtgagcagccacggcggggacagcggcctggatggcctgggcggccctggggtgcagctgggcagcccagacaagaagaagaggaaggccaacacccagggccccagcttcccccccctgtctgaatatgcccccccacccaaccccaacagcgaccacctggtggccgccaacccctttgatgacaactacaacaccatctcctacaagcccctgcccagcagcaacccctacctgggccctggctacccaggctttggaggctacagcaccttcaggatgcctcctcatgtgccccccaggatgagcagcccctactgcggcccctacagcctgaggaaccagccccaccccttcccccagaaccccctgggcatgggcttcaaccggccccacgccttcaactttggcccccatgacaacagcagctttggaaaccccagctacaacaatgccctgagccagaatgtgaacatgcccaaccagcacttccggcagaacccagctgagaacttcagccagatccccccccagaatgccagccaggtgagcaacccagacctggccagcaactttgtgcccggcaacaacagcaacttcaccagccccctggagagcaaccacagcttcatccccccacccaacaccttcggccaggccaaggcccccccacccaagcaggacttcacccagggcgccaccaagaacaccaaccagaacagcagcgcccaccccccccacctgaacatggatgacacagtgaaccagagcaacatcgagctgaagaatgtgaacagaaataatgctgtgaaccaggagaacagccgcagcagcagcacagaggccaccaacaacaacccagccaacggcacccagaacaagccccggcagcccagaggagctgctgatgcctgcaccacagagaagagcaacaagagcagcctgcaccccaacagacatggccacagcagcagtgaccctgtgtacccctgtggcatctgcaccaatgaggtgaatgatgaccaggatgccatcctgtgtgaggccagctgccagaagtggttccaccgcatctgcaccggcatgacagaaacagcctacggcctgctgacagctgaggccagcgctgtgtggggctgtgacacctgcatggctgacaaggatgtgcagctgatgaggacccgggagaccttcggccccagcgctgtgggcagtgatgcctag

SEQ ID NO: 187562 - DNA, 8494 bp, Artificial Sequence
  derived and/or modified sequence
agtcaagtcgttaaaataccaagtggaggcattctacagacaggtgtccacaccacggccacgcggacacggagtcggggaatctggatccccacatgcccgccgagaactctccagctcccgcttacaaagtttcctcgcatggtggtgatagtggactggatgggttaggaggaccaggtgtacaactaggaagcccagataagaaaaagcgcaaggcaaatacacagggaccttctttccctccattgtctgagtatgctccaccaccgaatccaaactctgaccatctagtggctgctaatccatttgatgacaactataatactatttcctataaaccactaccttcgtcaaatccatatcttggccctggttatcctggctttggaggctatagtacattcagaatgccacctcacgttcccccaagaatgtcttccccatactgtggtccttactcactcaggaaccagccacacccatttcctcagaatcctctgggcatgggttttaatcgacctcatgcttttaactttgggccacatgataattcaagtttcggtaatccatcttataataatgcactaagtcagaatgtcaacatgcctaatcaacattttagacaaaatcctgctgaaaatttcagtcaaattcctccacagaatgctagccaagtttctaaccccgatttggcatctaattttgttcctggaaataattcaaattttacttctccgttagaatctaatcattcttttattcctcccccaaacacttttggtcaagcaaaagcaccacccccaaaacaagactttactcaaggagcaaccaaaaacactaatcaaaattcctctgctcatccacctcacttgaatatggatgacacagtgaatcagagtaatattgaattaaaaaatgttaatcgaaacaatgcagtaaatcaggagaacagccgttcaagtagcactgaagccacaaacaataaccctgcaaatgggacgcagaataagccacgacaaccaagaggtgcagcagatgcctgcaccacagaaaaaagcaataaatcctctcttcacccaaaccgtcatggccattcgtcttctgacccagtgtatccttgtggaatttgtacaaacgaggtgaacgatgatcaggatgccatcttatgtgaggcctcttgtcagaaatggtttcatcggatctgtactggaatgactgaaacagcttatggcctcttaactgcagaagcatctgcagtatggggctgtgatacctgtatggctgacaaagatgtccagttaatgcgtactagagaaacttttggtccatctgcagtgggcagtgatgcttaatcaaaggcattaactaaagtgggtttattttcctgtgcattgcagaagttcattgacacaggattttaatgttttacattatttttttaaatgcatacacaaaaacattatttacttagtttttattaatcacttcatcactagagcaaattttttattgtctttgcttgctgtcttaaatgagaataatgtatatgggggtgctttagaaacataaataaatgttagttgttgttatttatcacaaacataaaagcctcttgaaacttcaaaataatatataacaaatgtaggcaagttttaacttttaaaagttagaatcattgaaaaacgtgtatttcagtgctgaactttggttgtaccatattaaagatttagttcaaaaagtttatcaaggatccacttaacacgtcttcacaacataatatatgtaactgtaacatgggggaaagcatacatttttatggattaaaaaaataatagtatgacaccagattcctcctccactagggtctttggaatcaatgaatttcatatttcaagtgagttttcaggatatctgtttgtacagatacgagacagatcttagcatatagtaaattctcagtaagtattgttgattaacttgtggatggtaccacatgaaattgctaatattagatcagttgaaaattgactgcaattagtaaagttggtataacgtacgttcccagttgtgctatttagaattatgatagtattatgctcctacttttctttgatattgagttgtcttgttattgtttattgttttccagagaaatactatagtatccacagaagaattgtgaatacttttttataattttgaactgggacatattgcagatgaggaaggtagaaacatccatttggccttagagggctctgctagtaaaagaactactcagtggtggtttgaaaaatcttgttctggggatctgaatttcaaaaatgaaccctaggggagatcaaaatccattttaaacaaagatcaattaagagccaaagtgaaatctaacttgcaaacaacaatttgaagccttgcagcagacttaaggaattcccgctctgactggggaaaagtataaaaatggacctgagagtaccctcttgagggatgatcaagaatggagacagttggagttgtgctcattaagattcaaaacagcagaaatccatttttggagcagattataacctgtggccaaaaaaaaaaaatgtgtgctgtttgacagctaatggcaatttatacaatcattggaggctggtaaagctccctaatatgttgccaccattatcattgcaaccaaaaaaattctgaagattgtgtggtgatctacgaaagagataaataattactgttatttaaacccaagtgaaacaatgacggcagcagcatattatcaagaaatttaaattatgcatgaaaatgtgatttaaaaacaatgtcctttgggtaacacacaagaacctacactttcacagacaaggactcgacctcacatgtcacaagctactaaagcaaagttaagtgacttgggctatgaaattttgtcatgtccattttagtcactggacctttattccatggactactgtctatcatttggagctttttctaagaaacaatgcattccccaatcgagatgaagtaactggaagatgttaacaatttatacagcctaacaaatgatgaattttataaaagttagacctttaatattctgttggaagaaaactattcatgctcctgatgcatattttgattgaataaaacttatttttttaaatacattgttttaattttgacctacaaaaacagcaatttcatatggtacaaggtaatacaaggttttctccatttacccttgactagttagaggtgagtacaaaatattttcagtagttgtaaaatatttatctttacaattttaggaaacaaaatgatataaactatacttctaggtactcctttgtgtgaaaactttaccagttgaagcaggttaaaatgcagtattttgggctgacaggcatttgatggtgttcagtagtgtacttgaagatctcattttacttggattttttattatacatatttctctaaatgtttaaggacctagttatgttgctcctgaaagtttaatgagtgctgatttttaataaatgatgcactgtatgctgtatgcctagttgtagcatcagatcatgatttattattaccctgaatagagctagatgatagatattttgagtagaactttccagtgttctcaggagttaacactttacatggtagtacttgagttgtgatcattactaaaatcaattatgcagtttcttaaaccctttatctctttaagtttcagtagttagctgtttttgtgaaaatgaaataacttctcccaagctagtctaaaggtatgtgttatgcaatataattcattttctatttccacatagttgtttttaaaaacctacaaacaggtgaatttttattcaggtgtttaggtcttcaaagcaccttacttaaataagaatctgtaaatattcaaaagaaaaactcacggttcattctgatagtgaatcatagccaaactgtaatcatagctgatgaatagcgttcatgtgtttgaattaattttcctgctagttctacatttgtctctacataatgctaagtcaaaagttatatagatgcttttggatggaataagtgatgaactgtaagaatagccagatgataatttgtctgaagaaggctattatacaaactgaaatggcttcttaggataaatgataagctgccttcaactttaaaaatatgcagtgatggaaaaaaacacaggtggaattgtaccttttttggtataatccctttccttcactgaaagtcctcatcttacacacacacacacacacacacaccccccacagtttctccaacatccttgagttttgcttaaattcaacctggctaactatgagcatctaggtttactcaccaaagctaggttattgacagaaaggtgggtttttttttgttttttttgttttgttttgttttgtttttgttttttgccagtcttgctctgttgcccaggctggagtgcagtgatgagatctcggctcactgcaacgtctgccttcctggttcaagtgattctcctgcctcagcctcctgagtagctgggattacagtcgcccaccatcacacctggctaatttttgtatttttagtagagacgggttcaccatgttggccaggctggtgtcaaactcctgacctcaagtgatctgcccgcctcagcctcccaaagtgctgggattacaggtgtaagccaccacgcctggccagacagaaaattttaaaaagcatcagttcctttctcagaacttgacttgctcatgcactagagaatttgtggtccacatgcttctaggtgttactcgattcactaatactgaaacagctcagcttgtgaaagataaattgttcttcagacagagtgcttagaattagatttgtgatcagtgttttccttttgtgtgaaatactttagagtactgctataattgttattcaaattagaaggttatatacataaaactaaagattttcttgtactagtgcttattcttcataaacacagtgtaaagaaatctacttttttggtggtttgttttagactcccaactctgcctagtggcagaaaaacctcttaatagtgtgggtcatcataaaatctgccaactttaatccaaataagtatcaagagtcttcattcaatattctttcaaacttgtttgtctcgaacaaattagagttttagcacttattgttcaatgtactatagtaattgtatttaatagtaagaaaatatataagcaatgattttttaaaagggagttctcaagagttttggatttctttctgccgtgtatagaggtttcttatgcatggacatttgtgctgttttatatctttttcaattaaaaaaaaatttaaaggcatcaggctccctaagttcatttgtaaatagtggcttggaactctacacaatagggaagctcctaaaggctcatttagaccataatctagttaatagtatcatgctgaactctcagttttctttaggaaaccaatcaatcagtgtaggagggagaaagaagcagaggtcttgtctttttcctgatgtgattaggaggttaagttctttggtgtgggtttctttgcatttgcccccttaccatgctaaactctggtgaaatgtataagcagccttggcttttcctctcctgggtgctctgtgcttcaacattttatatctttcctcccatcagaaatcctgtgtctttgtgtggcagtagtagttggctagactttaagagaaaagcattttctactaaggtatgaatgaagatagtgggaaaagtgtcattaaatttcttttttaaaaaagtatgtttattaagaatgaatctttaatatctaacatttcagacaatatgaccgcatttcagataccatgggaagcagtacatttagtgaattagctggtactgtctgagggtacttccagtttcctttaggctgttgtgacttttcacagcttcctctcctctaattctgaacttagagattttcttctcatttctaatttttagtagcttattgttccatccagtagagcattataaaagtcacatctgcatcttccaacttatggtacagtgatgggaatttggaagcacccctggagcaaagaggctagggatagcattaacatctcccaagacaagtggtataggggaaatgaaggaaagactgtggccatgtatatgccaggcgttaatacatcagagctgcctgtatttaatttaaaacttttgatgaaactcagtggataagcatctttgtcatattttgtcaataatacattacttgcaattatattaaaacttattctaaatacctgtacctttcttgttctgtagatgtgtagatgatgttgcttgtttgtcaaaatattatcttttataaaagaaagtcctgcttcttatcatgatgtatgtgacttaaatgattgtttcatattaaaactatttcttccttatgtactgtttacatatacctctttttgggatattagttcagtacttttatacaaatctgagtgtgttccacattggtgacatgtatttttgcagtaactttttgttttgttcttagaacatgtctaaagtaacacatgcactagtgctgtggtctgtggcaaaattactgtaattcaaattggaaaaaaaaatgtttccagactttgtccaacatttattcctatggcaaaggaaattactatgtaatactaattatttcttatgctggtatgttttaagctactctatgaagtatgtgaaacatcaatatttatggattaatagatggcctgatgtctttcaaatgggagaggagtaaattttagtgttaccaactcatgacacttgtaatacaataaatcttaaaatttttattttccacttacaggtatactttactaaataattaccttaaatggcagtgcatattaggattttttagcacatactactaaaattatatagtaacttttaacttgtgctgatatttcccaaccaaaaaagacatcattcacttcatcataaccaaaataagtagtactgtaatatttatcttcatttatttagacatgattaagataccgtaagactcctctaatttacctggaatttttagccattgattcaaggacttgaatgctgtttacttggtactacctaatgaaaggatttggtaataaaggttataatcacgattttaaagaaaaatgtttcatcttgaaggcaaatttttaagctttttatttagaggtgtttacttaagaatagtaatttaaaagcattcttattttgtcattaagacaagtacccaaaagaattgtaataagtaatacttggccaatgcaaatttgtacatttgaaatcatacacttgaaagaaaaaaatgaaggcttgtgagtgcttaaactgcatatctttttaaaaattcaaattttagacatatcagtttaaattatccttaataaggttttactatgtcagtgatgtatattacaaaatgtctacctatgttatgttaatgatatctctatactgcatcatattcggcatggttatggtatattttgtacttttgattgtggactattgataggattgatatagcaataaatctgattcagacttaatattttttaaaacgctagataccatactgtatcataatcctattatatttgacttgaatgcccaaaattttcatagttctatattttatgttaaaaatttagtattacatgttagggatttatttttgtctgctattttcacatacattcttttagaactgagtctgtttctatttagatcatagacgtctaaagaagtattattaattcatgaactgctttgtggaaaaatttaaataaagtatgaaatgactagattaccccaaattgtttatttttttttttggttaatgaccaggttacaattctcagacaaatgaaattggcttgataactgattgaatatagtagataatggaaagtttgactctttaagggcttccaagtgttaaatacattctcaattctgaattacttcatagtaactacttaaataatggtaagccaattctcctttttctttttgagatatttaacacaatttgcgtcttctgatcccattcccttcttccccaaaaaccatgctagaatttaaaattggaagagtttaatttgtcatctacattttagtttttttattctatagataagtaagaagacaagtagacgttctgctgtcaagacagtccatgttattgttggccattcttttcagggataatgcttaatgttatttgtgcgttgtataaggaatgttgtttatcagtatatagacctaccattagtagaaatgatgtatggcaggctttcttgaataatatgtattgtaagtttgtttcctatagtgttattatggttcagattcttttaaataaagctagtttttaaagagaaaaa

SEQ ID NO: 187563 - DNA, 1260 bp, Artificial Sequence
  derived and/or modified sequence
atgcccgccgagaacagccccgcccccgcctacaaggtgagcagccatggtggggattctggccttgatggcctgggtggaccgggagttcagctcgggtcaccagataagaagaaaagaaaagcaaatacacagggaccatcattcccaccactgtctgaatatgcacctcctcccaatccaaatagcgatcatctggtggctgccaacccattcgacgacaactataacacgatatcgtataagcccctcccttcgtccaacccttacctcggcccagggtaccccggctttggtggatacagcacattccgtatgcctccccacgtgccaccaaggatgagttcaccatattgcgggccttacagtctgaggaaccagccccatccattcccccagaatcccctggggatgggcttcaatcggccacacgcatttaacttcggaccacatgacaactctagctttgggaatccatcctataacaacgctctgtctcagaatgtgaacatgccaaaccagcactttcgtcaaaatcctgccgagaactttagtcagatccccccccaaaacgcaagccaagtctctaatcctgacctggcctctaacttcgtgcccggcaacaattcaaatttcacatctccgctcgaaagcaatcacagcttcatccctccccccaacacttttggccaagctaaggccccaccgccgaaacaggattttacacagggagccaccaaaaacacgaatcagaactcttccgctcacccaccgcatttaaatatggacgataccgtcaatcagtctaacatagagcttaagaacgttaatagaaataatgccgttaatcaggagaactctagatcttccagcacagaggccaccaataacaaccctgccaatgggacccaaaacaaacctagacagccaaggggcgctgctgatgcctgcacgaccgagaaatcaaacaaaagttcactgcacccaaataggcatggccacagcagttccgaccccgtgtatccgtgtgggatctgcaccaacgaggtcaatgacgaccaggacgctattctgtgcgaagcctcatgccagaagtggtttcaccgcatttgcaccgggatgacagagacggcctatggcctcctgaccgcggaggcttcggcggtctgggggtgtgacacatgtatggcagacaaagatgtgcagttgatgaggacccgggaaacattcggcccatcagccgtcggcagcgatgcttag

SEQ ID NO: 187564 - DNA, 1260 bp, Artificial Sequence
  derived and/or modified sequence
atgcccgcagaaaattctccagcccctgcatacaaggtgagcagccatgggggagacagtggtctcgacggcttggggggtccaggcgtccaactgggcagccccgacaaaaagaagcgcaaggcaaatacccagggtccttcatttcctcccctgtcagaatacgcgccacccccaaaccccaatagtgaccacttagtggccgcaaacccctttgacgacaattacaacactatcagttacaagccactgccttcgtcaaatccatatctgggccctgggtacccaggttttggtggctattctaccttcaggatgcctccgcacgtacccccacgcatgtcctctccctattgtggtccttactcgttgaggaaccaaccgcatccttttcctcaaaacccacttggcatgggcttcaataggccccacgccttcaattttggaccccatgataactctagcttcgggaatccaagctataacaatgccttatcacagaacgtcaatatgcccaatcaacatttcaggcagaatcctgctgagaacttcagtcagattccgcctcagaatgcttcacaggtgagtaatcctgatctcgcttccaactttgtgcccggaaacaattctaacttcacaagtccgctcgagtccaatcacagctttatccccccacctaacactttcggccaggcaaaggctcctccaccaaagcaagatttcacacagggcgcaactaaaaacacaaaccagaacagttctgcccaccctccccatttgaatatggatgatacagtgaatcagtccaatattgagctgaagaatgtgaatagaaacaatgcagtcaaccaggaaaactcaaggtcttcttcgactgaagcgacgaataataacccagcaaacggaacccagaacaagcccagacaacccagaggcgcagctgatgcatgtacaaccgagaagtcaaataagtcgtctcttcacccgaacaggcacggacacagctccagtgaccctgtctacccatgtggtatctgtaccaatgaagtgaacgacgaccaggacgccatcctgtgcgaggcttcttgtcagaagtggttccacagaatttgcaccggcatgacagaaactgcatatggtctgctcaccgctgaagctagtgcagtctggggatgtgacacttgtatggccgacaaagatgttcagcttatgcggacacgggagactttcggaccttccgccgtggggtctgatgcctag

SEQ ID NO: 187565 - DNA, 1260 bp, Artificial Sequence
  derived and/or modified sequence
atgcccgccgagaacagccccgcccccgcctacaaggtgagcagccacggcggcgacagcggcctggacggcctgggcggccccggcgtgcagctgggcagccccgacaagaagaagagaaaggccaacacccagggccccagcttcccccccctgagcgagtacgcccccccccccaaccccaacagcgaccacctggtggccgccaaccccttcgacgacaactacaacaccatcagctacaagcccctgcccagcagcaacccctacctgggccccggctaccccggcttcggcggctacagcaccttcagaatgcccccccacgtgccccccagaatgagcagcccctactgcggcccctacagcctgagaaaccagccccaccccttcccccagaaccccctgggcatgggcttcaacagaccccacgccttcaacttcggcccccacgacaacagcagcttcggcaaccccagctacaacaacgccctgagccagaacgtgaacatgcccaaccagcacttcagacagaaccccgccgagaacttcagccagatccccccccagaacgccagccaggtgagcaaccccgacctggccagcaacttcgtgcccggcaacaacagcaacttcaccagccccctggagagcaaccacagcttcatccccccccccaacaccttcggccaggccaaggcccccccccccaagcaggacttcacccagggcgccaccaagaacaccaaccagaacagcagcgcccaccccccccacctgaacatggacgacaccgtgaaccagagcaacatcgagctgaagaacgtgaacagaaacaacgccgtgaaccaggagaacagcagaagcagcagcaccgaggccaccaacaacaaccccgccaacggcacccagaacaagcccagacagcccagaggcgccgccgacgcctgcaccaccgagaagagcaacaagagcagcctgcaccccaacagacacggccacagcagcagcgaccccgtgtacccctgcggcatctgcaccaacgaggtgaacgacgaccaggacgccatcctgtgcgaggccagctgccagaagtggttccacagaatctgcaccggcatgaccgagaccgcctacggcctgctgaccgccgaggccagcgccgtgtggggctgcgacacctgcatggccgacaaggacgtgcagctgatgagaaccagagagaccttcggccccagcgccgtgggcagcgacgcctag

SEQ ID NO: 187566 - protein, 421 aa, Artificial Sequence
  derived and/or modified sequence
MASFPPRVNEKEIVRLRTIGELLAPAAPFDKKCGRENWTVAFAPDGSYFAWSQGHRTVKLVPWSQCLQNFLLHGTKNVTNSSSLRLPRQNSDGGQKNKPREHIIDCGDIVWSLAFGSSVPEKQSRCVNIEWHRFRFGQDQLLLATGLNNGRIKIWDVYTGKLLLNLVDHTEVVRDLTFAPDGSLILVSASRDKTLRVWDLKDDGNMMKVLRGHQNWVYSCAFSPDSSMLCSVGASKAVFLWNMDKYTMIRKLEGHHHDVVACDFSPDGALLATASYDTRVYIWDPHNGDILMEFGHLFPPPTPIFAGGANDRWVRSVSFSHDGLHVASLADDKMVRFWRIDEDYPVQVAPLSNGLCCAFSTDGSVLAAGTHDGSVYFWATPRQVPSLQHLCRMSIRRVMPTQEVQELPIPSKLLEFLSYRI

SEQ ID NO: 187567 - DNA, 1266 bp, Artificial Sequence
  derived and/or modified sequence
atggccagcttcccccccagagtgaacgagaaggagatcgtgagactgagaaccatcggcgagctgctggcccccgccgcccccttcgacaagaagtgcggcagagagaactggaccgtggccttcgcccccgacggcagctacttcgcctggagccagggccacagaaccgtgaagctggtgccctggagccagtgcctgcagaacttcctgctgcacggcaccaagaacgtgaccaacagcagcagcctgagactgcccagacagaacagcgacggcggccagaagaacaagcccagagagcacatcatcgactgcggcgacatcgtgtggagcctggccttcggcagcagcgtgcccgagaagcagagcagatgcgtgaacatcgagtggcacagattcagattcggccaggaccagctgctgctggccaccggcctgaacaacggcagaatcaagatctgggacgtgtacaccggcaagctgctgctgaacctggtggaccacaccgaggtggtgagagacctgaccttcgcccccgacggcagcctgatcctggtgagcgccagcagagacaagaccctgagagtgtgggacctgaaggacgacggcaacatgatgaaggtgctgagaggccaccagaactgggtgtacagctgcgccttcagccccgacagcagcatgctgtgcagcgtgggcgccagcaaggccgtgttcctgtggaacatggacaagtacaccatgatcagaaagctggagggccaccaccacgacgtggtggcctgcgacttcagccccgacggcgccctgctggccaccgccagctacgacaccagagtgtacatctgggacccccacaacggcgacatcctgatggagttcggccacctgttccccccccccacccccatcttcgccggcggcgccaacgacagatgggtgagaagcgtgagcttcagccacgacggcctgcacgtggccagcctggccgacgacaagatggtgagattctggagaatcgacgaggactaccccgtgcaggtggcccccctgagcaacggcctgtgctgcgccttcagcaccgacggcagcgtgctggccgccggcacccacgacggcagcgtgtacttctgggccacccccagacaggtgcccagcctgcagcacctgtgcagaatgagcatcagaagagtgatgcccacccaggaggtgcaggagctgcccatccccagcaagctgctggagttcctgagctacagaatctag

SEQ ID NO: 187568 - DNA, 1266 bp, Artificial Sequence
  derived and/or modified sequence
atggcctcttttcccccaagggtgaatgagaaggagatcgtgcgcctccgcacaattggtgaactactggcccccgccgccccttttgacaagaagtgtggtcgcgagaattggaccgtcgctttcgcacccgacggatcttactttgcttggagccaagggcatcgtacagtaaaacttgtgccctggtcacagtgcctgcagaactttctcctgcatgggacgaaaaacgttaccaactctagttctctgagactcccaaggcagaacagcgacggaggtcaaaaaaacaagcctcgcgagcacattattgactgtggggacatagtctggtccctggcctttgggtcaagcgtccccgagaaacagtctagatgcgtgaatatcgaatggcaccgatttcgatttgggcaggatcaactgcttcttgccactgggttgaataatggccggatcaagatctgggacgtctatactggtaaattgctgctcaacctggttgaccacacagaggtcgtcagagacctgacttttgcacctgatggatcgctaatcctggtttcagccagccgagacaagaccctgagggtgtgggacctgaaagatgacgggaatatgatgaaggttctgcggggccaccaaaattgggtgtattcatgcgctttctccccagactcctccatgctgtgctccgtgggagccagtaaggcagtgtttctgtggaatatggataaatatacaatgattcgtaaacttgaaggacaccaccatgacgtcgtcgcgtgcgactttagcccggacggggccctgttggctaccgcgtcgtacgacacgagagtgtacatatgggatcctcataatggagacattctgatggaattcggccacctgtttccaccccccacgccaatctttgctggtggtgccaacgatcgctgggtgaggagcgtatctttttctcacgacggcctgcatgttgccagtctggctgacgataaaatggttcggttttggaggattgacgaggattacccggtgcaggtggctcccttgtctaatggtctatgttgcgcgttctctactgacggatccgtgttagcggcaggcacccacgacggttcggtttacttttgggccactcctcgccaggtgccctctctgcagcatctctgcaggatgtcgatccgccgtgtgatgcccacgcaagaggttcaggagctgcccatcccctctaagctcttagagttcctcagctacaggatttag

SEQ ID NO: 187569 - DNA, 1266 bp, Artificial Sequence
  derived and/or modified sequence
atggccagcttccccccccgggtgaatgagaaggagatcgtgcggctgcggaccatcggggagctgctggccccagctgccccctttgacaagaagtgtggccgggagaactggacagtggcctttgccccagatggcagctactttgcctggagccagggccacaggacagtgaagctggtgccctggagccagtgcctgcagaacttcctgctgcacggcaccaagaatgtgaccaacagcagcagcctgcggctgccccggcagaacagtgatggcggccagaagaacaagccccgggagcacatcatcgactgtggggacatcgtgtggagcctggccttcggcagctctgtgcctgagaagcagagccgctgtgtgaacatcgagtggcaccgcttccgcttcggccaggaccagctgctgctggccaccggcctgaacaacggccgcatcaagatctgggatgtgtacacaggcaagctgctgctgaacctggtggaccacacagaggtggtgcgggacctgacctttgccccagatggcagcctcatcctggtgtctgccagccgggacaagaccctgcgggtgtgggacctgaaggatgatggcaacatgatgaaggtgctgcggggccaccagaactgggtgtacagctgtgccttctccccagacagctccatgctgtgcagcgtgggcgccagcaaggctgtgttcctgtggaacatggacaagtacaccatgatcaggaagctggagggccaccaccatgatgtggtggcctgtgacttctccccagatggagccctgctggccacagccagctatgacaccagggtgtacatctgggacccccacaatggagacatcctgatggagtttggccacctgtttcctccacccacccccatctttgctgggggcgccaatgaccgctgggtgcgctctgtgtccttcagccatgatggcctgcacgtggccagcctggctgatgacaagatggtgcgcttctggagaattgatgaggactaccctgtgcaggtggcccccctgagcaatggcctgtgctgtgccttcagcacagatggctctgtgctggccgccggcacccatgatggctctgtgtacttctgggccaccccccggcaggtgcccagcctgcagcacctgtgcaggatgagcatccggcgggtgatgcccacccaggaggtgcaggagctgcccatccccagcaagctgctggagttcctgagctaccgcatctag

SEQ ID NO: 187570 - DNA, 1266 bp, Artificial Sequence
  derived and/or modified sequence
atggccagcttccccccccgggtgaacgagaaggagatcgtgcggctgcgcacaatcggggagctgttggctcctgctgctcccttcgataagaagtgcggacgggaaaattggacagtggcttttgctccagatggttcctatttcgcttggtcacagggacaccggactgtgaaactggtgccatggagccagtgtcttcaaaattttctgctgcacggcacaaagaatgtcactaacagctctagcctgcgacttcctcggcagaattccgacgggggccagaagaacaaaccccgagaacatattatcgactgtggcgacattgtgtggtctctggctttcggttctagcgttcctgagaagcaatcgcggtgcgtcaatattgagtggcacaggttcagattcgggcaggaccaattacttctggccacagggctcaataacggaagaataaaaatttgggatgtgtataccggcaagctgctcctgaatctggtggaccacaccgaagtcgttagagatctgacatttgcccctgatggcagcctgattctcgtttccgctagtcgagacaaaaccctacgtgtctgggatttgaaagacgacggaaatatgatgaaggtgttacgcgggcaccagaattgggtttattcctgcgcttttagcccggattccagcatgctgtgcagcgtaggggcttctaaggccgtgttcctctggaacatggacaaatatactatgatcagaaagctcgaaggacatcatcacgacgttgtggcctgtgactttagtcccgacggggctttgctggctactgcatcctatgacacaagggtgtatatctgggaccctcataatggggacattctaatggagtttggccacctgtttcctcctccgaccccgatttttgcaggcggagccaatgatcgatgggtaagaagtgtctccttttcgcatgacggcctccacgtcgcatcactggccgacgacaaaatggtcaggttctggcggatcgacgaagactatcccgtccaagtcgcgccgctgagtaatgggctatgttgcgctttcagcacagacgggagcgtgctagcagcaggtacccacgacgggagtgtctatttctgggccacaccccgacaggtaccctctctacaacatctgtgtagaatgtctattcggagggtcatgcccacgcaggaagtgcaggagcttcctattccgtctaaactcttagagtttctgagctatcggatttag

SEQ ID NO: 187571 - DNA, 1266 bp, Artificial Sequence
  derived and/or modified sequence
atggcctctttccctccaagagttaatgaaaaggagattgtccgcctgcgaaccattggtgagctgctggccccagccgcacctttcgacaaaaagtgtgggagagagaactggactgtggcctttgctcctgatggatcttattttgcctggagtcagggacaccggaccgtgaagcttgttccatggtcacaatgcctacagaattttctgctacatgggaccaaaaacgtgacgaactcttcctcattgcgtctacctcgtcagaattccgacggcggacagaaaaacaagcctcgcgagcatataatagattgcggagatattgtgtggtcccttgcatttggctcttccgtgcccgagaagcagtctcgctgtgtgaacattgaatggcatcggttcaggttcggccaggatcagctactgctagccaccggactaaataatgggcgaatcaagatttgggacgtttacaccggcaaacttctgttaaacttggttgaccacactgaagtggtgcgcgacctgactttcgccccagatggctcgctgatcctggtgtcggcctcacgagataaaaccctacgcgtgtgggatctcaaggatgacggcaacatgatgaaggttctaagaggtcaccaaaattgggtgtatagttgcgctttcagccctgacagcagcatgctgtgcagcgtcggcgcttctaaagccgtatttctttggaatatggataaatatactatgatcaggaaactggagggacaccaccacgatgtggtcgcttgcgatttttctcccgacggggctctgttggctacagcttcgtacgatactagggtgtacatttgggatcctcacaatggggacatcttgatggagtttggccatctgttcccccctcccactccgatttttgccggtggggctaatgatcggtgggtgcggtcagtgagtttctcacatgatggtcttcacgtggctagtctggccgacgacaaaatggttcgcttctggcgtatagacgaagattaccccgtccaggtcgctccgctgtccaatggactgtgctgcgcattttctacagacggatctgtcctggcagccggaactcatgatgggagtgtgtatttctgggcaacgccacgccaagtaccgtctttacagcacttgtgtaggatgtccattcgtcgggtgatgcccacccaggaggtgcaggaattgccaattccttctaaactgctggaattcttatcttaccgaatctag

SEQ ID NO: 187572 - DNA, 2844 bp, Artificial Sequence
  derived and/or modified sequence
agatatctccggcgccgcccgccattttgactccagtgtctcgtttgcagtcggcgctttaggggaactgtcttcctccgcaggcgcgaggctgggtacagggtctattgtctgtggttgactccgtactttggtctgaggccttcgggagctttcccgaggcagttagcagaagccgcagcggccgcccccgcccgtctcctctgtccctgggcccgggagggaccaacttggcgtcacgcccctcagcggtcgccactctcttctctgttgttgggtccgcatcgtattcccggaatcagacggtgccccatagatggccagctttcccccgagggtcaacgagaaagagatcgtgagattacgtactataggtgaacttttagctcctgcagctccttttgacaagaaatgtggtcgtgaaaattggactgttgcttttgctccagatggttcatactttgcttggtcacaaggacatcgcacagtaaagcttgttccgtggtcccagtgccttcagaactttctcttgcatggcaccaagaatgttaccaattcaagcagtttaagattgccaagacaaaatagtgatggtggtcagaaaaataagcctcgtgaacatattatagactgtggagatatagtctggagtcttgcttttgggtcatcagttccagaaaaacagagtcgctgtgtaaatatagaatggcatcgcttcagatttggacaagatcagctacttcttgctacagggttgaacaatgggcgtatcaaaatatgggatgtatatacaggaaaactcctccttaacttggtagatcatactgaagtggtcagagatttaacttttgctccagatggaagcttgatcctggtgtcagcttcaagagacaaaactctcagagtatgggacctgaaagatgatggaaacatgatgaaagtattgagggggcatcagaattgggtgtacagctgtgcattctctcctgactcttctatgctgtgttcagtcggagccagtaaagcagttttcctttggaatatggataaatacaccatgatacggaaactagaaggacatcaccatgatgtggtagcttgtgacttttctcctgatggagcattactggctactgcatcttatgatactcgagtatatatctgggatccacataatggagacattctgatggaatttgggcacctgtttcccccacctactccaatatttgctggaggagcaaatgaccggtgggtacgatctgtatcttttagccatgatggactgcatgttgcaagccttgctgatgataaaatggtgaggttctggagaattgatgaggattatccagtgcaagttgcacctttgagcaatggtctttgctgtgccttctctactgatggcagtgttttagctgctgggacacatgacggaagtgtgtatttttgggccactccacggcaggtccctagcctgcaacatttatgtcgcatgtcaatccgaagagtgatgcccacccaagaagttcaggagctgccgattccttccaagcttttggagtttctctcgtatcgtatttagaagattctgccttccctagtagtagggactgacagaatacacttaacacaaacctcaagctttactgacttcaattatctgtttttaaagacgtagaagatttatttaatttgatatgttcttgtactgcattttgatcagttgagcttttaaaatattatttatagacaatagaagtatttctgaacatatcaaatataaatttttttaaagatctaactgtgaaaacatacatacctgtacatatttagatataagctgctatatgttgaatggacccttttgcttttctgatttttagttctgacatgtatatattgcttcagtagagccacaatatgtatctttgctgtaaagtgcaaggaaattttaaattctgggacactgagttagatggtaaatactgacttacgaaagttgaattgggtgaggcgggcaaatcacctgaggtcagcagtttgagactagcctggcaaacatgatgaaaccctgtctctactaaaaatacaaaaaaaaaaaaaattagccaggcgtggtggtgcacacctgtagtcctagctacttgggaggctgaggcaggagaattgcttgaacccaggaggtggaggttgcagtaagccaagatcacaccactgcactccaacctggacaacagagcgagactccatctcaaaaaaaaaaaaaaattgtgttgcctcatacgaaatgtatttggttttgttggagagtgtcagactgatctggaagtgaaacacagtttatgtacagggaaaaggattttattatccttaggaatgtcatccaagacgtagagcttgaatgtgacgttatttaaaaacaacaacaaagaaggcagagccaggatataactagaaaaaggatgtctttttttttttttttactccccctctaaacactgctgctgccttaattttagaaagcagcttactagtttacccttgtggtataaagtattataaattgttgtgaatttgaagaatccgtctactgtattattgctaaatattttgtttatactaagggacaattattttaagaccatggatttaaaaaaaaaaaaaaaaactctgtttctgcaggggatgatattggtgagttgccaaagaagcaatacagcatatctgcttttgccttctgttgtttatcttacctgcagatattaagaatgtatgcattatgtaaaatgctcaattatatatttttgttgagttttttaattaaagacttgtaaaaaaaaaaaa

SEQ ID NO: 187573 - protein, 807 aa, Artificial Sequence
  derived and/or modified sequence
MSKLSFRARALDAAKPLPIYRGKDMPDLNDCVSINRAVPQMPTGMEKEEESEHHLQRAISAQQVFREKKESMVIPVPEAESNVNYYNRLYKGEFKQPKQFIHIQPFNLDNEQPDYDMDSEDETLLNRLNRKMEIKPLQFEIMIDRLEKASSNQLVTLQEAKLLLNEDDYLIKAVYDYWVRKRKNCRGPSLIPQIKQEKRDGSTNNDPYVAFRRRTEKMQTRKNRKNDEASYEKMLKLRREFSRAITILEMIKRREKTKRELLHLTLEVVEKRYHLGDYGGEILNEVKISRSEKELYATPATLHNGNHHKVQECKTKHPHHLSLKEEASDVVRQKKKYPKKPKAEALITSQQPTPETLPVINKSDIKQYDFHSSDEDEFPQVLSPVSEPEEENDPDGPCAFRRRAGCQYYAPRLDQANHSCENSELADLDKLRYRHCLTTLTVPRRCIGFARRRIGRGGRVIMDRISTEHDPVLKQIDPEMLNSFSSSSQTIDFSSNFSRTNASSKHCENRLSLSEILSNIRSCRLQCFQPRLLNLQDSDSEECTSRKPGQTVNNKRVSAASVALLNTSKNGISVTGGITEEQFQTHQQQLVQMQRQQLAQLQQKQQSQHSSQQTHPKAQGSSTSDCMSKTLDSASAHFAASAVVSAPVPSRSEVAKEQNTGHNNINGVVQPSGTSKTLYSTNMALSSSPGISAVQLVRTVGHTTTNHLIPALCTSSPQTLPMNNSCLTNAVHLNNVSVVSPVNVHINTRTSAPSPTALKLATVAASMDRVPKVTPSSAISSIARENHEPERLGLNGIAETTVAMEVT

SEQ ID NO: 187574 - DNA, 2424 bp, Artificial Sequence
  derived and/or modified sequence
atgagcaagctgtcctttagggctagggccctggacgctgcgaaacctttgcctatttaccgaggcaaggatatgcctgatctcaacgattgtgtctcaatcaaccgagctgtgccacagatgcccacaggcatggagaaggaggaagaatctgagcaccacctgcagcgggccatctccgcacagcaggtgttcagagaaaagaaagagagtatggtgatccccgtgcccgaagccgaaagtaacgtcaattactacaaccgtctttacaagggagagtttaagcagcctaagcaattcattcacattcaaccatttaacctagataacgaacagcccgattacgacatggactccgaggacgagaccttgctgaaccgcctgaaccgaaagatggagattaagccattgcagttcgaaatcatgatcgaccggttagaaaaggctagttccaatcagttggtgacgctgcaggaggcgaaactgcttctgaatgaggatgattatctcatcaaggcagtgtatgactactgggtgagaaaacgcaaaaattgcaggggcccatccctcatccctcagatcaagcaggaaaaaagagacgggtctacaaataatgacccttatgtggcgtttagaaggcggacagagaagatgcagaccagaaagaaccggaaaaacgacgaagcttcttacgagaagatgctgaaattacggcgggagttctcccgtgccattactattctggaaatgattaagcggcgcgagaagactaaaagggagctcctccacctgactttagaggtcgtggagaaaaggtaccatttgggggactacggcggggaaatcctaaacgaagtgaagatatcaagaagcgagaaggaattgtacgccactcccgctaccttgcacaatggcaaccatcacaaagttcaggagtgcaagacaaaacatccgcaccatttatctctcaaagaagaagcatctgatgtggttaggcagaagaaaaaatacccgaagaagcctaaggctgaagctctcatcacatctcagcagccgacccctgagacacttcctgttattaataaatcggacatcaagcaatacgattttcattctagcgacgaagatgaattcccacaggtcctgtcaccggtcagtgaacccgaggaggaaaacgatccggatgggccctgcgccttcagaaggcgggccggctgccaatattatgcaccaaggctagaccaagctaatcactcttgtgaaaactccgaactggcagacttggacaaacttcggtatagacattgtctgactacactgaccgttccgagacgttgtatcgggttcgcgcgacggcgtattggcagaggcggacgcgtaataatggataggatatctactgagcacgatccagtcctgaaacaaatagatcccgagatgctcaattcgttttccagtagttcgcaaacaattgacttttccagcaatttttccaggaccaacgcttcttccaagcactgcgaaaatcgactcagcttgagtgagattctttccaacatccggtcttgtcgacttcagtgttttcaaccgagactgctgaatttgcaggattctgattccgaggaatgcaccagcaggaagccgggccagacggtgaataataaacgcgtctcggccgcctccgttgccctcctgaacacatccaagaacggcatcagcgtaacagggggaataaccgaagagcaattccagactcaccaacagcagttagtacagatgcagaggcagcagctggcccaactacaacagaaacagcagtctcaacactccagtcagcagacccaccccaaagcccaggggagttccacatcagattgcatgagcaaaaccctcgactctgcctcagcacattttgcagcctcggccgtggtcagtgctcccgttccttcacggtctgaagtagccaaagagcagaataccggtcataataatattaatggtgttgtgcagcccagtggtacctcaaagactctgtatagtaccaatatggccttgtctagcagcccgggcatatctgccgtccaactcgtgcggaccgtcgggcacactacaacgaatcacctgattccagctctgtgtacctcctctccacaaaccctaccaatgaacaattcatgcctcacaaatgctgtccatctcaacaacgtaagcgtggtcagccctgtcaacgtccatattaatacaaggacatctgcaccctctcctaccgcactaaaactggccacagtggcggcgagcatggaccgcgtccccaaggtgacaccttctagcgccatcagcagcatcgctcgagagaatcacgaacccgagcgactggggttgaacggtattgccgaaactaccgtagcgatggaagtgacttag
